United States Patent Application Publication US 2023/0212319 A1 - sequence listing, part 9

SEQ ID NO: 13618 - protein, 783 aa, Artificial Sequence
  Synthetic Polypeptide
MALPVTALLLPLALLLHAARPEVQLVESGGGLVQPGGSLRLSCAASGFSFSDFWMSWVRQAPGKGLEWVATISQAGSEKDYVDSVKGRFTISRDNAKKSLYLQMNSLRAEDTAVYYCASGVYSFDYRGQGTLVTVSSGTGGGGSGGGGSGGGGSEFDIVMTQSPDSLAVSLGERATINCKSSQSLLNSGDQKNYLTWYQQKPGQPPKLLIYWASTRESGVPDRFSGSGSGTDFTLTISSLQAEDVAVYYCQNDYSYPLTFGQGTKVEIKLEGQPKANPTVTLFPPSSEELQANKATLVCLISDFYPGAVTVAWKADGSPVKAGVETTKPSKQSNNKYAASSYLSLTPEQWKSHRSYSCQVTHEGSTVEKTVAPTECSPIKTDVITMDPKDNCSKDANDTLLLQLTNTSAYYMYLLLLLKSVVYFAIITCCLLRRTAFCCNGEKSRAKRSGSGATNFSLLKQAGDVEENPGPTSMDWIWRILFLVGAATGAHSFEQVQLVQSGAEVKKTGSSVKVSCKASGYTFTDHAIHVWRQAPGQALEWMGHFSPGNTDIKYNDKFKGRVTLTVDRSMSTAYMELSSLRSEDTAMYYCKTSTFFFDYWGQGTMVTVSSTRASTKGPSVFPLAPSSKSTSGGTAALGCLVKDYFPEPVTVSWNSGALTSGVHTFPAVLQSSGLYSLSSVVTVPSSSLGTQTYICNVNHKPSNTKVDKRVEPKSCEVKTDSTDHVKPKETENTKQPSKSCHKPKAIVHTEKVNMMSLTVLGLRMLFAKTVAVNFLLTAKLFFL

SEQ ID NO: 13619 - protein, 782 aa, Artificial Sequence
  Synthetic Polypeptide
MALPVTALLLPLALLLHAARPEVQLVESGGGLVQPGGSLRLSCAASGFSFSDFWMSWVRQAPGKGLEWVATISQAGSEKDYVDSVKGRFTISRDNAKKSLYLQMNSLRAEDTAVYYCASGVYSFDYRGQGTLVTVSSGTGGGGSGGGGSGGGGSEFDIQMTQSPSSLSASVGDRVTITCKASQDVSIAVAWYQQKPGKAPKVLIYSASYRYTGVPDRFSGSGSGTDFTFTISSLQPEDIAVYYCQQHYITPLTFGGGTKVEIKLEGQPKANPTVTLFPPSSEELQANKATLVCLISDFYPGAVTVAWKADGSPVKAGVETTKPSKQSNNKYAASSYLSLTPEQWKSHRSYSCQVTHEGSTVEKTVAPTECSPIKTDVITMDPKDNCSKDANDTLLLQLTNTSAYYMYLLLLLKSVVYFAIITCCLLRRTAFCCNGEKSRAKRSGSGATNFSLLKQAGDVEENPGPTSMDWIWRILFLVGAATGAHSFEQIQLVQSGHEVKKPGASVKVSCKASGYTFTNYGMNWVRQAPGQGLEWMGWINTKTGEPTYAEEFKGRFVFSLETSASTAYLQISSLKAEDTAMYFCGRGGYGSSYWYFDVWGQGTTVTVSSTRASTKGPSVFPLAPSSKSTSGGTAALGCLVKDYFPEPVTVSWNSGALTSGVHTFPAVLQSSGLYSLSSVVTVPSSSLGTQTYICNVNHKPSNTKVDKRVEPKSCEVKTDSTDHVKPKETENTKQPSKSCHKPKAIVHTEKVNMMSLTVLGLRMLFAKTVAVNFLLTAKLFFL

SEQ ID NO: 13620 - protein, 784 aa, Artificial Sequence
  Synthetic Polypeptide
MALPVTALLLPLALLLHAARPEVQLVESGGGLVQPGGSLRLSCAASGFSFSDFWMSWVRQAPGKGLEWVATISQAGSEKDYVDSVKGRFTISRDNAKKSLYLQMNSLRAEDTAVYYCASGVYSFDYRGQGTLVTVSSGTGGGGSGGGGSGGGGSEFDIVMTQSPDSLAVSLGERATINCRASKSVSTSGYSYMHWYQQKPGQPPKLLIYLASNLESGVPDRFSGSGSGTDFTLTISSLQAEDVAVYYCQHSRELPYTFGQGTKLEIKLEGQPKANPTVTLFPPSSEELQANKATLVCLISDFYPGAVTVAWKADGSPVKAGVETTKPSKQSNNKYAASSYLSLTPEQWKSHRSYSCQVTHEGSTVEKTVAPTECSPIKTDVITMDPKDNCSKDANDTLLLQLTNTSAYYMYLLLLLKSVVYFAIITCCLLRRTAFCCNGEKSRAKRSGSGATNFSLLKQAGDVEENPGPTSMDWIWRILFLVGAATGAHSFEQVQLQESGPGLVKPSETLSLTCTVSGGSISSYGVHWIRQPPGKGLEWIGVIWTSGVTDYNSALMGRVTISVDTSKNQFSLKLSSVTAADTAVYYCARDGDYDRYTMDYWGQGTLVTVSSTRASTKGPSVFPLAPSSKSTSGGTAALGCLVKDYFPEPVTVSWNSGALTSGVHTFPAVLQSSGLYSLSSVVTVPSSSLGTQTYICNVNHKPSNTKVDKRVEPKSCEVKTDSTDHVKPKETENTKQPSKSCHKPKAIVHTEKVNMMSLTVLGLRMLFAKTVAVNFLLTAKLFFL

SEQ ID NO: 13621 - protein, 784 aa, Artificial Sequence
  Synthetic Polypeptide
MALPVTALLLPLALLLHAARPEVQLVESGGGLVQPGGSLRLSCAASGFSFSDFWMSWVRQAPGKGLEWVATISQAGSEKDYVDSVKGRFTISRDNAKKSLYLQMNSLRAEDTAVYYCASGVYSFDYRGQGTLVTVSSGTGGGGSGGGGSGGGGSEFDIQMTQSPSSLSASVGDRVTITCRASQSIGTSLHWYQQKPGKAPKLLIKFASRLQSGVPSRFSGSGSGTDFTLTISSLQPEDFATYYCQQSPGFPPTFGQGTKLEIKRLEGQPKANPTVTLFPPSSEELQANKATLVCLISDFYPGAVTVAWKADGSPVKAGVETTKPSKQSNNKYAASSYLSLTPEQWKSHRSYSCQVTHEGSTVEKTVAPTECSPIKTDVITMDPKDNCSKDANDTLLLQLTNTSAYYMYLLLLLKSVVYFAIITCCLLRRTAFCCNGEKSRAKRSGSGATNFSLLKQAGDVEENPGPTSMDWIWRILFLVGAATGAHSFEQVQLVESGGGLVKPGGSLRLSCAASGFSITTSGYYWTWIRQFPGKGLEWMGYIGYNSKTYYNPALKSRITISRDNAKNSLYLQMNSLRAEDTAVYYCARSLYGGYKDAFDSWGQGTLVTVSSTRASTKGPSVFPLAPSSKSTSGGTAALGCLVKDYFPEPVTVSWNSGALTSGVHTFPAVLQSSGLYSLSSVVTVPSSSLGTQTYICNVNHKPSNTKVDKRVEPKSCEVKTDSTDHVKPKETENTKQPSKSCHKPKAIVHTEKVNMMSLTVLGLRMLFAKTVAVNFLLTAKLFFL

SEQ ID NO: 13622 - protein, 789 aa, Artificial Sequence
  Synthetic Polypeptide
MALPVTALLLPLALLLHAARPEVQLVESGGGLVQPGGSLRLSCAASGFSFSDFWMSWVRQAPGKGLEWVATISQAGSEKDYVDSVKGRFTISRDNAKKSLYLQMNSLRAEDTAVYYCASGVYSFDYRGQGTLVTVSSGTGGGGSGGGGSGGGGSEFDEIVLTQSPLSLPVTPGEPASISCRSSQSLLHSIGYNYLDWYLQKPGQSPQLLIYLGSNRASGVPDRFSGSGSGTDFTLKISRVEAEDVGVYYCMQALQTPLTFGGGTKVEIKRLEGQPKANPTVTLFPPSSEELQANKATLVCLISDFYPGAVTVAWKADGSPVKAGVETTKPSKQSNNKYAASSYLSLTPEQWKSHRSYSCQVTHEGSTVEKTVAPTECSPIKTDVITMDPKDNCSKDANDTLLLQLTNTSAYYMYLLLLLKSVVYFAIITCCLLRRTAFCCNGEKSRAKRSGSGATNFSLLKQAGDVEENPGPTSMDWIWRILFLVGAATGAHSFEEVQLVESGGGVVQPGRSLRLSCAASGFTFRSYGMHWVRQAPGKGLEWVAVISYDGSNKYYTDSVNGRFTISRDNSKNTLYLQMNSLRAEDTAVYYCARGGGYYETSGPDYWGQGTLVTVSSTRASTKGPSVFPLAPSSKSTSGGTAALGCLVKDYFPEPVTVSWNSGALTSGVHTFPAVLQSSGLYSLSSVVTVPSSSLGTQTYICNVNHKPSNTKVDKRVEPKSCEVKTDSTDHVKPKETENTKQPSKSCHKPKAIVHTEKVNMMSLTVLGLRMLFAKTVAVNFLLTAKLFFL

SEQ ID NO: 13623 - protein, 787 aa, Artificial Sequence
  Synthetic Polypeptide
MALPVTALLLPLALLLHAARPEVQLVESGGGLVQPGGSLRLSCAASGFSFSDFWMSWVRQAPGKGLEWVATISQAGSEKDYVDSVKGRFTISRDNAKKSLYLQMNSLRAEDTAVYYCASGVYSFDYRGQGTLVTVSSGTGGGGSGGGGSGGGGSEFDDVVMTQSPLSLPVTPGEPASISCRSSQSLLHSIGYNYLHWFLQKPGQSPQLLIYLGSNRASGVPDRFSGSGSGTDFTLKISRVEAEDVGVYYCMQALQTPPTFGQGTRLEIKRLEGQPKANPTVTLFPPSSEELQANKATLVCLISDFYPGAVTVAWKADGSPVKAGVETTKPSKQSNNKYAASSYLSLTPEQWKSHRSYSCQVTHEGSTVEKTVAPTECSPIKTDVITMDPKDNCSKDANDTLLLQLTNTSAYYMYLLLLLKSVVYFAIITCCLLRRTAFCCNGEKSRAKRSGSGATNFSLLKQAGDVEENPGPTSMDWIWRILFLVGAATGAHSFEQLQLQESGPGLVKPSGTLSLTCAVSGGSISSSNWWSWVRQPPGKGLEWIGEIYHSGSTNYNPSLKSRVTISVDKSKNQFSLKLSSVTAADTAVYYCVGSPYGDYVLDYWGQGTLVTVSSTRASTKGPSVFPLAPSSKSTSGGTAALGCLVKDYFPEPVTVSWNSGALTSGVHTFPAVLQSSGLYSLSSVVTVPSSSLGTQTYICNVNHKPSNTKVDKRVEPKSCEVKTDSTDHVKPKETENTKQPSKSCHKPKAIVHTEKVNMMSLTVLGLRMLFAKTVAVNFLLTAKLFFL

SEQ ID NO: 13624 - protein, 785 aa, Artificial Sequence
  Synthetic Polypeptide
MALPVTALLLPLALLLHAARPEVQLVESGGGLVQPGGSLRLSCAASGFSFSDFWMSWVRQAPGKGLEWVATISQAGSEKDYVDSVKGRFTISRDNAKKSLYLQMNSLRAEDTAVYYCASGVYSFDYRGQGTLVTVSSGTGGGGSGGGGSGGGGSEFDEIVLTQSPGTLSLSLGERATLSCRASQSISSSFLAWYQQKPGQAPKLLIYAASTRATGIPDRFSGSGSGTDFTLTISRLEPEDFAVYYCQQYGRSLSFGGGTKVEVKLEGQPKANPTVTLFPPSSEELQANKATLVCLISDFYPGAVTVAWKADGSPVKAGVETTKPSKQSNNKYAASSYLSLTPEQWKSHRSYSCQVTHEGSTVEKTVAPTECSPIKTDVITMDPKDNCSKDANDTLLLQLTNTSAYYMYLLLLLKSVVYFAIITCCLLRRTAFCCNGEKSRAKRSGSGATNFSLLKQAGDVEENPGPTSMDWIWRILFLVGAATGAHSFEQVQLQQSGPGLVKPSQTLSLTCAISGDSVSGNSATWNWIRQSPSRGLEWLGRTYYRSKWNHDYAESVKSRITINPDTSKNQFSLQLNSVTPEDTAVYYCARGDSSSWYAFDYWGQGTLVTVSSTRASTKGPSVFPLAPSSKSTSGGTAALGCLVKDYFPEPVTVSWNSGALTSGVHTFPAVLQSSGLYSLSSVVTVPSSSLGTQTYICNVNHKPSNTKVDKRVEPKSCEVKTDSTDHVKPKETENTKQPSKSCHKPKAIVHTEKVNMMSLTVLGLRMLFAKTVAVNFLLTAKLFFL

SEQ ID NO: 13625 - protein, 784 aa, Artificial Sequence
  Synthetic Polypeptide
MALPVTALLLPLALLLHAARPEVQLVESGGGLVQPGGSLRLSCAASGFSFSDFWMSWVRQAPGKGLEWVATISQAGSEKDYVDSVKGRFTISRDNAKKSLYLQMNSLRAEDTAVYYCASGVYSFDYRGQGTLVTVSSGTGGGGSGGGGSGGGGSEFDQSVVTQPPSVSVAPGKTARITCGRNNIGSKSVHWYQQKPGQAPVLVVYDDSDRPSGIPERFSGSNSGNTATLTISRVEAGDEADYYCQVWDSSSDHVVFGGGTKLTVLGLEGQPKANPTVTLFPPSSEELQANKATLVCLISDFYPGAVTVAWKADGSPVKAGVETTKPSKQSNNKYAASSYLSLTPEQWKSHRSYSCQVTHEGSTVEKTVAPTECSPIKTDVITMDPKDNCSKDANDTLLLQLTNTSAYYMYLLLLLKSVVYFAIITCCLLRRTAFCCNGEKSRAKRSGSGATNFSLLKQAGDVEENPGPTSMDWIWRILFLVGAATGAHSFEVQLVQSGGGVMRPGGSLRLSCAASGFTFDDYGMSWVRQAPGKGLEWVSGINWNGGSTGYADSVRGRFTISRDNAKNSLYLQMNSLRAEDTALYYCARERGYGYHDPHDYWGQGTLVTVSSTRASTKGPSVFPLAPSSKSTSGGTAALGCLVKDYFPEPVTVSWNSGALTSGVHTFPAVLQSSGLYSLSSVVTVPSSSLGTQTYICNVNHKPSNTKVDKRVEPKSCEVKTDSTDHVKPKETENTKQPSKSCHKPKAIVHTEKVNMMSLTVLGLRMLFAKTVAVNFLLTAKLFFL

SEQ ID NO: 13626 - protein, 797 aa, Artificial Sequence
  Synthetic Polypeptide
MALPVTALLLPLALLLHAARPEVQLVESGGGLVQPGGSLRLSCAASGFSFSDFWMSWVRQAPGKGLEWVATISQAGSEKDYVDSVKGRFTISRDNAKKSLYLQMNSLRAEDTAVYYCASGVYSFDYRGQGTLVTVSSGTGGGGSGGGGSGGGGSEFEQKLISEEDLEFQAVVTQPPSASGTPGQRVTISCSGSSSNIGSNTVNWYQQVPGTAPKLLIYSNNQRPSGVPDRFSGSKSGTSASLAISGLQSEDEADYYCAAWDDSLNGWVFGGGTKLTVLLEGQPKANPTVTLFPPSSEELQANKATLVCLISDFYPGAVTVAWKADGSPVKAGVETTKPSKQSNNKYAASSYLSLTPEQWKSHRSYSCQVTHEGSTVEKTVAPTECSPIKTDVITMDPKDNCSKDANDTLLLQLTNTSAYYMYLLLLLKSVVYFAIITCCLLRRTAFCCNGEKSRAKRSGSGATNFSLLKQAGDVEENPGPTSMDWIWRILFLVGAATGAHSFEQMQLVQSGAEVKEPGESLRISCKGSGYSFTNFWISWVRQMPGKGLEWMGRVDPGYSYSTYSPSFQGHVTISADKSTSTAYLQWNSLKASDTAMYYCARVQYSGYYDWFDPWGQGTLVTVSSTRASTKGPSVFPLAPSSKSTSGGTAALGCLVKDYFPEPVTVSWNSGALTSGVHTFPAVLQSSGLYSLSSVVTVPSSSLGTQTYICNVNHKPSNTKVDKRVEPKSCEVKTDSTDHVKPKETENTKQPSKSCHKPKAIVHTEKVNMMSLTVLGLRMLFAKTVAVNFLLTAKLFFL

SEQ ID NO: 13627 - protein, 791 aa, Artificial Sequence
  Synthetic Polypeptide
MALPVTALLLPLALLLHAARPEVQLVESGGGLVQPGGSLRLSCAASGFSFSDFWMSWVRQAPGKGLEWVATISQAGSEKDYVDSVKGRFTISRDNAKKSLYLQMNSLRAEDTAVYYCASGVYSFDYRGQGTLVTVSSGTGGGGSGGGGSGGGGSEFEQKLISEEDLEFDIQMTQSPSTLSASVGDRVTITCRASQNINKWLAWYQQRPGKAPQLLIYKASSLESGVPSRFSGSGSGTEYTLTISSLQPDDFATYYCQQYNSYATFGQGTKVEIKRLEGQPKANPTVTLFPPSSEELQANKATLVCLISDFYPGAVTVAWKADGSPVKAGVETTKPSKQSNNKYAASSYLSLTPEQWKSHRSYSCQVTHEGSTVEKTVAPTECSPIKTDVITMDPKDNCSKDANDTLLLQLTNTSAYYMYLLLLLKSVVYFAIITCCLLRRTAFCCNGEKSRAKRSGSGATNFSLLKQAGDVEENPGPTSMDWIWRILFLVGAATGAHSFEQVQLVQSGAEVKKPGESLKISCKGSGYNFSNKWIGWVRQLPGRGLEWIAIIYPGYSDITYSPSFQGRVTISADTSINTAYLHWHSLKASDTAMYYCVRHTALAGFDYWGLGTLVTVSSTRASTKGPSVFPLAPSSKSTSGGTAALGCLVKDYFPEPVTVSWNSGALTSGVHTFPAVLQSSGLYSLSSVVTVPSSSLGTQTYICNVNHKPSNTKVDKRVEPKSCEVKTDSTDHVKPKETENTKQPSKSCHKPKAIVHTEKVNMMSLTVLGLRMLFAKTVAVNFLLTAKLFFL

SEQ ID NO: 13628 - protein, 782 aa, Artificial Sequence
  Synthetic Polypeptide
MALPVTALLLPLALLLHAARPEVQLVESGGGLVQPGGSLRLSCAASGFSFSDFWMSWVRQAPGKGLEWVATISQAGSEKDYVDSVKGRFTISRDNAKKSLYLQMNSLRAEDTAVYYCASGVYSFDYRGQGTLVTVSSGTGGGGSGGGGSGGGGSEFIVLTQSPASLAVSLGQRATISCRASESVDNYGNTFMHWYQQKPGQPPKLLIYRASNLESGIPARFSGSGSRTDFTLTINPVEADDVATYYCQQSNEDPPTFGAGTKLELKLEGQPKANPTVTLFPPSSEELQANKATLVCLISDFYPGAVTVAWKADGSPVKAGVETTKPSKQSNNKYAASSYLSLTPEQWKSHRSYSCQVTHEGSTVEKTVAPTECSPIKTDVITMDPKDNCSKDANDTLLLQLTNTSAYYMYLLLLLKSVVYFAIITCCLLRRTAFCCNGEKSRAKRSGSGATNFSLLKQAGDVEENPGPTSMDWIWRILFLVGAATGAHSFEQIQLVQSGPELKKPGETVKISCKASGYIFTNYGMNWVKQAPGKSFKWMGWINTYTGESTYSADFKGRFAFSLETSASTAYLHINDLKNEDTATYFCARSGGYDPMDYWGQGTSVTVSSTRASTKGPSVFPLAPSSKSTSGGTAALGCLVKDYFPEPVTVSWNSGALTSGVHTFPAVLQSSGLYSLSSVVTVPSSSLGTQTYICNVNHKPSNTKVDKRVEPKSCEVKTDSTDHVKPKETENTKQPSKSCHKPKAIVHTEKVNMMSLTVLGLRMLFAKTVAVNFLLTAKLFFL

SEQ ID NO: 13629 - protein, 781 aa, Artificial Sequence
  Synthetic Polypeptide
MALPVTALLLPLALLLHAARPEVQLVESGGGLVQPGGSLRLSCAASGFSFSDFWMSWVRQAPGKGLEWVATISQAGSEKDYVDSVKGRFTISRDNAKKSLYLQMNSLRAEDTAVYYCASGVYSFDYRGQGTLVTVSSGTGGGGSGGGGSGGGGSEFEIVLTQSPGTLSLSPGERATLSCRASQSVSNTYLAWYHQRPGQAPRLLIYGASSRATGIPDRFSGSGSGTDFALTISSLEPEDFAVYYCQQYSNSWTFGQGTKVEIKRLEGQPKANPTVTLFPPSSEELQANKATLVCLISDFYPGAVTVAWKADGSPVKAGVETTKPSKQSNNKYAASSYLSLTPEQWKSHRSYSCQVTHEGSTVEKTVAPTECSPIKTDVITMDPKDNCSKDANDTLLLQLTNTSAYYMYLLLLLKSVVYFAIITCCLLRRTAFCCNGEKSRAKRSGSGATNFSLLKQAGDVEENPGPTSMDWIWRILFLVGAATGAHSFEQVQLVESGGGVVQPGRSLRLSCAASGFTFSSYDMHWVRQAPGKGLEWVAVISYDGTNEYYADSVKGRFTISRDTSKNTLYLQMNSLRAEDTAVYYCARERYFDWSFDYWGQGTLVSVSSTRASTKGPSVFPLAPSSKSTSGGTAALGCLVKDYFPEPVTVSWNSGALTSGVHTFPAVLQSSGLYSLSSVVTVPSSSLGTQTYICNVNHKPSNTKVDKRVEPKSCEVKTDSTDHVKPKETENTKQPSKSCHKPKAIVHTEKVNMMSLTVLGLRMLFAKTVAVNFLLTAKLFFL

SEQ ID NO: 13630 - protein, 780 aa, Artificial Sequence
  Synthetic Polypeptide
MALPVTALLLPLALLLHAARPEVQLVESGGGLVQPGGSLRLSCAASGFSFSDFWMSWVRQAPGKGLEWVATISQAGSEKDYVDSVKGRFTISRDNAKKSLYLQMNSLRAEDTAVYYCASGVYSFDYRGQGTLVTVSSGTGGGGSGGGGSGGGGSEFELTQDPAVSVALGQTVRITCQGDSLRSNYANWYQQKPGQAPVLVIYGQNNRPSGIPDRFSGSSSGNTASLTITGAQAADEADYYCDSRVSTGNHVVFGGGTKLTVLGQLEGQPKANPTVTLFPPSSEELQANKATLVCLISDFYPGAVTVAWKADGSPVKAGVETTKPSKQSNNKYAASSYLSLTPEQWKSHRSYSCQVTHEGSTVEKTVAPTECSPIKTDVITMDPKDNCSKDANDTLLLQLTNTSAYYMYLLLLLKSVVYFAIITCCLLRRTAFCCNGEKSRAKRSGSGATNFSLLKQAGDVEENPGPTSMDWIWRILFLVGAATGAHSFEEVQLVQSGAEVKKPGASVKVSCKASGYTFTSYAMHWVRQAPGQRLEWMGWINAGNGNTKYSQKFQGRVTITRDTSASTAYMELSSLRSEDTAVYYCARDISYGSFDYWGQGTLVTVSSTRASTKGPSVFPLAPSSKSTSGGTAALGCLVKDYFPEPVTVSWNSGALTSGVHTFPAVLQSSGLYSLSSVVTVPSSSLGTQTYICNVNHKPSNTKVDKRVEPKSCEVKTDSTDHVKPKETENTKQPSKSCHKPKAIVHTEKVNMMSLTVLGLRMLFAKTVAVNFLLTAKLFFL

SEQ ID NO: 13631 - protein, 782 aa, Artificial Sequence
  Synthetic Polypeptide
MALPVTALLLPLALLLHAARPEVQLVESGGGLVQPGGSLRLSCAASGFSFSDFWMSWVRQAPGKGLEWVATISQAGSEKDYVDSVKGRFTISRDNAKKSLYLQMNSLRAEDTAVYYCASGVYSFDYRGQGTLVTVSSGTGGGGSGGGGSGGGGSEFDIVLTQTPATLSVTPGDSVSLSCRASQSISNNLHWYQQKSHESPRLLIKNASQSISGIPSKFSGSGSGTDFTLRINSVETEDFGMYFCQQSNSWPYTFGSGTKLEIKLEGQPKANPTVTLFPPSSEELQANKATLVCLISDFYPGAVTVAWKADGSPVKAGVETTKPSKQSNNKYAASSYLSLTPEQWKSHRSYSCQVTHEGSTVEKTVAPTECSPIKTDVITMDPKDNCSKDANDTLLLQLTNTSAYYMYLLLLLKSVVYFAIITCCLLRRTAFCCNGEKSRAKRSGSGATNFSLLKQAGDVEENPGPTSMDWIWRILFLVGAATGAHSFEQVKLQQSGPELVKPGASVKISCKASGYSFTGYYMHWVKQSHGNILDWIGYIYPYNGVSSYNQKFKGKATLTVDKSSSTAYMELRSLTSEDSAVYYCARERGLYQLRAMDYWGQGTSVTVSSTRASTKGPSVFPLAPSSKSTSGGTAALGCLVKDYFPEPVTVSWNSGALTSGVHTFPAVLQSSGLYSLSSVVTVPSSSLGTQTYICNVNHKPSNTKVDKRVEPKSCEVKTDSTDHVKPKETENTKQPSKSCHKPKAIVHTEKVNMMSLTVLGLRMLFAKTVAVNFLLTAKLFFL

SEQ ID NO: 13632 - protein, 773 aa, Artificial Sequence
  Synthetic Polypeptide
MALPVTALLLPLALLLHAARPEVQLVESGGGLVQPGGSLRLSCAASGFSFSDFWMSWVRQAPGKGLEWVATISQAGSEKDYVDSVKGRFTISRDNAKKSLYLQMNSLRAEDTAVYYCASGVYSFDYRGQGTLVTVSSGTGGGGSGGGGSGGGGSEFDIVMTQTPAIMSASPGQKVTITCSASSSVNYMHWYQQKLGSSPKLWIYDTSKLAPGVPARFSGSGSGTSYSLTISSMEAEDAASYFCHQWSSYPYTFGSGTKLEIKLEGQPKANPTVTLFPPSSEELQANKATLVCLISDFYPGAVTVAWKADGSPVKAGVETTKPSKQSNNKYAASSYLSLTPEQWKSHRSYSCQVTHEGSTVEKTVAPTECSPIKTDVITMDPKDNCSKDANDTLLLQLTNTSAYYMYLLLLLKSVVYFAIITCCLLRRTAFCCNGEKSRAKRSGSGATNFSLLKQAGDVEENPGPTSMDWIWRILFLVGAATGAHSFEEVQLQESGPDLVKPSQSLSLTCTVTGYSITSGYGWHWIRQFPGNKLEWMGYIHYSGSTTYNPSLKSRISISRDTSKNQFFLQLNSVTTEDTATYYCARSLRYWGQGTTLTVSSTRASTKGPSVFPLAPSSKSTSGGTAALGCLVKDYFPEPVTVSWNSGALTSGVHTFPAVLQSSGLYSLSSVVTVPSSSLGTQTYICNVNHKPSNTKVDKRVEPKSCEVKTDSTDHVKPKETENTKQPSKSCHKPKAIVHTEKVNMMSLTVLGLRMLFAKTVAVNFLLTAKLFFL

SEQ ID NO: 13633 - protein, 776 aa, Artificial Sequence
  Synthetic Polypeptide
MALPVTALLLPLALLLHAARPEVQLVESGGGLVQPGGSLRLSCAASGFSFSDFWMSWVRQAPGKGLEWVATISQAGSEKDYVDSVKGRFTISRDNAKKSLYLQMNSLRAEDTAVYYCASGVYSFDYRGQGTLVTVSSGTGGGGSGGGGSGGGGSEFDIQMTQSPSSLSASVGDRVTITCSATSSISYMHWYQQKPGKAPKGWIYDTSKLAHGVPSRFSGSGSGTDFTLTISSLQPEDFATYYCHQRRSYPFTFGQGTKVEIKLEGQPKANPTVTLFPPSSEELQANKATLVCLISDFYPGAVTVAWKADGSPVKAGVETTKPSKQSNNKYAASSYLSLTPEQWKSHRSYSCQVTHEGSTVEKTVAPTECSPIKTDVITMDPKDNCSKDANDTLLLQLTNTSAYYMYLLLLLKSVVYFAIITCCLLRRTAFCCNGEKSRAKRSGSGATNFSLLKQAGDVEENPGPTSMDWIWRILFLVGAATGAHSFEEVQLVQSGAEVKKPGASVKVSCKASGYTFTNFWIHWVRQAPGQGLEWIGEIDPSDSYTNYNQKFKGRVTITRDTSTSTAYLELSSLRSEDTAVYYCAREITTVDYWGQGTLVTVSSTRASTKGPSVFPLAPSSKSTSGGTAALGCLVKDYFPEPVTVSWNSGALTSGVHTFPAVLQSSGLYSLSSVVTVPSSSLGTQTYICNVNHKPSNTKVDKRVEPKSCEVKTDSTDHVKPKETENTKQPSKSCHKPKAIVHTEKVNMMSLTVLGLRMLFAKTVAVNFLLTAKLFFL

SEQ ID NO: 13634 - protein, 783 aa, Artificial Sequence
  Synthetic Polypeptide
MALPVTALLLPLALLLHAARPEVQLVESGGGLVQPGGSLRLSCAASGFSFSDFWMSWVRQAPGKGLEWVATISQAGSEKDYVDSVKGRFTISRDNAKKSLYLQMNSLRAEDTAVYYCASGVYSFDYRGQGTLVTVSSGTGGGGSGGGGSGGGGSEFDIQMTQSPSSLSASVGDRVTITCKASQGFNKYVAWYQQKPGKAPKLLIYYTSTLQPGVPSRFSGSGSGRDYTLTISSLQPEDFATYYCLQYGNLLYAFGQGTKVEIKRLEGQPKANPTVTLFPPSSEELQANKATLVCLISDFYPGAVTVAWKADGSPVKAGVETTKPSKQSNNKYAASSYLSLTPEQWKSHRSYSCQVTHEGSTVEKTVAPTECSPIKTDVITMDPKDNCSKDANDTLLLQLTNTSAYYMYLLLLLKSVVYFAIITCCLLRRTAFCCNGEKSRAKRSGSGATNFSLLKQAGDVEENPGPTSMDWIWRILFLVGAATGAHSFEEVQLVQSGAEVKKPGASVKVSCKASGYTFTSYWIGWVRQAPGQGLEWIGDIYPGGGYTNYNEKFKGRVTITRDTSTSTAYLELSSLRSEDTAVYYCARLDGSSYRGAMDSWGQGTLVTVSSTRASTKGPSVFPLAPSSKSTSGGTAALGCLVKDYFPEPVTVSWNSGALTSGVHTFPAVLQSSGLYSLSSVVTVPSSSLGTQTYICNVNHKPSNTKVDKRVEPKSCEVKTDSTDHVKPKETENTKQPSKSCHKPKAIVHTEKVNMMSLTVLGLRMLFAKTVAVNFLLTAKLFFL

SEQ ID NO: 13635 - protein, 779 aa, Artificial Sequence
  Synthetic Polypeptide
MALPVTALLLPLALLLHAARPEVQLVESGGGLVQPGGSLRLSCAASGFSFSDFWMSWVRQAPGKGLEWVATISQAGSEKDYVDSVKGRFTISRDNAKKSLYLQMNSLRAEDTAVYYCASGVYSFDYRGQGTLVTVSSGTGGGGSGGGGSGGGGSEFDIQMTQSPSSLSASVGDRVTITCRASQDIRYYLNWYQQKPGKAPKLLIYVASSLQSGVPSRFSGSGSGTEFTLTVSSLQPEDFATYYCLQVYSTPRTFGQGTKVEIKLEGQPKANPTVTLFPPSSEELQANKATLVCLISDFYPGAVTVAWKADGSPVKAGVETTKPSKQSNNKYAASSYLSLTPEQWKSHRSYSCQVTHEGSTVEKTVAPTECSPIKTDVITMDPKDNCSKDANDTLLLQLTNTSAYYMYLLLLLKSVVYFAIITCCLLRRTAFCCNGEKSRAKRSGSGATNFSLLKQAGDVEENPGPTSMDWIWRILFLVGAATGAHSFEEVQLVESGGGLAKPGGSLRLSCAASGFRFTFNNYYMDWVRQAPGQGLEWVSRISSSGDPTWYADSVKGRFTISRENAKNTLFLQMNSLRAEDTAVYYCASLTTGSDSWGQGVLVTVSSTRASTKGPSVFPLAPSSKSTSGGTAALGCLVKDYFPEPVTVSWNSGALTSGVHTFPAVLQSSGLYSLSSVVTVPSSSLGTQTYICNVNHKPSNTKVDKRVEPKSCEVKTDSTDHVKPKETENTKQPSKSCHKPKAIVHTEKVNMMSLTVLGLRMLFAKTVAVNFLLTAKLFFL

SEQ ID NO: 13636 - protein, 780 aa, Artificial Sequence
  Synthetic Polypeptide
MALPVTALLLPLALLLHAARPEVQLVESGGGLVQPGGSLRLSCAASGFSFSDFWMSWVRQAPGKGLEWVATISQAGSEKDYVDSVKGRFTISRDNAKKSLYLQMNSLRAEDTAVYYCASGVYSFDYRGQGTLVTVSSGTGGGGSGGGGSGGGGSEFEIVMTQSPATLSVSPGERATLSCRASQSVSRNLAWYQQKPGQAPRLLIYGASTRATGIPARFSGSGSGTEFTLTIGSLQSEDFAVYYCQQYKTWPRTFGQGTNVEIKLEGQPKANPTVTLFPPSSEELQANKATLVCLISDFYPGAVTVAWKADGSPVKAGVETTKPSKQSNNKYAASSYLSLTPEQWKSHRSYSCQVTHEGSTVEKTVAPTECSPIKTDVITMDPKDNCSKDANDTLLLQLTNTSAYYMYLLLLLKSVVYFAIITCCLLRRTAFCCNGEKSRAKRSGSGATNFSLLKQAGDVEENPGPTSMDWIWRILFLVGAATGAHSFEQVQLQQWGAGLLKPSETLSLTCAVFGGSFSGYYWSWIRQPPGKGLEWIGEINHRGNTNDNPSLKSRVTISVDTSKNQFALKLSSVTAADTAVYYCARERGYTYGNFDHWGQGTLVTVSSTRASTKGPSVFPLAPSSKSTSGGTAALGCLVKDYFPEPVTVSWNSGALTSGVHTFPAVLQSSGLYSLSSVVTVPSSSLGTQTYICNVNHKPSNTKVDKRVEPKSCEVKTDSTDHVKPKETENTKQPSKSCHKPKAIVHTEKVNMMSLTVLGLRMLFAKTVAVNFLLTAKLFFL

SEQ ID NO: 13637 - protein, 781 aa, Artificial Sequence
  Synthetic Polypeptide
MALPVTALLLPLALLLHAARPEVQLVESGGGLVQPGGSLRLSCAASGFSFSDFWMSWVRQAPGKGLEWVATISQAGSEKDYVDSVKGRFTISRDNAKKSLYLQMNSLRAEDTAVYYCASGVYSFDYRGQGTLVTVSSGTGGGGSGGGGSGGGGSEFEIVMTPSSATLSVSPGERATLSCRASQSVSRNLAWYQQKPGQAPRLLIYGASTRATGIPARFSGSGSGTEFTLTISSLQSEDFAVYYCHQYSNWMCSFGQGTKLEIKLEGQPKANPTVTLFPPSSEELQANKATLVCLISDFYPGAVTVAWKADGSPVKAGVETTKPSKQSNNKYAASSYLSLTPEQWKSHRSYSCQVTHEGSTVEKTVAPTECSPIKTDVITMDPKDNCSKDANDTLLLQLTNTSAYYMYLLLLLKSVVYFAIITCCLLRRTAFCCNGEKSRAKRSGSGATNFSLLKQAGDVEENPGPTSMDWIWRILFLVGAATGAHSFEEVQLLESGGGLVQPGGSLRLSCAASGFTFSRYAMNWVRQAPGKGLEWVSGISGSGGRTYYADSVKGRFTISRDNSKNTLYLQMNSLRAEDTAVYYCAKDRDFWSGPFDYWGQGTLVTVSSTRASTKGPSVFPLAPSSKSTSGGTAALGCLVKDYFPEPVTVSWNSGALTSGVHTFPAVLQSSGLYSLSSVVTVPSSSLGTQTYICNVNHKPSNTKVDKRVEPKSCEVKTDSTDHVKPKETENTKQPSKSCHKPKAIVHTEKVNMMSLTVLGLRMLFAKTVAVNFLLTAKLFFL

SEQ ID NO: 13638 - protein, 786 aa, Artificial Sequence
  Synthetic Polypeptide
MALPVTALLLPLALLLHAARPEVQLVESGGGLVQPGGSLRLSCAASGFSFSDFWMSWVRQAPGKGLEWVATISQAGSEKDYVDSVKGRFTISRDNAKKSLYLQMNSLRAEDTAVYYCASGVYSFDYRGQGTLVTVSSGTGGGGSGGGGSGGGGSEFDIQMTQSPSSLSASVGDRVTITCKASKNIRSYLAWYQQKPGKAPKLLIYSGSTLHSGVPSRFSGSGSGTDFTLTISSLQPEDFATYYCQQHHEYPLTFGQGTKVEIKRLEGQPKANPTVTLFPPSSEELQANKATLVCLISDFYPGAVTVAWKADGSPVKAGVETTKPSKQSNNKYAASSYLSLTPEQWKSHRSYSCQVTHEGSTVEKTVAPTECSPIKTDVITMDPKDNCSKDANDTLLLQLTNTSAYYMYLLLLLKSVVYFAIITCCLLRRTAFCCNGEKSRAKRSGSGATNFSLLKQAGDVEENPGPTSMDWIWRILFLVGAATGAHSFEQVQLQESGPGLVKPSETLSLTCTVSGYTITSGYDWSWIRQPPGKGLEWIGYINYGGSTNYKPSLGSRVTISVDTSKNQFSLKLSSVTAADTAVYYCARYNEYKSYIYDWYFDFWGQGTLVTVSSTRASTKGPSVFPLAPSSKSTSGGTAALGCLVKDYFPEPVTVSWNSGALTSGVHTFPAVLQSSGLYSLSSVVTVPSSSLGTQTYICNVNHKPSNTKVDKRVEPKSCEVKTDSTDHVKPKETENTKQPSKSCHKPKAIVHTEKVNMMSLTVLGLRMLFAKTVAVNFLLTAKLFFL

SEQ ID NO: 13639 - protein, 788 aa, Artificial Sequence
  Synthetic Polypeptide
MALPVTALLLPLALLLHAARPEVQLVESGGGLVQPGGSLRLSCAASGFSFSDFWMSWVRQAPGKGLEWVATISQAGSEKDYVDSVKGRFTISRDNAKKSLYLQMNSLRAEDTAVYYCASGVYSFDYRGQGTLVTVSSGTGGGGSGGGGSGGGGSEFQSVVTQPPSVSAAPGQKVTISCSGSSSNIGNNYVSWYQQLPGTAPKLLIYDNNKRPSGIPDRFSGSKSGTSATLGITGLQTGDEADYYCGTWDGSLYTMLFGGGTKLTVLLEGQPKANPTVTLFPPSSEELQANKATLVCLISDFYPGAVTVAWKADGSPVKAGVETTKPSKQSNNKYAASSYLSLTPEQWKSHRSYSCQVTHEGSTVEKTVAPTECSPIKTDVITMDPKDNCSKDANDTLLLQLTNTSAYYMYLLLLLKSVVYFAIITCCLLRRTAFCCNGEKSRAKRSGSGATNFSLLKQAGDVEENPGPTSMDWIWRILFLVGAATGAHSFEEVQLVESGGGLVKPGGSLRLSCAASGFTFSNAWMSWVRQAPGKGLEWVGFIRSKAYGGTTEYAASVKGRFTISRDDSKSIAYLQMNNLKTEDTAVYYCARDGLYSSSWYDSDYWGQGTLVTVSSTRASTKGPSVFPLAPSSKSTSGGTAALGCLVKDYFPEPVTVSWNSGALTSGVHTFPAVLQSSGLYSLSSVVTVPSSSLGTQTYICNVNHKPSNTKVDKRVEPKSCEVKTDSTDHVKPKETENTKQPSKSCHKPKAIVHTEKVNMMSLTVLGLRMLFAKTVAVNFLLTAKLFFL

SEQ ID NO: 13640 - protein, 793 aa, Artificial Sequence
  Synthetic Polypeptide
MALPVTALLLPLALLLHAARPEVQLVESGGGLVQPGGSLRLSCAASGFSFSDFWMSWVRQAPGKGLEWVATISQAGSEKDYVDSVKGRFTISRDNAKKSLYLQMNSLRAEDTAVYYCASGVYSFDYRGQGTLVTVSSGTGGGGSGGGGSGGGGSEFQSVLTQPPSVSGAPGQRVTISCTGSSSNIGAGYDVHWYQQLPGTAPKLLIFGNSNRPSGVPDRFSGFKSGTSASLAITGLQAEDEADYFCQSYDSSLSGSGVFGTGTKVTVLGLEGQPKANPTVTLFPPSSEELQANKATLVCLISDFYPGAVTVAWKADGSPVKAGVETTKPSKQSNNKYAASSYLSLTPEQWKSHRSYSCQVTHEGSTVEKTVAPTECSPIKTDVITMDPKDNCSKDANDTLLLQLTNTSAYYMYLLLLLKSVVYFAIITCCLLRRTAFCCNGEKSRAKRSGSGATNFSLLKQAGDVEENPGPTSMDWIWRILFLVGAATGAHSFEQMQLVQSGGGLVQPGRSLRLSCAASGFTFDDYAMHWVRQAPGKGLEWVSGISWNSGSIGYADSVKGRFTISRDNAKNSLYLQMNSLRAEDTALYYCAKDIHSGSYYGLLYYAMDVWGQGTTVTVSSTRASTKGPSVFPLAPSSKSTSGGTAALGCLVKDYFPEPVTVSWNSGALTSGVHTFPAVLQSSGLYSLSSVVTVPSSSLGTQTYICNVNHKPSNTKVDKRVEPKSCEVKTDSTDHVKPKETENTKQPSKSCHKPKAIVHTEKVNMMSLTVLGLRMLFAKTVAVNFLLTAKLFFL

SEQ ID NO: 13641 - protein, 793 aa, Artificial Sequence
  Synthetic Polypeptide
MALPVTALLLPLALLLHAARPEVQLVESGGGLVQPGGSLRLSCAASGFSFSDFWMSWVRQAPGKGLEWVATISQAGSEKDYVDSVKGRFTISRDNAKKSLYLQMNSLRAEDTAVYYCASGVYSFDYRGQGTLVTVSSGTGGGGSGGGGSGGGGSEFLPVLTQPPSASGTPGQRVTISCSGRSSNIGSNSVNWYRQLPGAAPKLLIYSNNQRPPGVPVRFSGSKSGTSASLAISGLQSEDEATYYCATWDDNLNVHYVFGTGTKVTVLGSRLEGQPKANPTVTLFPPSSEELQANKATLVCLISDFYPGAVTVAWKADGSPVKAGVETTKPSKQSNNKYAASSYLSLTPEQWKSHRSYSCQVTHEGSTVEKTVAPTECSPIKTDVITMDPKDNCSKDANDTLLLQLTNTSAYYMYLLLLLKSVVYFAIITCCLLRRTAFCCNGEKSRAKRSGSGATNFSLLKQAGDVEENPGPTSMDWIWRILFLVGAATGAHSFELEMAQVQLVQSGAEVKKPGSSVKVSCKASGGTFSSYAISWVRQAPGQGLEWMGRIIPILGIANYAQKFQGRVTITADKSTSTAYMELSSLRSEDTAVYYCARGGYYSHDMWSEDWGQGTLVTVSSTRASTKGPSVFPLAPSSKSTSGGTAALGCLVKDYFPEPVTVSWNSGALTSGVHTFPAVLQSSGLYSLSSVVTVPSSSLGTQTYICNVNHKPSNTKVDKRVEPKSCEVKTDSTDHVKPKETENTKQPSKSCHKPKAIVHTEKVNMMSLTVLGLRMLFAKTVAVNFLLTAKLFFL

SEQ ID NO: 13642 - protein, 787 aa, Artificial Sequence
  Synthetic Polypeptide
MALPVTALLLPLALLLHAARPEVQLVESGGGLVQPGGSLRLSCAASGFSFSDFWMSWVRQAPGKGLEWVATISQAGSEKDYVDSVKGRFTISRDNAKKSLYLQMNSLRAEDTAVYYCASGVYSFDYRGQGTLVTVSSGTGGGGSGGGGSGGGGSEFDFVMTQSPDSLAVSLGERVTMSCKSSQSLLNSGNQKNYLTWYQQKPGQPPKLLIYWASTRESGVPDRFSGSGSGTDFTLTISSLQAEDVAVYYCQNDYSYPYTFGQGTKLEIKLEGQPKANPTVTLFPPSSEELQANKATLVCLISDFYPGAVTVAWKADGSPVKAGVETTKPSKQSNNKYAASSYLSLTPEQWKSHRSYSCQVTHEGSTVEKTVAPTECSPIKTDVITMDPKDNCSKDANDTLLLQLTNTSAYYMYLLLLLKSVVYFAIITCCLLRRTAFCCNGEKSRAKRSGSGATNFSLLKQAGDVEENPGPTSMDWIWRILFLVGAATGAHSFEEVQLVQSGAELKKPGASVKVSCKASGYTFTDYYMKWVRQAPGQGLEWIGDIIPSNGATFYNQKFKGRVTITVDKSTSTAYMELSSLRSEDTAVYYCARSHLLRASWFAYWGQGTLVTVSSTRASTKGPSVFPLAPSSKSTSGGTAALGCLVKDYFPEPVTVSWNSGALTSGVHTFPAVLQSSGLYSLSSVVTVPSSSLGTQTYICNVNHKPSNTKVDKRVEPKSCEVKTDSTDHVKPKETENTKQPSKSCHKPKAIVHTEKVNMMSLTVLGLRMLFAKTVAVNFLLTAKLFFL

SEQ ID NO: 13643 - protein, 787 aa, Artificial Sequence
  Synthetic Polypeptide
MALPVTALLLPLALLLHAARPEVQLVESGGGLVQPGGSLRLSCAASGFSFSDFWMSWVRQAPGKGLEWVATISQAGSEKDYVDSVKGRFTISRDNAKKSLYLQMNSLRAEDTAVYYCASGVYSFDYRGQGTLVTVSSGTGGGGSGGGGSGGGGSEFDFVMTQSPDSLAVSLGERVTMSCKSSQSLLNSGNQKNYLTWYQQKPGQPPKLLIYWASTRESGVPDRFSGSGSGTDFTLTISSLQAEDVAVYYCQNDYSYPYTFGQGTKLEIKLEGQPKANPTVTLFPPSSEELQANKATLVCLISDFYPGAVTVAWKADGSPVKAGVETTKPSKQSNNKYAASSYLSLTPEQWKSHRSYSCQVTHEGSTVEKTVAPTECSPIKTDVITMDPKDNCSKDANDTLLLQLTNTSAYYMYLLLLLKSVVYFAIITCCLLRRTAFCCNGEKSRAKRSGSGATNFSLLKQAGDVEENPGPTSMDWIWRILFLVGAATGAHSFEQVQLVQSGAELKKPGASVKVSCKASGYTFTDYYMKWVRQAPGQGLEWIGDIIPSNGATFYNQKFKGRVTITVDKSTSTAYMELSSLRSEDTAVYYCARSHLLRASWFAYWGQGTLVTVSSTRASTKGPSVFPLAPSSKSTSGGTAALGCLVKDYFPEPVTVSWNSGALTSGVHTFPAVLQSSGLYSLSSVVTVPSSSLGTQTYICNVNHKPSNTKVDKRVEPKSCEVKTDSTDHVKPKETENTKQPSKSCHKPKAIVHTEKVNMMSLTVLGLRMLFAKTVAVNFLLTAKLFFL

SEQ ID NO: 13644 - protein, 777 aa, Artificial Sequence
  Synthetic Polypeptide
MALPVTALLLPLALLLHAARPEVQLVESGGGLVQPGGSLRLSCAASGFSFSDFWMSWVRQAPGKGLEWVATISQAGSEKDYVDSVKGRFTISRDNAKKSLYLQMNSLRAEDTAVYYCASGVYSFDYRGQGTLVTVSSGTGGGGSGGGGSGGGGSEFDVQITQSPSYLAASPGETITINCRASKSISKDLAWYQEKPGKTNKLLIYSGSTLQSGIPSRFSGSGSGTDFTLTISSLEPEDFAMYYCQQHNKYPYTFGGGTKLEIKRLEGQPKANPTVTLFPPSSEELQANKATLVCLISDFYPGAVTVAWKADGSPVKAGVETTKPSKQSNNKYAASSYLSLTPEQWKSHRSYSCQVTHEGSTVEKTVAPTECSPIKTDVITMDPKDNCSKDANDTLLLQLTNTSAYYMYLLLLLKSVVYFAIITCCLLRRTAFCCNGEKSRAKRSGSGATNFSLLKQAGDVEENPGPTSMDWIWRILFLVGAATGAHSFEQVQLQQPGAELVRPGASVKLSCKASGYTFTSYWMNWVKQRPDQGLEWIGRIDPYDSETHYNQKFKDKAILTVDKSSSTAYMQLSSLTSEDSAVYYCARGNWDDYWGQGTTLTVSSTRASTKGPSVFPLAPSSKSTSGGTAALGCLVKDYFPEPVTVSWNSGALTSGVHTFPAVLQSSGLYSLSSVVTVPSSSLGTQTYICNVNHKPSNTKVDKRVEPKSCEVKTDSTDHVKPKETENTKQPSKSCHKPKAIVHTEKVNMMSLTVLGLRMLFAKTVAVNFLLTAKLFFL

SEQ ID NO: 13645 - protein, 779 aa, Artificial Sequence
  Synthetic Polypeptide
MALPVTALLLPLALLLHAARPEVQLVESGGGLVQPGGSLRLSCAASGFSFSDFWMSWVRQAPGKGLEWVATISQAGSEKDYVDSVKGRFTISRDNAKKSLYLQMNSLRAEDTAVYYCASGVYSFDYRGQGTLVTVSSGTGGGGSGGGGSGGGGSEFEIVLTQSPTSMTASPGEQVTITCRASSSINYMHWYQQKPGASPRPWIYETSKLASGVPDRFSGSASGTSYSLTINNMEAEDAATYYCQQWNYPSWTFGGGTKLELKLEGQPKANPTVTLFPPSSEELQANKATLVCLISDFYPGAVTVAWKADGSPVKAGVETTKPSKQSNNKYAASSYLSLTPEQWKSHRSYSCQVTHEGSTVEKTVAPTECSPIKTDVITMDPKDNCSKDANDTLLLQLTNTSAYYMYLLLLLKSVVYFAIITCCLLRRTAFCCNGEKSRAKRSGSGATNFSLLKQAGDVEENPGPTSMDWIWRILFLVGAATGAHSFEEVQLVESGGGLVQPGRSLKLSCAASGFTFSDYNMAWVRQAPKKGLEWVATILYDGGRTYYRGSVKGRFTISRDNAKSTLYLRMDSLRSEDTATYYCATHSRGTDYFDYWGQGVMVTVSSTRASTKGPSVFPLAPSSKSTSGGTAALGCLVKDYFPEPVTVSWNSGALTSGVHTFPAVLQSSGLYSLSSVVTVPSSSLGTQTYICNVNHKPSNTKVDKRVEPKSCEVKTDSTDHVKPKETENTKQPSKSCHKPKAIVHTEKVNMMSLTVLGLRMLFAKTVAVNFLLTAKLFFL

SEQ ID NO: 13646 - protein, 788 aa, Artificial Sequence
  Synthetic Polypeptide
MALPVTALLLPLALLLHAARPEVQLVESGGGLVQPGGSLRLSCAASGFSFSDFWMSWVRQAPGKGLEWVATISQAGSEKDYVDSVKGRFTISRDNAKKSLYLQMNSLRAEDTAVYYCASGVYSFDYRGQGTLVTVSSGTGGGGSGGGGSGGGGSEFDIVMTQSPSSLAVSEGETVTINCKSSQSFLSSGDGKNYVAWYQYKPGQSPKLLIYWASTRQSGVPDRFIGSGSGTDFTLTISTVQAEDLAIYYCQQYYDTPLTFGSGTKLEIKLEGQPKANPTVTLFPPSSEELQANKATLVCLISDFYPGAVTVAWKADGSPVKAGVETTKPSKQSNNKYAASSYLSLTPEQWKSHRSYSCQVTHEGSTVEKTVAPTECSPIKTDVITMDPKDNCSKDANDTLLLQLTNTSAYYMYLLLLLKSVVYFAIITCCLLRRTAFCCNGEKSRAKRSGSGATNFSLLKQAGDVEENPGPTSMDWIWRILFLVGAATGAHSFEEVKLQESGPSLVQSSQTLSLTCTVSGFSLTSYHIHWVRQTPGKGLEWMGVMWSDGDTSYNSALKSRLSISRDTSQSQVFLKMNSLQTEDTATYYCARGYYSSYLYLWFAYWGQGTLVTVSSTRASTKGPSVFPLAPSSKSTSGGTAALGCLVKDYFPEPVTVSWNSGALTSGVHTFPAVLQSSGLYSLSSVVTVPSSSLGTQTYICNVNHKPSNTKVDKRVEPKSCEVKTDSTDHVKPKETENTKQPSKSCHKPKAIVHTEKVNMMSLTVLGLRMLFAKTVAVNFLLTAKLFFL

SEQ ID NO: 13647 - protein, 792 aa, Artificial Sequence
  Synthetic Polypeptide
MALPVTALLLPLALLLHAARPEVQLVESGGGLVQPGGSLRLSCAASGFSFSDFWMSWVRQAPGKGLEWVATISQAGSEKDYVDSVKGRFTISRDNAKKSLYLQMNSLRAEDTAVYYCASGVYSFDYRGQGTLVTVSSGTGGGGSGGGGSGGGGSEFDVLMTQTPVSLPVSLGGQVSISCRSSQSLVHSDGDTYLHWYLQKPGQSPQLLIYRVSNRFSGVPDRFSGSGSGTDFTLKISRVEPEDLGLYYCLQTTHFPPWTFGGGTKLEMKLEGQPKANPTVTLFPPSSEELQANKATLVCLISDFYPGAVTVAWKADGSPVKAGVETTKPSKQSNNKYAASSYLSLTPEQWKSHRSYSCQVTHEGSTVEKTVAPTECSPIKTDVITMDPKDNCSKDANDTLLLQLTNTSAYYMYLLLLLKSVVYFAIITCCLLRRTAFCCNGEKSRAKRSGSGATNFSLLKQAGDVEENPGPTSMDWIWRILFLVGAATGAHSFEQVQLQQSGPELRRPGSSVRLSCKASGYRIKDFLIHWIKNRPEHGLEWIGWIDPEDGETKYAQKFQTKATLTADTSSNTAYMQLSSLTSEDTATYFCARWGDVYYGLMRGHVMDAWGQGTSVTVSSTRASTKGPSVFPLAPSSKSTSGGTAALGCLVKDYFPEPVTVSWNSGALTSGVHTFPAVLQSSGLYSLSSVVTVPSSSLGTQTYICNVNHKPSNTKVDKRVEPKSCEVKTDSTDHVKPKETENTKQPSKSCHKPKAIVHTEKVNMMSLTVLGLRMLFAKTVAVNFLLTAKLFFL

SEQ ID NO: 13648 - protein, 787 aa, Artificial Sequence
  Synthetic Polypeptide
MALPVTALLLPLALLLHAARPEVQLVESGGGLVQPGGSLRLSCAASGFSFSDFWMSWVRQAPGKGLEWVATISQAGSEKDYVDSVKGRFTISRDNAKKSLYLQMNSLRAEDTAVYYCASGVYSFDYRGQGTLVTVSSGTGGGGSGGGGSGGGGSEFDIVMTQSPATLSLSPGERATLSCRSSKSLQNVNGNTYLYWFQQKPGQSPQLLIYRMSNLNSGVPDRFSGSGSGTEFTLTISSLEPEDFAVYYCMQHLEYPITFGAGTKLEIKLEGQPKANPTVTLFPPSSEELQANKATLVCLISDFYPGAVTVAWKADGSPVKAGVETTKPSKQSNNKYAASSYLSLTPEQWKSHRSYSCQVTHEGSTVEKTVAPTECSPIKTDVITMDPKDNCSKDANDTLLLQLTNTSAYYMYLLLLLKSVVYFAIITCCLLRRTAFCCNGEKSRAKRSGSGATNFSLLKQAGDVEENPGPTSMDWIWRILFLVGAATGAHSFEEVQLVESGGGLVKPGGSLKLSCAASGYTFTSYVMHWVRQAPGKGLEWIGYINPYNDGTKYNEKFQGRVTISSDKSISTAYMELSSLRSEDTAMYYCARGTYYYGTRVFDYWGQGTLVTVSSTRASTKGPSVFPLAPSSKSTSGGTAALGCLVKDYFPEPVTVSWNSGALTSGVHTFPAVLQSSGLYSLSSVVTVPSSSLGTQTYICNVNHKPSNTKVDKRVEPKSCEVKTDSTDHVKPKETENTKQPSKSCHKPKAIVHTEKVNMMSLTVLGLRMLFAKTVAVNFLLTAKLFFL

SEQ ID NO: 13649 - protein, 783 aa, Artificial Sequence
  Synthetic Polypeptide
MALPVTALLLPLALLLHAARPEVQLVESGGGLVQPGGSLRLSCAASGFSFSDFWMSWVRQAPGKGLEWVATISQAGSEKDYVDSVKGRFTISRDNAKKSLYLQMNSLRAEDTAVYYCASGVYSFDYRGQGTLVTVSSGTGGGGSGGGGSGGGGSEFDIQMTQSPSSLSASVGDRVTITCKASDHINNWLAWYQQKPGQAPKLLIYGATTLETGVPSRFSGSGSGTDYTLTISSLQPEDFATYYCQQSWNTPWTFGQGTKLEIKRLEGQPKANPTVTLFPPSSEELQANKATLVCLISDFYPGAVTVAWKADGSPVKAGVETTKPSKQSNNKYAASSYLSLTPEQWKSHRSYSCQVTHEGSTVEKTVAPTECSPIKTDVITMDPKDNCSKDANDTLLLQLTNTSAYYMYLLLLLKSVVYFAIITCCLLRRTAFCCNGEKSRAKRSGSGATNFSLLKQAGDVEENPGPTSMDWIWRILFLVGAATGAHSFEQVQLQQPGAELVKPGASVKMSCKASGYAFSSYWINWMKQKPGQGLEWIGQIYPGDGDTNYNGKFKGRATLTADTSSSTAYMQLSSLTSEDSAVYFCARSITTVVGCAMDYWGQGTSVTVSSTRASTKGPSVFPLAPSSKSTSGGTAALGCLVKDYFPEPVTVSWNSGALTSGVHTFPAVLQSSGLYSLSSVVTVPSSSLGTQTYICNVNHKPSNTKVDKRVEPKSCEVKTDSTDHVKPKETENTKQPSKSCHKPKAIVHTEKVNMMSLTVLGLRMLFAKTVAVNFLLTAKLFFL

SEQ ID NO: 13650 - protein, 785 aa, Artificial Sequence
  Synthetic Polypeptide
MALPVTALLLPLALLLHAARPEVQLVESGGGLVQPGGSLRLSCAASGFSFSDFWMSWVRQAPGKGLEWVATISQAGSEKDYVDSVKGRFTISRDNAKKSLYLQMNSLRAEDTAVYYCASGVYSFDYRGQGTLVTVSSGTGGGGSGGGGSGGGGSEFQIVLSQSPAILSASPGEKVTMTCRASSSVSYMHWYQQKPGSSPKPWIYATSNLASGVPARFSGSGSGTSYSFTISRVEAEDAATYYCQQWTFNPPTFGGGTRLEIKRTVAALEGQPKANPTVTLFPPSSEELQANKATLVCLISDFYPGAVTVAWKADGSPVKAGVETTKPSKQSNNKYAASSYLSLTPEQWKSHRSYSCQVTHEGSTVEKTVAPTECSPIKTDVITMDPKDNCSKDANDTLLLQLTNTSAYYMYLLLLLKSVVYFAIITCCLLRRTAFCCNGEKSRAKRSGSGATNFSLLKQAGDVEENPGPTSMDWIWRILFLVGAATGAHSFEQAYLQQSGAELVRPGASVKMSCKASGYTFTSYNMHWVKQTPRQGLEWIGGIYPGNGDTSYNQKFKGKATLTVGKSSSTAYMQLSSLTSEDSAVYFCARYDYNYAMDYWGQGTSVTVSSASTRASTKGPSVFPLAPSSKSTSGGTAALGCLVKDYFPEPVTVSWNSGALTSGVHTFPAVLQSSGLYSLSSVVTVPSSSLGTQTYICNVNHKPSNTKVDKRVEPKSCEVKTDSTDHVKPKETENTKQPSKSCHKPKAIVHTEKVNMMSLTVLGLRMLFAKTVAVNFLLTAKLFFL

SEQ ID NO: 13651 - protein, 783 aa, Artificial Sequence
  Synthetic Polypeptide
MALPVTALLLPLALLLHAARPEVQLVESGGGLVQPGGSLRLSCAASGFSFSDFWMSWVRQAPGKGLEWVATISQAGSEKDYVDSVKGRFTISRDNAKKSLYLQMNSLRAEDTAVYYCASGVYSFDYRGQGTLVTVSSGTGGGGSGGGGSGGGGSEFEIVLTQSPATLSLSPGERATLSCRASQSVSSYLAWYQQKPGQAPRLLIYDASNRATGIPARFSGSGSGTDFTLTISSLEPEDFAVYYCQQRSNWPITFGQGTRLEIKLEGQPKANPTVTLFPPSSEELQANKATLVCLISDFYPGAVTVAWKADGSPVKAGVETTKPSKQSNNKYAASSYLSLTPEQWKSHRSYSCQVTHEGSTVEKTVAPTECSPIKTDVITMDPKDNCSKDANDTLLLQLTNTSAYYMYLLLLLKSVVYFAIITCCLLRRTAFCCNGEKSRAKRSGSGATNFSLLKQAGDVEENPGPTSMDWIWRILFLVGAATGAHSFEEVQLVESGGGLVQPDRSLRLSCAASGFTFHDYAMHWVRQAPGKGLEWVSTISWNSGTIGYADSVKGRFTISRDNAKNSLYLQMNSLRAEDTALYYCAKDIQYGNYYYGMDVWGQGTTVTVSSTRASTKGPSVFPLAPSSKSTSGGTAALGCLVKDYFPEPVTVSWNSGALTSGVHTFPAVLQSSGLYSLSSVVTVPSSSLGTQTYICNVNHKPSNTKVDKRVEPKSCEVKTDSTDHVKPKETENTKQPSKSCHKPKAIVHTEKVNMMSLTVLGLRMLFAKTVAVNFLLTAKLFFL

SEQ ID NO: 13652 - protein, 778 aa, Artificial Sequence
  Synthetic Polypeptide
MALPVTALLLPLALLLHAARPEVQLVESGGGLVQPGGSLRLSCAASGFSFSDFWMSWVRQAPGKGLEWVATISQAGSEKDYVDSVKGRFTISRDNAKKSLYLQMNSLRAEDTAVYYCASGVYSFDYRGQGTLVTVSSGTGGGGSGGGGSGGGGSEFDIQMTQSPSSLSASVGDRVTINCKASQDINSYLSWFQQKPGKAPKTLIYRANRLVDGVPSRFSGSGSGQDYTLTISSLQPEDFATYYCLQYDEFPLTFGGGTKVEIKLEGQPKANPTVTLFPPSSEELQANKATLVCLISDFYPGAVTVAWKADGSPVKAGVETTKPSKQSNNKYAASSYLSLTPEQWKSHRSYSCQVTHEGSTVEKTVAPTECSPIKTDVITMDPKDNCSKDANDTLLLQLTNTSAYYMYLLLLLKSVVYFAIITCCLLRRTAFCCNGEKSRAKRSGSGATNFSLLKQAGDVEENPGPTSMDWIWRILFLVGAATGAHSFEQVQLVQSGAEVKKPGASVKVSCKASGYTFTNYDINWVRQAPGQGLEWIGWIYPGDGSTKYNEKFKAKATLTADTSTSTAYMELRSLRSDDTAVYYCASGYEDAMDYWGQGTTVTVSSTRASTKGPSVFPLAPSSKSTSGGTAALGCLVKDYFPEPVTVSWNSGALTSGVHTFPAVLQSSGLYSLSSVVTVPSSSLGTQTYICNVNHKPSNTKVDKRVEPKSCEVKTDSTDHVKPKETENTKQPSKSCHKPKAIVHTEKVNMMSLTVLGLRMLFAKTVAVNFLLTAKLFFL

SEQ ID NO: 13653 - protein, 780 aa, Artificial Sequence
  Synthetic Polypeptide
MALPVTALLLPLALLLHAARPEVQLVESGGGLVQPGGSLRLSCAASGFSFSDFWMSWVRQAPGKGLEWVATISQAGSEKDYVDSVKGRFTISRDNAKKSLYLQMNSLRAEDTAVYYCASGVYSFDYRGQGTLVTVSSGTGGGGSGGGGSGGGGSEFDIVMTQTPLSLSVTPGQPASISCKSSQSLLDGDGKTYLNWLLQKPGQSPQRLIYLVSKLDSGVPDRFSGSGSGTDFTLKISRVEAEDVGVYYCWQGTHFPRTFGQGTKLEIKLEGQPKANPTVTLFPPSSEELQANKATLVCLISDFYPGAVTVAWKADGSPVKAGVETTKPSKQSNNKYAASSYLSLTPEQWKSHRSYSCQVTHEGSTVEKTVAPTECSPIKTDVITMDPKDNCSKDANDTLLLQLTNTSAYYMYLLLLLKSVVYFAIITCCLLRRTAFCCNGEKSRAKRSGSGATNFSLLKQAGDVEENPGPTSMDWIWRILFLVGAATGAHSFEQVQLVQSGAEVKKPGASVKVSCKASGYTFKDTYIHWVRQAPGQGLEWMGRIDPANGNTKYDPKFQGRVTMTRDTSISTAYMELSRLRSDDTAVYYCARRGGVDWGQGTLVTVSSTRASTKGPSVFPLAPSSKSTSGGTAALGCLVKDYFPEPVTVSWNSGALTSGVHTFPAVLQSSGLYSLSSVVTVPSSSLGTQTYICNVNHKPSNTKVDKRVEPKSCEVKTDSTDHVKPKETENTKQPSKSCHKPKAIVHTEKVNMMSLTVLGLRMLFAKTVAVNFLLTAKLFFL

SEQ ID NO: 13654 - protein, 781 aa, Artificial Sequence
  Synthetic Polypeptide
MALPVTALLLPLALLLHAARPEVQLVESGGGLVQPGGSLRLSCAASGFSFSDFWMSWVRQAPGKGLEWVATISQAGSEKDYVDSVKGRFTISRDNAKKSLYLQMNSLRAEDTAVYYCASGVYSFDYRGQGTLVTVSSGTGGGGSGGGGSGGGGSEFDIQMTQSPSSLSASVGDRVTITCKASQDVSTAVAWFQQKPGKAPKLLIYSPSYRYTGVPSRFSGSGSGTDFTLTISSLQPEDFTYYCQQLYSTPYTFGQGTKVEIKLEGQPKANPTVTLFPPSSEELQANKATLVCLISDFYPGAVTVAWKADGSPVKAGVETTKPSKQSNNKYAASSYLSLTPEQWKSHRSYSCQVTHEGSTVEKTVAPTECSPIKTDVITMDPKDNCSKDANDTLLLQLTNTSAYYMYLLLLLKSVVYFAIITCCLLRRTAFCCNGEKSRAKRSGSGATNFSLLKQAGDVEENPGPTSMDWIWRILFLVGAATGAHSFEEVQLVQSGAEVKKPGASVKVSCKASGYTFTDYYLDVVVRQAPGQGLEWIGRVNPYNGGTIYNQKFKGRVTLTRDTSTSTAYLELSSLRSEDTAVYYCARDHYRYDPLLDYWGQGTLVTVSSTRASTKGPSVFPLAPSSKSTSGGTAALGCLVKDYFPEPVTVSWNSGALTSGVHTFPAVLQSSGLYSLSSVVTVPSSSLGTQTYICNVNHKPSNTKVDKRVEPKSCEVKTDSTDHVKPKETENTKQPSKSCHKPKAIVHTEKVNMMSLTVLGLRMLFAKTVAVNFLLTAKLFFL

SEQ ID NO: 13655 - protein, 787 aa, Artificial Sequence
  Synthetic Polypeptide
MALPVTALLLPLALLLHAARPEVQLVESGGGLVQPGGSLRLSCAASGFSFSDFWMSWVRQAPGKGLEWVATISQAGSEKDYVDSVKGRFTISRDNAKKSLYLQMNSLRAEDTAVYYCASGVYSFDYRGQGTLVTVSSGTGGGGSGGGGSGGGGSEFDIQMTQSPSSLSASVGDRVTITCRASQSVSTSSYNYMHWYQQKPGKPPKLLIKYASNLESGVPSRFSGSGSGTDFTLTISSLQPEDFATYYCQHSWEIPLTFGQGTKVEIKLEGQPKANPTVTLFPPSSEELQANKATLVCLISDFYPGAVTVAWKADGSPVKAGVETTKPSKQSNNKYAASSYLSLTPEQWKSHRSYSCQVTHEGSTVEKTVAPTECSPIKTDVITMDPKDNCSKDANDTLLLQLTNTSAYYMYLLLLLKSVVYFAIITCCLLRRTAFCCNGEKSRAKRSGSGATNFSLLKQAGDVEENPGPTSMDWIWRILFLVGAATGAHSFEEVQLVQSGAEVKKPGASVKVSCKASGYSFTDYYMHWVRQAPGQGLEWIGRINPYNGAAFYSQNFKDRVTLTVDTSTSTAYLELSSLRSEDTAVYYCAIERGADLEGYAMDYWGQGTLVTVSSTRASTKGPSVFPLAPSSKSTSGGTAALGCLVKDYFPEPVTVSWNSGALTSGVHTFPAVLQSSGLYSLSSVVTVPSSSLGTQTYICNVNHKPSNTKVDKRVEPKSCEVKTDSTDHVKPKETENTKQPSKSCHKPKAIVHTEKVNMMSLTVLGLRMLFAKTVAVNFLLTAKLFFL

SEQ ID NO: 13656 - protein, 785 aa, Artificial Sequence
  Synthetic Polypeptide
MALPVTALLLPLALLLHAARPEVQLVESGGGLVQPGGSLRLSCAASGFSFSDFWMSWVRQAPGKGLEWVATISQAGSEKDYVDSVKGRFTISRDNAKKSLYLQMNSLRAEDTAVYYCASGVYSFDYRGQGTLVTVSSGTGGGGSGGGGSGGGGSEFEIVLTQSPATLSASPGERVTLTCRASSNVISSYVHWYQQKPGSSPRLFLYSTSNLASGVPSRFSGSGSGTDFTFTISSLEAEDAATYYCQQYSGYPLTFGQGTRLEIKLEGQPKANPTVTLFPPSSEELQANKATLVCLISDFYPGAVTVAWKADGSPVKAGVETTKPSKQSNNKYAASSYLSLTPEQWKSHRSYSCQVTHEGSTVEKTVAPTECSPIKTDVITMDPKDNCSKDANDTLLLQLTNTSAYYMYLLLLLKSVVYFAIITCCLLRRTAFCCNGEKSRAKRSGSGATNFSLLKQAGDVEENPGPTSMDWIWRILFLVGAATGAHSFEQVQLQESGPGLVKPSETLSLTCAVSGYSITSAYYWNWIRQPPGKGLEWIGYISYDGRNNYNPSLKNRITINPDTSKNQFSLQLNSVTPEDTAVYYCAREGDYDVGNYYAMDYWGQGTLVTVSSTRASTKGPSVFPLAPSSKSTSGGTAALGCLVKDYFPEPVTVSWNSGALTSGVHTFPAVLQSSGLYSLSSVVTVPSSSLGTQTYICNVNHKPSNTKVDKRVEPKSCEVKTDSTDHVKPKETENTKQPSKSCHKPKAIVHTEKVNMMSLTVLGLRMLFAKTVAVNFLLTAKLFFL

SEQ ID NO: 13657 - protein, 785 aa, Artificial Sequence
  Synthetic Polypeptide
MALPVTALLLPLALLLHAARPEVQLVESGGGLVQPGGSLRLSCAASGFSFSDFWMSWVRQAPGKGLEWVATISQAGSEKDYVDSVKGRFTISRDNAKKSLYLQMNSLRAEDTAVYYCASGVYSFDYRGQGTLVTVSSGTGGGGSGGGGSGGGGSEFEIVLTQSPATLSLSPGERATLSCRASSNVISSYVHWYQQKPGQAPRLLIYSTSNLASGIPARFSGSGSGTDFTLTISSLEPEDFAVYYCQQYSGYPLTFGQGTRLEIKLEGQPKANPTVTLFPPSSEELQANKATLVCLISDFYPGAVTVAWKADGSPVKAGVETTKPSKQSNNKYAASSYLSLTPEQWKSHRSYSCQVTHEGSTVEKTVAPTECSPIKTDVITMDPKDNCSKDANDTLLLQLTNTSAYYMYLLLLLKSVVYFAIITCCLLRRTAFCCNGEKSRAKRSGSGATNFSLLKQAGDVEENPGPTSMDWIWRILFLVGAATGAHSFEEVQLVESGGGLVQPGRSLRLSCAASGYSITSAYYWNWVRQAPGKGLEWVSYISYDGRNNYNPSLKNRFTISRDNAKKSLYLQMNSLRAEDTALYYCAKEGDYDVGNYYAMDYWGQGTTVTVSSTRASTKGPSVFPLAPSSKSTSGGTAALGCLVKDYFPEPVTVSWNSGALTSGVHTFPAVLQSSGLYSLSSVVTVPSSSLGTQTYICNVNHKPSNTKVDKRVEPKSCEVKTDSTDHVKPKETENTKQPSKSCHKPKAIVHTEKVNMMSLTVLGLRMLFAKTVAVNFLLTAKLFFL

SEQ ID NO: 13658 - protein, 784 aa, Artificial Sequence
  Synthetic Polypeptide
MALPVTALLLPLALLLHAARPEVQLVESGGGLVQPGGSLRLSCAASGFSFSDFWMSWVRQAPGKGLEWVATISQAGSEKDYVDSVKGRFTISRDNAKKSLYLQMNSLRAEDTAVYYCASGVYSFDYRGQGTLVTVSSGTGGGGSGGGGSGGGGSEFDVVMTQTPLSLPVSLGDQASISCRSSQSLVHSNGNTYLRWYLQKPGQSPKVLIYKVSNRVSGVPDRFSGSGSGTDFTLKINRVEAEDLGVYFCSQSTHVPWTFGGGTKLEIKLEGQPKANPTVTLFPPSSEELQANKATLVCLISDFYPGAVTVAWKADGSPVKAGVETTKPSKQSNNKYAASSYLSLTPEQWKSHRSYSCQVTHEGSTVEKTVAPTECSPIKTDVITMDPKDNCSKDANDTLLLQLTNTSAYYMYLLLLLKSVVYFAIITCCLLRRTAFCCNGEKSRAKRSGSGATNFSLLKQAGDVEENPGPTSMDWIWRILFLVGAATGAHSFEGVKLDETGGGLVQPGGAMKLSCVTSGFTFGHYWMNWVRQSPEKGLEWVAQFRNKPYNYETYYSDSVKGRFTISRDDSKSSVYLQMNNLRVEDTGIYYCTGASYGMEYLGQGTSVTVSTTRASTKGPSVFPLAPSSKSTSGGTAALGCLVKDYFPEPVTVSWNSGALTSGVHTFPAVLQSSGLYSLSSVVTVPSSSLGTQTYICNVNHKPSNTKVDKRVEPKSCEVKTDSTDHVKPKETENTKQPSKSCHKPKAIVHTEKVNMMSLTVLGLRMLFAKTVAVNFLLTAKLFFL

SEQ ID NO: 13659 - protein, 790 aa, Artificial Sequence
  Synthetic Polypeptide
MALPVTALLLPLALLLHAARPEVQLVESGGGLVQPGGSLRLSCAASGFSFSDFWMSWVRQAPGKGLEWVATISQAGSEKDYVDSVKGRFTISRDNAKKSLYLQMNSLRAEDTAVYYCASGVYSFDYRGQGTLVTVSSGTGGGGSGGGGSGGGGSEFQVQLVESGGNLVQPGGSLRLSCAASGFTFGSFSMSWVRQAPGGGLEWVAGLSARSSLTHYADSVKGRFTISRDNAKNSVYLQMNSLRVEDTAVYYCARRSYDSSGYWGHFYSYMDVWGQGTLVTVSLEGQPKANPTVTLFPPSSEELQANKATLVCLISDFYPGAVTVAWKADGSPVKAGVETTKPSKQSNNKYAASSYLSLTPEQWKSHRSYSCQVTHEGSTVEKTVAPTECSPIKTDVITMDPKDNCSKDANDTLLLQLTNTSAYYMYLLLLLKSVVYFAIITCCLLRRTAFCCNGEKSRAKRSGSGATNFSLLKQAGDVEENPGPTSMDWIWRILFLVGAATGAHSFESVLTQPSSVSAAPGQKVTISCSGSTSNIGNNYVSWYQQHPGKAPKLMIYDVSKRPSGVPDRFSGSKSGNSASLDISGLQSEDEADYYCAAWDDSLSEFLFGTGTKLTVLGTRASTKGPSVFPLAPSSKSTSGGTAALGCLVKDYFPEPVTVSWNSGALTSGVHTFPAVLQSSGLYSLSSVVTVPSSSLGTQTYICNVNHKPSNTKVDKRVEPKSCEVKTDSTDHVKPKETENTKQPSKSCHKPKAIVHTEKVNMMSLTVLGLRMLFAKTVAVNFLLTAKLFFL

SEQ ID NO: 13660 - protein, 785 aa, Artificial Sequence
  Synthetic Polypeptide
MALPVTALLLPLALLLHAARPEVQLVESGGGLVQPGGSLRLSCAASGFSFSDFWMSWVRQAPGKGLEWVATISQAGSEKDYVDSVKGRFTISRDNAKKSLYLQMNSLRAEDTAVYYCASGVYSFDYRGQGTLVTVSSGTGGGGSGGGGSGGGGSEFDVVMTQSPSSLSASVGDRVTITCQSSLDISHYLNWYQQKPGKAPKLLIYDASNLETGVPSRFSGSGSGTHFTFTISSLQPEDFATYYCQQYDNLPLTFGGGTKLEIKRLEGQPKANPTVTLFPPSSEELQANKATLVCLISDFYPGAVTVAWKADGSPVKAGVETTKPSKQSNNKYAASSYLSLTPEQWKSHRSYSCQVTHEGSTVEKTVAPTECSPIKTDVITMDPKDNCSKDANDTLLLQLTNTSAYYMYLLLLLKSVVYFAIITCCLLRRTAFCCNGEKSRAKRSGSGATNFSLLKQAGDVEENPGPTSMDWIWRILFLVGAATGAHSFEQVQLVQSGGGVVQPGGSLRVSCAASGVTLSDYGMHWVRQAPGKGLEWVAFIRNDGSDKYYADSVKGRFTISRDNSEKTVSLQMSSLRAEDTAVYYCAKNGESGPLDYWYLDLWGRGTLVTVSSTRASTKGPSVFPLAPSSKSTSGGTAALGCLVKDYFPEPVTVSWNSGALTSGVHTFPAVLQSSGLYSLSSVVTVPSSSLGTQTYICNVNHKPSNTKVDKRVEPKSCEVKTDSTDHVKPKETENTKQPSKSCHKPKAIVHTEKVNMMSLTVLGLRMLFAKTVAVNFLLTAKLFFL

SEQ ID NO: 13661 - protein, 789 aa, Artificial Sequence
  Synthetic Polypeptide
MALPVTALLLPLALLLHAARPEVQLVESGGGLVQPGGSLRLSCAASGFSFSDFWMSWVRQAPGKGLEWVATISQAGSEKDYVDSVKGRFTISRDNAKKSLYLQMNSLRAEDTAVYYCASGVYSFDYRGQGTLVTVSSGTGGGGSGGGGSGGGGSEFSYELTQPPSVSGTPGQRVAISCSGSSSNIGTRMVTWYQHVPGTAPKLLIFNNNQRPSGVPDRFSASKSGTSASLAIIGLQSDDEADYYCATWDDNVKSYVFGTGTKVTVLGSRLEGQPKANPTVTLFPPSSEELQANKATLVCLISDFYPGAVTVAWKADGSPVKAGVETTKPSKQSNNKYAASSYLSLTPEQWKSHRSYSCQVTHEGSTVEKTVAPTECSPIKTDVITMDPKDNCSKDANDTLLLQLTNTSAYYMYLLLLLKSVVYFAIITCCLLRRTAFCCNGEKSRAKRSGSGATNFSLLKQAGDVEENPGPTSMDWIWRILFLVGAATGAHSFELEMAQVQLQQWGAGLLKPSETLSLTCAVYGGSFSGYYWSWIRQPPGKGLEWIGEINHSGSTNYNPSLKSRVTISVDTSKNQFSLKLSSVTAADTAVYYCARAPQSWYVGDVWGQGTLVTVSSTRASTKGPSVFPLAPSSKSTSGGTAALGCLVKDYFPEPVTVSWNSGALTSGVHTFPAVLQSSGLYSLSSVVTVPSSSLGTQTYICNVNHKPSNTKVDKRVEPKSCEVKTDSTDHVKPKETENTKQPSKSCHKPKAIVHTEKVNMMSLTVLGLRMLFAKTVAVNFLLTAKLFFL

SEQ ID NO: 13662 - protein, 786 aa, Artificial Sequence
  Synthetic Polypeptide
MALPVTALLLPLALLLHAARPEVQLVESGGGLVQPGGSLRLSCAASGFSFSDFWMSWVRQAPGKGLEWVATISQAGSEKDYVDSVKGRFTISRDNAKKSLYLQMNSLRAEDTAVYYCASGVYSFDYRGQGTLVTVSSGTGGGGSGGGGSGGGGSEFQSVLTQPPSLSVAPGKTASITCGGNNIGMKSVHWYQQRPGQAPVLVIYYDSDRPSGIPGRFSGSNSGNTATLTISRVEAGDEADYYCQVWDTTGDHPGYVFGTGTKVTVLLEGQPKANPTVTLFPPSSEELQANKATLVCLISDFYPGAVTVAWKADGSPVKAGVETTKPSKQSNNKYAASSYLSLTPEQWKSHRSYSCQVTHEGSTVEKTVAPTECSPIKTDVITMDPKDNCSKDANDTLLLQLTNTSAYYMYLLLLLKSVVYFAIITCCLLRRTAFCCNGEKSRAKRSGSGATNFSLLKQAGDVEENPGPTSMDWIWRILFLVGAATGAHSFEQVQLVQSGAEVKKPGSSVKVSCKASGGTFSSYAISWVRQAPGQGLEWMGGIIPIFGTANYAQKFQGRVTITADESTSTAYMELSSLRSEDTAVYYCARGVYGYSGSAPYDEWGQGTLVTVSSTRASTKGPSVFPLAPSSKSTSGGTAALGCLVKDYFPEPVTVSWNSGALTSGVHTFPAVLQSSGLYSLSSVVTVPSSSLGTQTYICNVNHKPSNTKVDKRVEPKSCEVKTDSTDHVKPKETENTKQPSKSCHKPKAIVHTEKVNMMSLTVLGLRMLFAKTVAVNFLLTAKLFFL

SEQ ID NO: 13663 - protein, 784 aa, Artificial Sequence
  Synthetic Polypeptide
MALPVTALLLPLALLLHAARPEVQLVESGGGLVQPGGSLRLSCAASGFSFSDFWMSWVRQAPGKGLEWVATISQAGSEKDYVDSVKGRFTISRDNAKKSLYLQMNSLRAEDTAVYYCASGVYSFDYRGQGTLVTVSSGTGGGGSGGGGSGGGGSEFEVQLVESGGGLVQPGRSLRLSCAASGFTFDDYAMHWVRQAPGKGLEWVSGISWNSGSIGYADSVKGRFTISRDNAKNSLYLQMNSLRAEDTALYYCAKDKGGGYYDFWSGSDYWGQGTLVTVSSLEGQPKANPTVTLFPPSSEELQANKATLVCLISDFYPGAVTVAWKADGSPVKAGVETTKPSKQSNNKYAASSYLSLTPEQWKSHRSYSCQVTHEGSTVEKTVAPTECSPIKTDVITMDPKDNCSKDANDTLLLQLTNTSAYYMYLLLLLKSVVYFAIITCCLLRRTAFCCNGEKSRAKRSGSGATNFSLLKQAGDVEENPGPTSMDWIWRILFLVGAATGAHSFESSELTQDPAVSVALGQTVRITCQGDSLRSYYASWYQQKPGQAPVLVIYGKNNRPSGIPDRFSGSSSGNTASLTITGAQAEDEADYYCNSRDSSGWVFGGGTKLTVLTRASTKGPSVFPLAPSSKSTSGGTAALGCLVKDYFPEPVTVSWNSGALTSGVHTFPAVLQSSGLYSLSSVVTVPSSSLGTQTYICNVNHKPSNTKVDKRVEPKSCEVKTDSTDHVKPKETENTKQPSKSCHKPKAIVHTEKVNMMSLTVLGLRMLFAKTVAVNFLLTAKLFFL

SEQ ID NO: 13664 - protein, 793 aa, Artificial Sequence
  Synthetic Polypeptide
MALPVTALLLPLALLLHAARPEVQLVESGGGLVQPGGSLRLSCAASGFSFSDFWMSWVRQAPGKGLEWVATISQAGSEKDYVDSVKGRFTISRDNAKKSLYLQMNSLRAEDTAVYYCASGVYSFDYRGQGTLVTVSSGTGGGGSGGGGSGGGGSEFEVQLQQSGPGLVKPSQTLSLTCAISGDSVLSNSDTWNWIRQSPSRGLEWLGRTYHRSTWYDDYASSVRGRVSINVDTSKNQYSLQLNAVTPEDTGVYYCARDRLQDGNSWSDAFDVWGQGTMVTVSSLEGQPKANPTVTLFPPSSEELQANKATLVCLISDFYPGAVTVAWKADGSPVKAGVETTKPSKQSNNKYAASSYLSLTPEQWKSHRSYSCQVTHEGSTVEKTVAPTECSPIKTDVITMDPKDNCSKDANDTLLLQLTNTSAYYMYLLLLLKSVVYFAIITCCLLRRTAFCCNGEKSRAKRSGSGATNFSLLKQAGDVEENPGPTSMDWIWRILFLVGAATGAHSFEQSALTQPASVSGSPGQSITISCTGTSSDVGGYNYVSWYQQHPGKAPKLMIYDVSNRPSGVSNRFSGSKSGNTASLTISGLQAEDEADYYCSSYTSSSTLVYVFGTGTKVTVLTRASTKGPSVFPLAPSSKSTSGGTAALGCLVKDYFPEPVTVSWNSGALTSGVHTFPAVLQSSGLYSLSSVVTVPSSSLGTQTYICNVNHKPSNTKVDKRVEPKSCEVKTDSTDHVKPKETENTKQPSKSCHKPKAIVHTEKVNMMSLTVLGLRMLFAKTVAVNFLLTAKLFFL

SEQ ID NO: 13665 - protein, 771 aa, Artificial Sequence
  Synthetic Polypeptide
MALPVTALLLPLALLLHAARPEVQLVESGGGLVQPGGSLRLSCAASGFSFSDFWMSWVRQAPGKGLEWVATISQAGSEKDYVDSVKGRFTISRDNAKKSLYLQMNSLRAEDTAVYYCASGVYSFDYRGQGTLVTVSSGTGGGGSGGGGSGGGGSEFQVQLVQSGAEVKKPGASVKVSCKASGYTFTSYDINWVRQATGQGLEWMGWMNPNSGNTGYAQKFQGRVTMTRNTSISTAYMELSSLRSEDTAVYYCARGDSTKVEIKLEGQPKANPTVTLFPPSSEELQANKATLVCLISDFYPGAVTVAWKADGSPVKAGVETTKPSKQSNNKYAASSYLSLTPEQWKSHRSYSCQVTHEGSTVEKTVAPTECSPIKTDVITMDPKDNCSKDANDTLLLQLTNTSAYYMYLLLLLKSVVYFAIITCCLLRRTAFCCNGEKSRAKRSGSGATNFSLLKQAGDVEENPGPTSMDWIWRILFLVGAATGAHSFEQSVLTQPRSVSGSPGQSVTISCTGTSSDVGGYNYVSWYQQHPGEAPKLIIYDADKRPSGISNRFSSGKSGNTASLTISGLQVEDEADYYCCSYAGGSTWVFGGGTKVTVLTRASTKGPSVFPLAPSSKSTSGGTAALGCLVKDYFPEPVTVSWNSGALTSGVHTFPAVLQSSGLYSLSSVVTVPSSSLGTQTYICNVNHKPSNTKVDKRVEPKSCEVKTDSTDHVKPKETENTKQPSKSCHKPKAIVHTEKVNMMSLTVLGLRMLFAKTVAVNFLLTAKLFFL

SEQ ID NO: 13666 - protein, 793 aa, Artificial Sequence
  Synthetic Polypeptide
MALPVTALLLPLALLLHAARPEVQLVESGGGLVQPGGSLRLSCAASGFSFSDFWMSWVRQAPGKGLEWVATISQAGSEKDYVDSVKGRFTISRDNAKKSLYLQMNSLRAEDTAVYYCASGVYSFDYRGQGTLVTVSSGTGGGGSGGGGSGGGGSEFEVQLQQSGPGLVKPSQTLSLTCAISGDSVSSNSAAWNWIRQSPSRGLEWLGRTYYRSKWYSDYAVSVKSRITINPDTSKNQFSLQLNSVTPEDTAVYYCARDPYDFWSGYPDAFDIWGQGTMVTVSSLEGQPKANPTVTLFPPSSEELQANKATLVCLISDFYPGAVTVAWKADGSPVKAGVETTKPSKQSNNKYAASSYLSLTPEQWKSHRSYSCQVTHEGSTVEKTVAPTECSPIKTDVITMDPKDNCSKDANDTLLLQLTNTSAYYMYLLLLLKSVVYFAIITCCLLRRTAFCCNGEKSRAKRSGSGATNFSLLKQAGDVEENPGPTSMDWIWRILFLVGAATGAHSFEQSALTQPASVSGSPGQSITISCTGTSSDVGGYNYVSWYQQHPGKAPKVIISEVNNRPSGVSHRFSGSKSGNTASLTISGLQAEDEADYFCSSYTSGRTLYVFGTGSKVTVLGTRASTKGPSVFPLAPSSKSTSGGTAALGCLVKDYFPEPVTVSWNSGALTSGVHTFPAVLQSSGLYSLSSVVTVPSSSLGTQTYICNVNHKPSNTKVDKRVEPKSCEVKTDSTDHVKPKETENTKQPSKSCHKPKAIVHTEKVNMMSLTVLGLRMLFAKTVAVNFLLTAKLFFL

SEQ ID NO: 13667 - protein, 792 aa, Artificial Sequence
  Synthetic Polypeptide
MALPVTALLLPLALLLHAARPEVQLVESGGGLVQPGGSLRLSCAASGFSFSDFWMSWVRQAPGKGLEWVATISQAGSEKDYVDSVKGRFTISRDNAKKSLYLQMNSLRAEDTAVYYCASGVYSFDYRGQGTLVTVSSGTGGGGSGGGGSGGGGSEFQSALTQPASASGSPGQSVTISCTGTSSDVGGYNYVSWYQQHPGKAPKLMIYDVSNRPSGVSNRFSGSKSGNTASLTISGLQAEDEADYYCSSYTSSSTLYVFGTGTQLTVLLEGQPKANPTVTLFPPSSEELQANKATLVCLISDFYPGAVTVAWKADGSPVKAGVETTKPSKQSNNKYAASSYLSLTPEQWKSHRSYSCQVTHEGSTVEKTVAPTECSPIKTDVITMDPKDNCSKDANDTLLLQLTNTSAYYMYLLLLLKSVVYFAIITCCLLRRTAFCCNGEKSRAKRSGSGATNFSLLKQAGDVEENPGPTSMDWIWRILFLVGAATGAHSFEEVQLQQSGPGLVKPSQTLSLTCAISGDSMLSNSDTWNWIRQSPSRGLEWLGRTYHRSTWYDDYASSVRGRVSINVDTSKNQYSLQLNAVTPEDTGVYYCARVRLQDGNSWSDAFDVWGQGTMVTVSSTRASTKGPSVFPLAPSSKSTSGGTAALGCLVKDYFPEPVTVSWNSGALTSGVHTFPAVLQSSGLYSLSSVVTVPSSSLGTQTYICNVNHKPSNTKVDKRVEPKSCEVKTDSTDHVKPKETENTKQPSKSCHKPKAIVHTEKVNMMSLTVLGLRMLFAKTVAVNFLLTAKLFFL

SEQ ID NO: 13668 - protein, 792 aa, Artificial Sequence
  Synthetic Polypeptide
MALPVTALLLPLALLLHAARPEVQLVESGGGLVQPGGSLRLSCAASGFSFSDFWMSWVRQAPGKGLEWVATISQAGSEKDYVDSVKGRFTISRDNAKKSLYLQMNSLRAEDTAVYYCASGVYSFDYRGQGTLVTVSSGTGGGGSGGGGSGGGGSEFDVMLTQTPLSLPVSLGDQASISCRSSQSILHSTGDTYLEWYLQKPGQSPKLLINKVSNRLSGVPDRFSGSGSGTDFTLKISRVEAEDLGVYYCFQGSHVPWTFGGGTKLEIKRADAAPTVSIFPLEGQPKANPTVTLFPPSSEELQANKATLVCLISDFYPGAVTVAWKADGSPVKAGVETTKPSKQSNNKYAASSYLSLTPEQWKSHRSYSCQVTHEGSTVEKTVAPTECSPIKTDVITMDPKDNCSKDANDTLLLQLTNTSAYYMYLLLLLKSVVYFAIITCCLLRRTAFCCNGEKSRAKRSGSGATNFSLLKQAGDVEENPGPTSMDWIWRILFLVGAATGAHSFEQVKLQQSGPSLVKPGASVKMSCKASGYTFTDFYMKWVKQSHGKSLEWIGDINPNIGDTFYNQKFKGKATLTVDKSSSTAYMQLNSLTSEDSAVYFCSVGYFDVWGAGTTVTVSSTRASTKGPSVFPLAPSSKSTSGGTAALGCLVKDYFPEPVTVSWNSGALTSGVHTFPAVLQSSGLYSLSSVVTVPSSSLGTQTYICNVNHKPSNTKVDKRVEPKSCEVKTDSTDHVKPKETENTKQPSKSCHKPKAIVHTEKVNMMSLTVLGLRMLFAKTVAVNFLLTAKLFFL

SEQ ID NO: 13669 - protein, 788 aa, Artificial Sequence
  Synthetic Polypeptide
MALPVTALLLPLALLLHAARPEVQLVESGGGLVQPGGSLRLSCAASGFSFSDFWMSWVRQAPGKGLEWVATISQAGSEKDYVDSVKGRFTISRDNAKKSLYLQMNSLRAEDTAVYYCASGVYSFDYRGQGTLVTVSSGTGGGGSGGGGSGGGGSEFEIVLTQSPATLSLSPGERATLSCRASQSVSIYLAWYQQKPGQAPRLLIYDASNRATGIPARFSGSGSGTDFTLTISSLEPEDFAVYYCQQRSNWPPFTFGPGTKVDIKLEGQPKANPTVTLFPPSSEELQANKATLVCLISDFYPGAVTVAWKADGSPVKAGVETTKPSKQSNNKYAASSYLSLTPEQWKSHRSYSCQVTHEGSTVEKTVAPTECSPIKTDVITMDPKDNCSKDANDTLLLQLTNTSAYYMYLLLLLKSVVYFAIITCCLLRRTAFCCNGEKSRAKRSGSGATNFSLLKQAGDVEENPGPTSMDWIWRILFLVGAATGAHSFEQVQLVESGGGVVQPGRSLRLSCAASGFTFSSYGMHWVRQAPGKGLEWVAVIWDDGSNKYYVDSVKGRFTISRDNSKNTLYLQMNSLRAEDTAVYYCARDDYYGSGSFNSYYGTDVWGQGTTVTVSSTRASTKGPSVFPLAPSSKSTSGGTAALGCLVKDYFPEPVTVSWNSGALTSGVHTFPAVLQSSGLYSLSSVVTVPSSSLGTQTYICNVNHKPSNTKVDKRVEPKSCEVKTDSTDHVKPKETENTKQPSKSCHKPKAIVHTEKVNMMSLTVLGLRMLFAKTVAVNFLLTAKLFFL

SEQ ID NO: 13670 - protein, 773 aa, Artificial Sequence
  Synthetic Polypeptide
MALPVTALLLPLALLLHAARPEVQLVESGGGLVQPGGSLRLSCAASGFSFSDFWMSWVRQAPGKGLEWVATISQAGSEKDYVDSVKGRFTISRDNAKKSLYLQMNSLRAEDTAVYYCASGVYSFDYRGQGTLVTVSSGTGGGGSGGGGSGGGGSEFDIQMTQSPSSLSASVGDRVTITCRASQGISSWLAWYQQKPEKAPKSLIYAASSLQSGVPSRFSGSGSGTDFTLTISSLQPEDFATYYCQQYNSYPYTFGQGTKLEIKLEGQPKANPTVTLFPPSSEELQANKATLVCLISDFYPGAVTVAWKADGSPVKAGVETTKPSKQSNNKYAASSYLSLTPEQWKSHRSYSCQVTHEGSTVEKTVAPTECSPIKTDVITMDPKDNCSKDANDTLLLQLTNTSAYYMYLLLLLKSVVYFAIITCCLLRRTAFCCNGEKSRAKRSGSGATNFSLLKQAGDVEENPGPTSMDWIWRILFLVGAATGAHSFEEVQLVQSGGGLVHPGGSLRLSCAGSGFTFSTYLMYWVRQAPGKTLEWVSAIGSGGDTYYADSVKGRFTISRDNAKNSLYLQMNSLRAEDMAVYYCARGLGYWGQGTLVTVSSTRASTKGPSVFPLAPSSKSTSGGTAALGCLVKDYFPEPVTVSWNSGALTSGVHTFPAVLQSSGLYSLSSVVTVPSSSLGTQTYICNVNHKPSNTKVDKRVEPKSCEVKTDSTDHVKPKETENTKQPSKSCHKPKAIVHTEKVNMMSLTVLGLRMLFAKTVAVNFLLTAKLFFL

SEQ ID NO: 13671 - protein, 792 aa, Artificial Sequence
  Synthetic Polypeptide
MALPVTALLLPLALLLHAARPEVQLVESGGGLVQPGGSLRLSCAASGFSFSDFWMSWVRQAPGKGLEWVATISQAGSEKDYVDSVKGRFTISRDNAKKSLYLQMNSLRAEDTAVYYCASGVYSFDYRGQGTLVTVSSGTGGGGSGGGGSGGGGSEFLPVLTQPPSVSVAPGKTARITCGGNNIGSKSVHWYQQKPGQAPVLVVYDDSDRPSGIPERFSGSNSGNTATLTISRVEAGDEADYYCQVWDSSSDYVVFGGGTKLTVLLEGQPKANPTVTLFPPSSEELQANKATLVCLISDFYPGAVTVAWKADGSPVKAGVETTKPSKQSNNKYAASSYLSLTPEQWKSHRSYSCQVTHEGSTVEKTVAPTECSPIKTDVITMDPKDNCSKDANDTLLLQLTNTSAYYMYLLLLLKSVVYFAIITCCLLRRTAFCCNGEKSRAKRSGSGATNFSLLKQAGDVEENPGPTSMDWIWRILFLVGAATGAHSFEEVQLVQSGAEVKKPGESLKISCKGSGYSFTSYWIGWVRQMPGKGLEWMGIIYPGDSDTRYSPSFQGQVTISADKSISTAYLQWSSLKASDTAMYYCARQVWGWQGGMYPRSNWWYNLDSWGQGTLVTVSSTRASTKGPSVFPLAPSSKSTSGGTAALGCLVKDYFPEPVTVSWNSGALTSGVHTFPAVLQSSGLYSLSSVVTVPSSSLGTQTYICNVNHKPSNTKVDKRVEPKSCEVKTDSTDHVKPKETENTKQPSKSCHKPKAIVHTEKVNMMSLTVLGLRMLFAKTVAVNFLLTAKLFFL

SEQ ID NO: 13672 - protein, 785 aa, Artificial Sequence
  Synthetic Polypeptide
MALPVTALLLPLALLLHAARPEVQLVESGGGLVQPGGSLRLSCAASGFSFSDFWMSWVRQAPGKGLEWVATISQAGSEKDYVDSVKGRFTISRDNAKKSLYLQMNSLRAEDTAVYYCASGVYSFDYRGQGTLVTVSSGTGGGGSGGGGSGGGGSEFELVMTQSPASLAVSLGQRATISCRASESVDSYGKSFMHWYQLKPGQPPKLLIYRASNLESGVPARFSGSGSRTDFTLTIDPVEADDAATYYCQQNNEDPWTFGGGTKLEIKLEGQPKANPTVTLFPPSSEELQANKATLVCLISDFYPGAVTVAWKADGSPVKAGVETTKPSKQSNNKYAASSYLSLTPEQWKSHRSYSCQVTHEGSTVEKTVAPTECSPIKTDVITMDPKDNCSKDANDTLLLQLTNTSAYYMYLLLLLKSVVYFAIITCCLLRRTAFCCNGEKSRAKRSGSGATNFSLLKQAGDVEENPGPTSMDWIWRILFLVGAATGAHSFEEVQLEQSGPELVKPGASVKMSCKASGYTFTNYYMKWVKQSHGKSLEWIGDLNPNNGDTFYNQKFKGKATLTVDKSSNTAYMQLNSLTSEDSAVYYCARTGRYEENAMDYWGQGTSVTVSSTRASTKGPSVFPLAPSSKSTSGGTAALGCLVKDYFPEPVTVSWNSGALTSGVHTFPAVLQSSGLYSLSSVVTVPSSSLGTQTYICNVNHKPSNTKVDKRVEPKSCEVKTDSTDHVKPKETENTKQPSKSCHKPKAIVHTEKVNMMSLTVLGLRMLFAKTVAVNFLLTAKLFFL

SEQ ID NO: 13673 - protein, 779 aa, Artificial Sequence
  Synthetic Polypeptide
MALPVTALLLPLALLLHAARPEVQLVESGGGLVQPGGSLRLSCAASGFSFSDFWMSWVRQAPGKGLEWVATISQAGSEKDYVDSVKGRFTISRDNAKKSLYLQMNSLRAEDTAVYYCASGVYSFDYRGQGTLVTVSSGTGGGGSGGGGSGGGGSEFDVVMTQSPSSLSASVGDRVTITCMASEDIYIRLAWYQQKPGNAPKLLIYAATSLETGVPSRFSGSGSGTDFTLTISSLQPEDFATYYCQQYWSSPWTFGGGTKVEIKLEGQPKANPTVTLFPPSSEELQANKATLVCLISDFYPGAVTVAWKADGSPVKAGVETTKPSKQSNNKYAASSYLSLTPEQWKSHRSYSCQVTHEGSTVEKTVAPTECSPIKTDVITMDPKDNCSKDANDTLLLQLTNTSAYYMYLLLLLKSVVYFAIITCCLLRRTAFCCNGEKSRAKRSGSGATNFSLLKQAGDVEENPGPTSMDWIWRILFLVGAATGAHSFEQVQLQESGPGLVKPSQTLSLTCTVSGYSITSDYTWNWIRQPPGNGLEWIGYITYSGSTSYNPSLKSRVLISVDTSKNQVSLKLSSVTAADTAVYYCARLGRRYTMDYWGQGTTVTVSSTRASTKGPSVFPLAPSSKSTSGGTAALGCLVKDYFPEPVTVSWNSGALTSGVHTFPAVLQSSGLYSLSSVVTVPSSSLGTQTYICNVNHKPSNTKVDKRVEPKSCEVKTDSTDHVKPKETENTKQPSKSCHKPKAIVHTEKVNMMSLTVLGLRMLFAKTVAVNFLLTAKLFFL

SEQ ID NO: 13674 - protein, 783 aa, Artificial Sequence; identical to SEQ ID NO: 13537
  Synthetic Polypeptide

SEQ ID NO: 13675 - protein, 783 aa, Artificial Sequence
  Synthetic Polypeptide
MALPVTALLLPLALLLHAARPEVQLVESGGGLVQPGGSLRLSCAASGFSFSDFWMSWVRQAPGKGLEWVATISQAGSEKDYVDSVKGRFTISRDNAKKSLYLQMNSLRAEDTAVYYCASGVYSFDYRGQGTLVTVSSGTGGGGSGGGGSGGGGSEFDIVLTQSPATLSLSPGDRATLSCRASESVTILGSHLIYWYQQKPGQAPRLLIQLASNVQTGIPARFSGSGSRTDFTLTISSLEPEDFAVYYCLQSRTIPRTFGQGTKLEIKRLEGQPKANPTVTLFPPSSEELQANKATLVCLISDFYPGAVTVAWKADGSPVKAGVETTKPSKQSNNKYAASSYLSLTPEQWKSHRSYSCQVTHEGSTVEKTVAPTECSPIKTDVITMDPKDNCSKDANDTLLLQLTNTSAYYMYLLLLLKSVVYFAIITCCLLRRTAFCCNGEKSRAKRSGSGATNFSLLKQAGDVEENPGPTSMDWIWRILFLVGAATGAHSFEQVQLVQSGSELKKPGESVKISCKASGYTFTHYSMNWVRQAPGQGLEWMGRINTETGEPLYADDFKGRFVFSLDTSASTAYLQISSLKAEDTAVYYCSNDYLYSLDYWGQGTLVTVSSTRASTKGPSVFPLAPSSKSTSGGTAALGCLVKDYFPEPVTVSWNSGALTSGVHTFPAVLQSSGLYSLSSVVTVPSSSLGTQTYICNVNHKPSNTKVDKRVEPKSCEVKTDSTDHVKPKETENTKQPSKSCHKPKAIVHTEKVNMMSLTVLGLRMLFAKTVAVNFLLTAKLFFL

SEQ ID NO: 13676 - protein, 784 aa, Artificial Sequence
  Synthetic Polypeptide
MALPVTALLLPLALLLHAARPEVQLVESGGGLVQPGGSLRLSCAASGFSFSDFWMSWVRQAPGKGLEWVATISQAGSEKDYVDSVKGRFTISRDNAKKSLYLQMNSLRAEDTAVYYCASGVYSFDYRGQGTLVTVSSGTGGGGSGGGGSGGGGSEFDIQLTQSPSFLSASVGDRVTITCRASQGISTDLNWYQQKPGKAPKLLIYAASNLESGVPSRFSGSGSGTEFTLTISSLQPEDFATYYCQQSYNWPYTFGGGTKVEIKRLEGQPKANPTVTLFPPSSEELQANKATLVCLISDFYPGAVTVAWKADGSPVKAGVETTKPSKQSNNKYAASSYLSLTPEQWKSHRSYSCQVTHEGSTVEKTVAPTECSPIKTDVITMDPKDNCSKDANDTLLLQLTNTSAYYMYLLLLLKSVVYFAIITCCLLRRTAFCCNGEKSRAKRSGSGATNFSLLKQAGDVEENPGPTSMDWIWRILFLVGAATGAHSFEEVQLVESGGGLVKPGGSLRLSCAASGFTFSNFEMNWVRQAPGKGLEWVSGISSNGRYINYADSVKGRFTISRDNAKNSLYLQMNSLRAEDTAVYYCARVVDFDQDYNGFDYWGQGTLVTVSSTRASTKGPSVFPLAPSSKSTSGGTAALGCLVKDYFPEPVTVSWNSGALTSGVHTFPAVLQSSGLYSLSSVVTVPSSSLGTQTYICNVNHKPSNTKVDKRVEPKSCEVKTDSTDHVKPKETENTKQPSKSCHKPKAIVHTEKVNMMSLTVLGLRMLFAKTVAVNFLLTAKLFFL

SEQ ID NO: 13677 - protein, 782 aa, Artificial Sequence
  Synthetic Polypeptide
MALPVTALLLPLALLLHAARPEVQLVESGGGLVQPGGSLRLSCAASGFSFSDFWMSWVRQAPGKGLEWVATISQAGSEKDYVDSVKGRFTISRDNAKKSLYLQMNSLRAEDTAVYYCASGVYSFDYRGQGTLVTVSSGTGGGGSGGGGSGGGGSEFDIQLTQSPSFLSASVGDRVTITCSLSLGISTWRDWFPPRLGRGLEPLTYAASTLQSGVPSRFSGSGSGTEFTLTISSLQPEDFATYYCQQLNSYPLTFGGGTKVEIKRLEGQPKANPTVTLFPPSSEELQANKATLVCLISDFYPGAVTVAWKADGSPVKAGVETTKPSKQSNNKYAASSYLSLTPEQWKSHRSYSCQVTHEGSTVEKTVAPTECSPIKTDVITMDPKDNCSKDANDTLLLQLTNTSAYYMYLLLLLKSVVYFAIITCCLLRRTAFCCNGEKSRAKRSGSGATNFSLLKQAGDVEENPGPTSMDWIWRILFLVGAATGAHSFEEVQLVESGGGLVKPGGSLRLSCAASGFTFSTYGMSWVRQAPGKGLEWVAYINNGSGYIYYADSVKGRFTISRDNAKNSLYLQMNSLRAEDTAVYYCARGQWWSGGDFDYWGQGTLVTVSSTRASTKGPSVFPLAPSSKSTSGGTAALGCLVKDYFPEPVTVSWNSGALTSGVHTFPAVLQSSGLYSLSSVVTVPSSSLGTQTYICNVNHKPSNTKVDKRVEPKSCEVKTDSTDHVKPKETENTKQPSKSCHKPKAIVHTEKVNMMSLTVLGLRMLFAKTVAVNFLLTAKLFFL

SEQ ID NO: 13678 - protein, 783 aa, Artificial Sequence
  Synthetic Polypeptide
MALPVTALLLPLALLLHAARPEVQLVESGGGLVQPGGSLRLSCAASGFSFSDFWMSWVRQAPGKGLEWVATISQAGSEKDYVDSVKGRFTISRDNAKKSLYLQMNSLRAEDTAVYYCASGVYSFDYRGQGTLVTVSSGTGGGGSGGGGSGGGGSEFEIVLTQSPATLSLSPGERATLSCSASSSVSYMYWYQQKPGQAPRLLIYRTSNLASGIPARFSGSGSGTDFTLTISSLEPEDFAVYYCQQYHSYPTTFGQGTKVEIKRTVLEGQPKANPTVTLFPPSSEELQANKATLVCLISDFYPGAVTVAWKADGSPVKAGVETTKPSKQSNNKYAASSYLSLTPEQWKSHRSYSCQVTHEGSTVEKTVAPTECSPIKTDVITMDPKDNCSKDANDTLLLQLTNTSAYYMYLLLLLKSVVYFAIITCCLLRRTAFCCNGEKSRAKRSGSGATNFSLLKQAGDVEENPGPTSMDWIWRILFLVGAATGAHSFEEVQLVESGGGLVQPGGSLRLSCAASGFSFNTYAMNWVRQAPGKGLEWVSHIRSKSNNFATYYADSVKDRFTISRDNAKNSLYLQMNSLRAEDTAVYYCARQGGDFPMDYWGQGTLVTVSSTRASTKGPSVFPLAPSSKSTSGGTAALGCLVKDYFPEPVTVSWNSGALTSGVHTFPAVLQSSGLYSLSSVVTVPSSSLGTQTYICNVNHKPSNTKVDKRVEPKSCEVKTDSTDHVKPKETENTKQPSKSCHKPKAIVHTEKVNMMSLTVLGLRMLFAKTVAVNFLLTAKLFFL

SEQ ID NO: 13679 - protein, 779 aa, Artificial Sequence
  Synthetic Polypeptide
MALPVTALLLPLALLLHAARPEVQLVESGGGLVQPGGSLRLSCAASGFSFSDFWMSWVRQAPGKGLEWVATISQAGSEKDYVDSVKGRFTISRDNAKKSLYLQMNSLRAEDTAVYYCASGVYSFDYRGQGTLVTVSSGTGGGGSGGGGSGGGGSEFDVVMTQSPSSLSASVGDRVTITCKASEDIYIRLAWYQQKPGKAPKLLIYAATSLETGVPSRFSGSGSGTDFTLTISSLQPEDFATYYCQQYWTTPWTFGGGTKVEIKLEGQPKANPTVTLFPPSSEELQANKATLVCLISDFYPGAVTVAWKADGSPVKAGVETTKPSKQSNNKYAASSYLSLTPEQWKSHRSYSCQVTHEGSTVEKTVAPTECSPIKTDVITMDPKDNCSKDANDTLLLQLTNTSAYYMYLLLLLKSVVYFAIITCCLLRRTAFCCNGEKSRAKRSGSGATNFSLLKQAGDVEENPGPTSMDWIWRILFLVGAATGAHSFEQVQLQESGPGLVKPSQTLSLTCTVSGYSITIDYTWNWIRQPPGKGLEWIGYITYSGSTDYNPSLKSRVLISVDTSKNQVSLKLSSVTAADTAVYYCARLGRRYALDYWGQGTTVTVSSTRASTKGPSVFPLAPSSKSTSGGTAALGCLVKDYFPEPVTVSWNSGALTSGVHTFPAVLQSSGLYSLSSVVTVPSSSLGTQTYICNVNHKPSNTKVDKRVEPKSCEVKTDSTDHVKPKETENTKQPSKSCHKPKAIVHTEKVNMMSLTVLGLRMLFAKTVAVNFLLTAKLFFL

SEQ ID NO: 13680 - protein, 784 aa, Artificial Sequence
  Synthetic Polypeptide
MALPVTALLLPLALLLHAARPEVQLVESGGGLVQPGGSLRLSCAASGFSFSDFWMSWVRQAPGKGLEWVATISQAGSEKDYVDSVKGRFTISRDNAKKSLYLQMNSLRAEDTAVYYCASGVYSFDYRGQGTLVTVSSGTGGGGSGGGGSGGGGSEFDIQMTQTTSSLSASLGDRVTISCRASQDISNYLNWYQQKPDGTVKLLIYYTSILHSGVPSRFSGSGSGTDYSLTISNLEQEDFATYFCQQGNTLPWTFGGGTKLEIKALEGQPKANPTVTLFPPSSEELQANKATLVCLISDFYPGAVTVAWKADGSPVKAGVETTKPSKQSNNKYAASSYLSLTPEQWKSHRSYSCQVTHEGSTVEKTVAPTECSPIKTDVITMDPKDNCSKDANDTLLLQLTNTSAYYMYLLLLLKSVVYFAIITCCLLRRTAFCCNGEKSRAKRSGSGATNFSLLKQAGDVEENPGPTSMDWIWRILFLVGAATGAHSFEEVQLVESGGGLVKPGGSLKLSCAASGFAFSIYDMSWVRQTPEKRLEWVAYISSGGGTYYPDTVKGRFTISRDNAKNTLYLQMSSLKSEDTAMYYCARHSGYGTHWGVLFAYWGQGTLVTVSATRASTKGPSVFPLAPSSKSTSGGTAALGCLVKDYFPEPVTVSWNSGALTSGVHTFPAVLQSSGLYSLSSVVTVPSSSLGTQTYICNVNHKPSNTKVDKRVEPKSCEVKTDSTDHVKPKETENTKQPSKSCHKPKAIVHTEKVNMMSLTVLGLRMLFAKTVAVNFLLTAKLFFL

SEQ ID NO: 13681 - protein, 794 aa, Artificial Sequence
  Synthetic Polypeptide
MALPVTALLLPLALLLHAARPEVQLVESGGGLVQPGGSLRLSCAASGFSFSDFWMSWVRQAPGKGLEWVATISQAGSEKDYVDSVKGRFTISRDNAKKSLYLQMNSLRAEDTAVYYCASGVYSFDYRGQGTLVTVSSGTGGGGSGGGGSGGGGSEFDIVMTQSPDSLAVSLGERATINCKSSQSLLYRSNQKNYLAWYQQKPGQPPKLLIYWASTRESGVPDRFSGSGSGTDFTLTISSLQAEDVAVYYCQQYYNYPRTFGQGTKVEIKRTVLEGQPKANPTVTLFPPSSEELQANKATLVCLISDFYPGAVTVAWKADGSPVKAGVETTKPSKQSNNKYAASSYLSLTPEQWKSHRSYSCQVTHEGSTVEKTVAPTECSPIKTDVITMDPKDNCSKDANDTLLLQLTNTSAYYMYLLLLLKSVVYFAIITCCLLRRTAFCCNGEKSRAKRSGSGATNFSLLKQAGDVEENPGPTSMDWIWRILFLVGAATGAHSFEEVQLLESGGGLVQPGGSLRLSCAASGYSITSDYAWNWVRQAPGKGLEWVSYISNSGSTSYNPSLKSRFTISRDNSKNTLYLQMNSLRAEDTAVYYCAKERNYDYDDYYYAMDYWGQGTLVTVSSTRASTKGPSVFPLAPSSKSTSGGTAALGCLVKDYFPEPVTVSWNSGALTSGVHTFPAVLQSSGLYSLSSVVTVPSSSLGTQTYICNVNHKPSNTKVDKRVEPKSCEVKTDSTDHVKPKETENTKQPSKSCHKPKAIVHTEKVNMMSLTVLGLRMLFAKTVAVNFLLTAKLFFL

SEQ ID NO: 13682 - protein, 787 aa, Artificial Sequence
  Synthetic Polypeptide
MALPVTALLLPLALLLHAARPEVQLVESGGGLVQPGGSLRLSCAASGFSFSDFWMSWVRQAPGKGLEWVATISQAGSEKDYVDSVKGRFTISRDNAKKSLYLQMNSLRAEDTAVYYCASGVYSFDYRGQGTLVTVSSGTGGGGSGGGGSGGGGSEFDVVMTQSPLSLPVTLGQPASISCRSSQSLLHSSGNTYLEWYQQRPGQSPRPLIYKISTRFSGVPDRFSGSGSGTDFTLKISRVEAEDVGVYYCFQGSHVPYTFGGGTKVEIKRLEGQPKANPTVTLFPPSSEELQANKATLVCLISDFYPGAVTVAWKADGSPVKAGVETTKPSKQSNNKYAASSYLSLTPEQWKSHRSYSCQVTHEGSTVEKTVAPTECSPIKTDVITMDPKDNCSKDANDTLLLQLTNTSAYYMYLLLLLKSVVYFAIITCCLLRRTAFCCNGEKSRAKRSGSGATNFSLLKQAGDVEENPGPTSMDWIWRILFLVGAATGAHSFEQVQLVQSGAEVKKPGASVKVSCKASGLTIEDYYMHWVRQAPGQGLEWMGWIDPENGDTEYGPKFQGRVTMTRDTSINTAYMELSRLRSDDTAVYYCAVHNAHYGTWFAYWGQGTLVTVSSTRASTKGPSVFPLAPSSKSTSGGTAALGCLVKDYFPEPVTVSWNSGALTSGVHTFPAVLQSSGLYSLSSVVTVPSSSLGTQTYICNVNHKPSNTKVDKRVEPKSCEVKTDSTDHVKPKETENTKQPSKSCHKPKAIVHTEKVNMMSLTVLGLRMLFAKTVAVNFLLTAKLFFL

SEQ ID NO: 13683 - protein, 779 aa, Artificial Sequence
  Synthetic Polypeptide
MALPVTALLLPLALLLHAARPEVQLVESGGGLVQPGGSLRLSCAASGFSFSDFWMSWVRQAPGKGLEWVATISQAGSEKDYVDSVKGRFTISRDNAKKSLYLQMNSLRAEDTAVYYCASGVYSFDYRGQGTLVTVSSGTGGGGSGGGGSGGGGSEFDIQMTQSPSSLSASVGDRVTITCRASENIYSNLAWYQQKPGKAPKLLIYAATNLADGVPSRFSGSGSGTDFTLTISSLQPEDFATYYCQHFWGTPTFGQGTKVEIKRTVLEGQPKANPTVTLFPPSSEELQANKATLVCLISDFYPGAVTVAWKADGSPVKAGVETTKPSKQSNNKYAASSYLSLTPEQWKSHRSYSCQVTHEGSTVEKTVAPTECSPIKTDVITMDPKDNCSKDANDTLLLQLTNTSAYYMYLLLLLKSVVYFAIITCCLLRRTAFCCNGEKSRAKRSGSGATNFSLLKQAGDVEENPGPTSMDWIWRILFLVGAATGAHSFEEVQLVESGGGLVQPGGSLRLSCAASGFSLTNYGVHWVRQAPGKGLEWVSVIWSGGSTDYNAAFISRFTISADTSKNTAYLQMNSLRAEDTAVYYCARELIHAMDNWGQGTLVTVSSTRASTKGPSVFPLAPSSKSTSGGTAALGCLVKDYFPEPVTVSWNSGALTSGVHTFPAVLQSSGLYSLSSVVTVPSSSLGTQTYICNVNHKPSNTKVDKRVEPKSCEVKTDSTDHVKPKETENTKQPSKSCHKPKAIVHTEKVNMMSLTVLGLRMLFAKTVAVNFLLTAKLFFL

SEQ ID NO: 13684 - protein, 786 aa, Artificial Sequence
  Synthetic Polypeptide
MALPVTALLLPLALLLHAARPEVQLVESGGGLVQPGGSLRLSCAASGFSFSDFWMSWVRQAPGKGLEWVATISQAGSEKDYVDSVKGRFTISRDNAKKSLYLQMNSLRAEDTAVYYCASGVYSFDYRGQGTLVTVSSGTGGGGSGGGGSGGGGSEFDFVMTQSPLSLPVTPGEPASISCRSSQSIVHSNGNTYLEWYLQKPGQSPQLLIYKVSNRFSGVPDRFSGSGSGTDFTLKISRVEAEDVGVYYCFQGSHVPLTFGQGTKLEIKRLEGQPKANPTVTLFPPSSEELQANKATLVCLISDFYPGAVTVAWKADGSPVKAGVETTKPSKQSNNKYAASSYLSLTPEQWKSHRSYSCQVTHEGSTVEKTVAPTECSPIKTDVITMDPKDNCSKDANDTLLLQLTNTSAYYMYLLLLLKSVVYFAIITCCLLRRTAFCCNGEKSRAKRSGSGATNFSLLKQAGDVEENPGPTSMDWIWRILFLVGAATGAHSFEEVQLVESGAEVKKPGASVKVSCKASGYTFTSYWIHWVRQAPGQGLEWMGENDPSNGRTNYNEKFKNRVTLTVDTSISTAYMELSRLRSDDTAVYYCARGPNYFYSMDYWGQGTMVTVSSTRASTKGPSVFPLAPSSKSTSGGTAALGCLVKDYFPEPVTVSWNSGALTSGVHTFPAVLQSSGLYSLSSVVTVPSSSLGTQTYICNVNHKPSNTKVDKRVEPKSCEVKTDSTDHVKPKETENTKQPSKSCHKPKAIVHTEKVNMMSLTVLGLRMLFAKTVAVNFLLTAKLFFL

SEQ ID NO: 13685 - protein, 779 aa, Artificial Sequence
  Synthetic Polypeptide
MALPVTALLLPLALLLHAARPEVQLVESGGGLVQPGGSLRLSCAASGFSFSDFWMSWVRQAPGKGLEWVATISQAGSEKDYVDSVKGRFTISRDNAKKSLYLQMNSLRAEDTAVYYCASGVYSFDYRGQGTLVTVSSGTGGGGSGGGGSGGGGSEFDIQLTQSPSFLSASVGDRVTITCSARSSISFMYWYQQKPGKAPKLLIYDTSNLASGVPSRFSGSGSGTEFTLTISSLEAEDAATYYCQQWSSYPLTFGQGTKLEIKLEGQPKANPTVTLFPPSSEELQANKATLVCLISDFYPGAVTVAWKADGSPVKAGVETTKPSKQSNNKYAASSYLSLTPEQWKSHRSYSCQVTHEGSTVEKTVAPTECSPIKTDVITMDPKDNCSKDANDTLLLQLTNTSAYYMYLLLLLKSVVYFAIITCCLLRRTAFCCNGEKSRAKRSGSGATNFSLLKQAGDVEENPGPTSMDWIWRILFLVGAATGAHSFEQVQLVQSGAEVKKPGASVKVSCKASGYTFTGSWMNWVRQAPGQGLEWIGRIYPGDGETNYNGKFKDRVTITADKSTSTAYMELSSLRSEDTAVYYCARIYGNNVYFDVWGQGTTVTVSSTRASTKGPSVFPLAPSSKSTSGGTAALGCLVKDYFPEPVTVSWNSGALTSGVHTFPAVLQSSGLYSLSSVVTVPSSSLGTQTYICNVNHKPSNTKVDKRVEPKSCEVKTDSTDHVKPKETENTKQPSKSCHKPKAIVHTEKVNMMSLTVLGLRMLFAKTVAVNFLLTAKLFFL

SEQ ID NO: 13686 - protein, 787 aa, Artificial Sequence
  Synthetic Polypeptide
MALPVTALLLPLALLLHAARPEVQLVESGGGLVQPGGSLRLSCAASGFSFSDFWMSWVRQAPGKGLEWVATISQAGSEKDYVDSVKGRFTISRDNAKKSLYLQMNSLRAEDTAVYYCASGVYSFDYRGQGTLVTVSSGTGGGGSGGGGSGGGGSEFQLVLTQSPSASASLGSSVKLTCTLSSGHKTDTIDWYQQQPGKAPRYLMKLEGSGSYNKGSGVPDRFSGSSSGADWYLTISSLQSEDEADYYCGTDYPGNYLFGGGTQLTVLGLEGQPKANPTVTLFPPSSEELQANKATLVCLISDFYPGAVTVAWKADGSPVKAGVETTKPSKQSNNKYAASSYLSLTPEQWKSHRSYSCQVTHEGSTVEKTVAPTECSPIKTDVITMDPKDNCSKDANDTLLLQLTNTSAYYMYLLLLLKSVVYFAIITCCLLRRTAFCCNGEKSRAKRSGSGATNFSLLKQAGDVEENPGPTSMDWIWRILFLVGAATGAHSFEQEQLVESGGGLVQPGGSLRLSCAASGFTFSDYYMSWIRQAPGKGLEWVATIYPSSGKTYYADSAKGRLTISSDNAKDSLYLQMNSLRAEDTAVYYCTRDSYADDAALFDIWGQGTTVTVSSTRASTKGPSVFPLAPSSKSTSGGTAALGCLVKDYFPEPVTVSWNSGALTSGVHTFPAVLQSSGLYSLSSVVTVPSSSLGTQTYICNVNHKPSNTKVDKRVEPKSCEVKTDSTDHVKPKETENTKQPSKSCHKPKAIVHTEKVNMMSLTVLGLRMLFAKTVAVNFLLTAKLFFL

SEQ ID NO: 13687 - protein, 760 aa, Artificial Sequence
  Synthetic Polypeptide
MALPVTALLLPLALLLHAARPEVQLVESGGGLVQPGGSLRLSCAASGFSFSDFWMSWVRQAPGKGLEWVATISQAGSEKDYVDSVKGRFTISRDNAKKSLYLQMNSLRAEDTAVYYCASGVYSFDYRGQGTLVTVSSGTGGGGSGGGGSGGGGSEFEIVLTQSPDTLSLSPGEKATLSCRASQSVSSSFLAWYQQKPGQAPSLLIYVASRRAAGIPDRFSGSGSGTDFTLTISRLEPEDFGMFYCQHYGRTPFTFGPARGTAGQSYRDTVPSKQRRTPGQQGHTCVPDLRLLPWGCDSGLEGRWISCESRRGNHQAIQAEQQQIRRQLLPEPDTAVEVPQILQLPSDPRRQHRGKDSGPYRVQPHQDRCDYNGPQGQLLQGRQRYPAAPADQHQRLLHVLVAAAEVRGVLRHHHMLPAAENRLLLQRREVGQAIWIWSNKLLTTQTSRRGGESRAYYGLDLAHPFPCRRCYRRAFLRTDPVGGIRGRCGAAGEPETVMRGVWLHIQELRHALGATGPRKGFGVGRRDLVRRIVLRRSCEGKVHHLPRQQKYALPANELTQGGYGGLLLRSLRDCCGRRIRLLGTGYPGDSIKHACLYKGTLRVSSGSQQQVYKRRNSRSGLPGQGLLSRACDRVLERSTDKRRAHLSSRAAKQRPVLSEQRGHSALPGHPDLHLQCEPQAQHQGGQESGTQELSENRLHRPREAQRDREHQAAQQELPQAQGHRAHRESEHDEPDRAGPADAVRQNRGRELPADRQAVLP

SEQ ID NO: 13688 - protein, 769 aa, Artificial Sequence
  Synthetic Polypeptide
MALPVTALLLPLALLLHAARPEVQLVESGGGLVQPGGSLRLSCAASGFSFSDFWMSWVRQAPGKGLEWVATISQAGSEKDYVDSVKGRFTISRDNAKKSLYLQMNSLRAEDTAVYYCASGVYSFDYRGQGTLVTVSSGTGGGGSGGGGSGGGGSEFDIQMTQSPSSLSASLGDRVTITCRASQGIRNDLGWYQQKPGKAPKRLIYASSTLQSGVPSRFSGSGSGTEFTLTISSLQPEDFATYYCLQHNNFPWTFGQGTKVEIKRLEGQPKANPTVTLFPPSSEELQANKATLVCLISDFYPGAVTVAWKADGSPVKAGVETTKPSKQSNNKYAASSYLSLTPEQWKSHRSYSCQVTHEGSTVEKTVAPTECSPIKTDVITMDPKDNCSKDANDTLLLQLTNTSAYYMYLLLLLKSVVYFAIITCCLLRRTAFCCNGEKSRAKRSGSGATNFSLLKQAGDVEENPGPTSMDWIWRILFLVGAATGAHSFEHARKLLRSLDLYWSQPRHHSRVQVVFPSTQGWASAGSGNPLARLWNGSLTYSAMPKKATGQANPALFPRTLLSLRWCPPTWTRWTPPPITAQESLGMVGMVTTIIMGWMCGGKAQPRSQARVPLQRDPPCFLWLPAASLQAEEQPLWAAWSRITFPSLPCPGIAEHQAACTPFQPCCKAAACTLAAWSQCLALAWAPRPTSAMTTSLATPRWTREWNPRAVKKPTPPTTSPKRQRTPSSPARAATSPRPSCTPRKTAPCWACGCCSPKPWPTSCPPSCSS

SEQ ID NO: 13689 - protein, 782 aa, Artificial Sequence
  Synthetic Polypeptide
MALPVTALLLPLALLLHAARPEVQLVESGGGLVQPGGSLRLSCAASGFSFSDFWMSWVRQAPGKGLEWVATISQAGSEKDYVDSVKGRFTISRDNAKKSLYLQMNSLRAEDTAVYYCASGVYSFDYRGQGTLVTVSSGTGGGGSGGGGSGGGGSEFDIVLTQSPPSLAMSLGKRATISCRASESVTILGSHLIHWYQQKPGQPPTLLIQLASNVQTGVPARFSGSGSRTDFTLTIDPVEEDDVAVYYCLQSRTIPRTFGGGTKLEIKLEGQPKANPTVTLFPPSSEELQANKATLVCLISDFYPGAVTVAWKADGSPVKAGVETTKPSKQSNNKYAASSYLSLTPEQWKSHRSYSCQVTHEGSTVEKTVAPTECSPIKTDVITMDPKDNCSKDANDTLLLQLTNTSAYYMYLLLLLKSVVYFAIITCCLLRRTAFCCNGEKSRAKRSGSGATNFSLLKQAGDVEENPGPTSMDWIWRILFLVGAATGAHSFEQIQLVQSGPELKKPGETVKISCKASGYTFTDYSINWVKRAPGKGLKWMGWINTETREPAYAYDFRGRFAFSLETSASTAYLQINNLKYEDTATYFCALDYSYAMDYWGQGTSVTVSSTRASTKGPSVFPLAPSSKSTSGGTAALGCLVKDYFPEPVTVSWNSGALTSGVHTFPAVLQSSGLYSLSSVVTVPSSSLGTQTYICNVNHKPSNTKVDKRVEPKSCEVKTDSTDHVKPKETENTKQPSKSCHKPKAIVHTEKVNMMSLTVLGLRMLFAKTVAVNFLLTAKLFFL

SEQ ID NO: 13690 - protein, 754 aa, Artificial Sequence
  Synthetic Polypeptide
MALPVTALLLPLALLLHAARPEVQLVESGGGLVQPGGSLRLSCAASGFSFSDFWMSWVRQAPGKGLEWVATISQAGSEKDYVDSVKGRFTISRDNAKKSLYLQMNSLRAEDTAVYYCASGVYSFDYRGQGTLVTVSSGTGGGGSGGGGSGGGGSEFDIQLTQSPSSLSASVGDRVSFTCQASQDINNFLNWYQQKPGKAPKLLIYDASNLETGVPSRFSGSGSGTDFTFTISSLQPEDIATYYCQQYGNLPFTFGGGTKVEIKSSRDSLRPILPHCSLQAAKNSRPTRPHLCASPTSTLGLQWLGRPMDLLKPAWKPPSHPSRATTNTPPAPTAHLSSGSPTDPTAAKPTKAAPWKRQWPLQSAAPSRPMLQWTPRTTAPRTPTIPCCSSPTPAPTTCTCCCCSPWCTSPSSHAACCGEPPSAATARSLGPSDLDLEQQTSHYSNKQVTWRRIPGLLVWTGFGASFSLSALLPARIPSNRSNCKKADPDWSLLRHLVRARSVAAPSPPIIGHGYDNPQVRAWNGLAISTIQEARTTIPASPEQFQIPVKTSSVLNCQAQLPTPLCITASHWCIVEGIVIAGSIIGDREPWLYLPRVPLQRDPPCFLWLPAASLQAEEQPLWAAWSRITFPSLPCPGIAEHQAACTPFQPCCKAAACTLAAWSQCLALAWAPRPTSAMTTSLATPRWTREWNPRAVKKPTPPTTSPKRQRTPSSPARAATSPRPSCTPRKTAPCWACGCCSPKPWPTSCPPSCSS

SEQ ID NO: 13691 - protein, 786 aa, Artificial Sequence
  Synthetic Polypeptide
MALPVTALLLPLALLLHAARPEVQLVESGGGLVQPGGSLRLSCAASGFSFSDFWMSWVRQAPGKGLEWVATISQAGSEKDYVDSVKGRFTISRDNAKKSLYLQMNSLRAEDTAVYYCASGVYSFDYRGQGTLVTVSSGTGGGGSGGGGSGGGGSEFDIQLTQSPSSLSASVGDRVSFTCQASQDINNFLNWYQQKPGKAPKLLIYDASNLETGVPSRFSGSGSGTDFTFTISSLQPEDIATYYCQQYGNLPFTFGGGTKVEIKRLEGQPKANPTVTLFPPSSEELQANKATLVCLISDFYPGAVTVAWKADGSPVKAGVETTKPSKQSNNKYAASSYLSLTPEQWKSHRSYSCQVTHEGSTVEKTVAPTECSPIKTDVITMDPKDNCSKDANDTLLLQLTNTSAYYMYLLLLLKSVVYFAIITCCLLRRTAFCCNGEKSRAKRSGSGATNFSLLKQAGDVEENPGPTSMDWIWRILFLVGAATGAHSFEQVQLQESGPGLVKPSQTLSLTCTVSGGSISSGGFYWSWIRQHPGKGLEWIGYIHHSGSTHYNPSLKSRVTISIDTSKNLFSLRLSSVTAADTAVYYCASLVYCGGDCYSGFDYWGQGTLVTVSSTRASTKGPSVFPLAPSSKSTSGGTAALGCLVKDYFPEPVTVSWNSGALTSGVHTFPAVLQSSGLYSLSSVVTVPSSSLGTQTYICNVNHKPSNTKVDKRVEPKSCEVKTDSTDHVKPKETENTKQPSKSCHKPKAIVHTEKVNMMSLTVLGLRMLFAKTVAVNFLLTAKLFFL

SEQ ID NO: 13692 - protein, 782 aa, Artificial Sequence
  Synthetic Polypeptide
MALPVTALLLPLALLLHAARPEVQLVESGGGLVQPGGSLRLSCAASGFSFSDFWMSWVRQAPGKGLEWVATISQAGSEKDYVDSVKGRFTISRDNAKKSLYLQMNSLRAEDTAVYYCASGVYSFDYRGQGTLVTVSSGTGGGGSGGGGSGGGGSEFDIQMTQSPSSLSASVGDRVTITCKSSQSVLYSSNQKNYLAWFQQKPGKAPKLLIYWASTRESGVPSRFSGSGSGTDFTLTISSLQPEDFATYFCHQYLSSYTFGQGTKVEIKRLEGQPKANPTVTLFPPSSEELQANKATLVCLISDFYPGAVTVAWKADGSPVKAGVETTKPSKQSNNKYAASSYLSLTPEQWKSHRSYSCQVTHEGSTVEKTVAPTECSPIKTDVITMDPKDNCSKDANDTLLLQLTNTSAYYMYLLLLLKSVVYFAIITCCLLRRTAFCCNGEKSRAKRSGSGATNFSLLKQAGDVEENPGPTSMDWIWRILFLVGAATGAHSFEEVQLVESGGGLVQPGGSLRLSCAASGYTFTTYWMHWVRQAPGKGLEWVGYIRPSTGYTEYNQKFKDRFTISADTSKNTAYLQMNSLRAEDTAVYYCARSRWLLDYWGQGTLVTVSTRASTKGPSVFPLAPSSKSTSGGTAALGCLVKDYFPEPVTVSWNSGALTSGVHTFPAVLQSSGLYSLSSVVTVPSSSLGTQTYICNVNHKPSNTKVDKRVEPKSCEVKTDSTDHVKPKETENTKQPSKSCHKPKAIVHTEKVNMMSLTVLGLRMLFAKTVAVNFLLTAKLFFL

SEQ ID NO: 13693 - protein, 779 aa, Artificial Sequence
  Synthetic Polypeptide
MALPVTALLLPLALLLHAARPEVQLVESGGGLVQPGGSLRLSCAASGFSFSDFWMSWVRQAPGKGLEWVATISQAGSEKDYVDSVKGRFTISRDNAKKSLYLQMNSLRAEDTAVYYCASGVYSFDYRGQGTLVTVSSGTGGGGSGGGGSGGGGSEFDIQMTQSPSSLSASVGDRVTITCRASQDISNYLNWYQQKPGKAPKLLIYYTSRLHSGVPSRFSGSGSGTDFTLTISSLQPEDFATYYCQQGNTLPYTFGQGTKVEIKRLEGQPKANPTVTLFPPSSEELQANKATLVCLISDFYPGAVTVAWKADGSPVKAGVETTKPSKQSNNKYAASSYLSLTPEQWKSHRSYSCQVTHEGSTVEKTVAPTECSPIKTDVITMDPKDNCSKDANDTLLLQLTNTSAYYMYLLLLLKSVVYFAIITCCLLRRTAFCCNGEKSRAKRSGSGATNFSLLKQAGDVEENPGPTSMDWIWRILFLVGAATGAHSFEEVQLVESGGGLVQPGGSLRLSCAASGFTFSDYFMSWVRQAPGKGLEWVATISNGGTYTYYPDSVKGRFTISRDNSKNTLYLQMNSLRAEDTAVYYCARFDGYIFDYWGQGTLVTVSSTRASTKGPSVFPLAPSSKSTSGGTAALGCLVKDYFPEPVTVSWNSGALTSGVHTFPAVLQSSGLYSLSSVVTVPSSSLGTQTYICNVNHKPSNTKVDKRVEPKSCEVKTDSTDHVKPKETENTKQPSKSCHKPKAIVHTEKVNMMSLTVLGLRMLFAKTVAVNFLLTAKLFFL

SEQ ID NO: 13694 - protein, 917 aa, Artificial Sequence
  Synthetic Polypeptide
MALPVTALLLPLALLLHAARPEVQLVESGGGLVQPGGSLRLSCAASGFSFSDFWMSWVRQAPGKGLEWVATISQAGSEKDYVDSVKGRFTISRDNAKKSLYLQMNSLRAEDTAVYYCASGVYSFDYRGQGTLVTVSSGTGGGGSGGGGSGGGGSEFDIQMTQTTSSLSASLGDRVTISCRASQDISKYLNWYQQKPDGTVKLLIYHTSRLHSGVPSRFSGSGSGTDYSLTISNLEQEDIATYFCQQGNTLPYTFGGGTKLEITLEGQPKANPTVTLFPPSSEELQANKATLVCLISDFYPGAVTVAWKADGSPVKAGVETTKPSKQSNNKYAASSYLSLTPEQWKSHRSYSCQVTHEGSTVEKTVAPTECSPIKTDVITMDPKDNCSKDANDTLLLQLTNTSAYYMYLLLLLKSVVYFAIITCCLLRRTAFCCNGEKSRAKRSGSGATNFSLLKQAGDVEENPGPTSMDWIWRILFLVGAATGAHSGPQLQLQESGPGLVKPSETLSLTCTVSGDSISSGDYYWGWIRQPPGKGLEWIGHIYYSGVTYYNPSLKSRVTISVDTSRNQFSLKLSSVTAADTAVYYCTREDSSNWRSRGQGTLVTVSSGSGGGGSGGGGSGGGGSFEVKLQESGPGLVAPSQSLSVTCTVSGVSLPDYGVSWIRQPPRKGLEWLGVIWGSETTYYNSALKSRLTIIKDNSKSQVFLKMNSLQTDDTAIYYCAKHYYYGGSYAMDYWGQGTSVTVSSTRASTKGPSVFPLAPSSKSTSGGTAALGCLVKDYFPEPVTVSWNSGALTSGVHTFPAVLQSSGLYSLSSVVTVPSSSLGTQTYICNVNHKPSNTKVDKRVEPKSCEVKTDSTDHVKPKETENTKQPSKSCHKPKAIVHTEKVNMMSLTVLGLRMLFAKTVAVNFLLTAKLFFL

SEQ ID NO: 13695 - protein, 918 aa, Artificial Sequence
  Synthetic Polypeptide
MALPVTALLLPLALLLHAARPEVQLVESGGGLVQPGGSLRLSCAASGFSFSDFWMSWVRQAPGKGLEWVATISQAGSEKDYVDSVKGRFTISRDNAKKSLYLQMNSLRAEDTAVYYCASGVYSFDYRGQGTLVTVSSGTGGGGSGGGGSGGGGSEFEIVMTQSPATLSLSPGERATLSCRASQDISKYLNWYQQKPGQAPRLLIYHTSRLHSGIPARFSGSGSGTDYTLTISSLQPEDFAVYFCQQGNTLPYTFGQGTKLEIKLEGQPKANPTVTLFPPSSEELQANKATLVCLISDFYPGAVTVAWKADGSPVKAGVETTKPSKQSNNKYAASSYLSLTPEQWKSHRSYSCQVTHEGSTVEKTVAPTECSPIKTDVITMDPKDNCSKDANDTLLLQLTNTSAYYMYLLLLLKSVVYFAIITCCLLRRTAFCCNGEKSRAKRSGSGATNFSLLKQAGDVEENPGPTSMDWIWRILFLVGAATGAHSGPQLQLQESGPGLVKPSETLSLTCTVSGDSISSGDYYWGWIRQPPGKGLEWIGHIYYSGVTYYNPSLKSRVTISVDTSRNQFSLKLSSVTAADTAVYYCTREDSSNWRSRGQGTLVTVSSGSGGGGSGGGGSGGGGSFEQVQLQESGPGLVKPSETLSLTCTVSGVSLPDYGVSWIRQPPGKGLEWIGVIWGSETTYYNSSLKSRVTISKDNSKNQVSLKLSSVTAADTAVYYCAKHYYYGGSYAMDYWGQGTLVTVSSTRASTKGPSVFPLAPSSKSTSGGTAALGCLVKDYFPEPVTVSWNSGALTSGVHTFPAVLQSSGLYSLSSVVTVPSSSLGTQTYICNVNHKPSNTKVDKRVEPKSCEVKTDSTDHVKPKETENTKQPSKSCHKPKAIVHTEKVNMMSLTVLGLRMLFAKTVAVNFLLTAKLFFL

SEQ ID NO: 13696 - protein, 919 aa, Artificial Sequence
  Synthetic Polypeptide
MALPVTALLLPLALLLHAARPEVQLVESGGGLVQPGGSLRLSCAASGFSFSDFWMSWVRQAPGKGLEWVATISQAGSEKDYVDSVKGRFTISRDNAKKSLYLQMNSLRAEDTAVYYCASGVYSFDYRGQGTLVTVSSGTGGGGSGGGGSGGGGSEFDEIVLTQSPATLSLSPGERATLSCSASSSVSYMHWYQQKPGQAPRLLIYDTSKLASGIPARFSGSGSGTDFTLTISSLEPEDVAVYYCFQGSVYPFTFGQGTKLEIKRLEGQPKANPTVTLFPPSSEELQANKATLVCLISDFYPGAVTVAWKADGSPVKAGVETTKPSKQSNNKYAASSYLSLTPEQWKSHRSYSCQVTHEGSTVEKTVAPTECSPIKTDVITMDPKDNCSKDANDTLLLQLTNTSAYYMYLLLLLKSVVYFAIITCCLLRRTAFCCNGEKSRAKRSGSGATNFSLLKQAGDVEENPGPTSMDWIWRILFLVGAATGAHSGPQLQLQESGPGLVKPSETLSLTCTVSGDSISSGDYYWGWIRQPPGKGLEWIGHIYYSGVTYYNPSLKSRVTISVDTSRNQFSLKLSSVTAADTAVYYCTREDSSNWRSRGQGTLVTVSSGSGGGGSGGGGSGGGGSFEQVQLQESGPGLVKPSQTLSLTCTVSGGSISTSGMGVGWIRQHPGKGLEWIGHIWWDDDKRYNPALKSRVTISVDTSKNQFSLKLSSVTAADTAVYYCARMELWSYYFDYWGQGTLVTVSSTRASTKGPSVFPLAPSSKSTSGGTAALGCLVKDYFPEPVTVSWNSGALTSGVHTFPAVLQSSGLYSLSSVVTVPSSSLGTQTYICNVNHKPSNTKVDKRVEPKSCEVKTDSTDHVKPKETENTKQPSKSCHKPKAIVHTEKVNMMSLTVLGLRMLFAKTVAVNFLLTAKLFFL

SEQ ID NO: 13697 - protein, 917 aa, Artificial Sequence
  Synthetic Polypeptide
MALPVTALLLPLALLLHAARPEVQLVESGGGLVQPGGSLRLSCAASGFSFSDFWMSWVRQAPGKGLEWVATISQAGSEKDYVDSVKGRFTISRDNAKKSLYLQMNSLRAEDTAVYYCASGVYSFDYRGQGTLVTVSSGTGGGGSGGGGSGGGGSEFDYIHVTQSPSSLSVSIGDRVTINCQTSQGVGSDLHWYQHKPGRAPKLLIHHASSVEDGVPSRFSGTGFHTSFNLTINDLQADDIGTYYCQVLQSFGRGSRLDTKLEGQPKANPTVTLFPPSSEELQANKATLVCLISDFYPGAVTVAWKADGSPVKAGVETTKPSKQSNNKYAASSYLSLTPEQWKSHRSYSCQVTHEGSTVEKTVAPTECSPIKTDVITMDPKDNCSKDANDTLLLQLTNTSAYYMYLLLLLKSVVYFAIITCCLLRRTAFCCNGEKSRAKRSGSGATNFSLLKQAGDVEENPGPTSMDWIWRILFLVGAATGAHSGPQLQLQESGPGLVKPSETLSLTCTVSGDSISSGDYYWGWIRQPPGKGLEWIGHIYYSGVTYYNPSLKSRVTISVDTSRNQFSLKLSSVTAADTAVYYCTREDSSNWRSRGQGTLVTVSSGSGGGGSGGGGSGGGGSFERAHLVQSGTAMKKPGASVRVSCQTSGYTFTAHILFWFRQAPGRGLEWVGWIKPQYGAVNFGGGFRDRVTLTRDVYREIAYMDIRGLKPDDTAVYYCARDRSYGDSSWALDAWGQGTTVVVSATRASTKGPSVFPLAPSSKSTSGGTAALGCLVKDYFPEPVTVSWNSGALTSGVHTFPAVLQSSGLYSLSSVVTVPSSSLGTQTYICNVNHKPSNTKVDKRVEPKSCEVKTDSTDHVKPKETENTKQPSKSCHKPKAIVHTEKVNMMSLTVLGLRMLFAKTVAVNFLLTAKLFFL

SEQ ID NO: 13698 - protein, 927 aa, Artificial Sequence
  Synthetic Polypeptide
MALPVTALLLPLALLLHAARPEVQLVESGGGLVQPGGSLRLSCAASGFSFSDFWMSWVRQAPGKGLEWVATISQAGSEKDYVDSVKGRFTISRDNAKKSLYLQMNSLRAEDTAVYYCASGVYSFDYRGQGTLVTVSSGTGGGGSGGGGSGGGGSEFDVQMIQTPDSLAVSLGQRATISCRASESVDNYGISFMHWYQQKPGQSPKLLIYRASNLESGIPARFSGSGSRTDFTLTINPVETDDVATYYCQQNNKDPPTFGGGTKLEIKLEGQPKANPTVTLFPPSSEELQANKATLVCLISDFYPGAVTVAWKADGSPVKAGVETTKPSKQSNNKYAASSYLSLTPEQWKSHRSYSCQVTHEGSTVEKTVAPTECSPIKTDVITMDPKDNCSKDANDTLLLQLTNTSAYYMYLLLLLKSVVYFAIITCCLLRRTAFCCNGEKSRAKRSGSGATNFSLLKQAGDVEENPGPTSMDWIWRILFLVGAATGAHSGPQLQLQESGPGLVKPSETLSLTCTVSGDSISSGDYYWGWIRQPPGKGLEWIGHIYYSGVTYYNPSLKSRVTISVDTSRNQFSLKLSSVTAADTAVYYCTREDSSNWRSRGQGTLVTVSSGSGGGGSGGGGSGGGGSFEGGGGSQVQLQQSGAELVKPGASVKISCKASGYAFSSYWMNWVKQRPGKGLEWIGQIYPGDGDTTYNGKFKGKATLTADKSSSTVYMQLNSLTSEDSAVYFCVRYYYGSSGYFDYWGQGTTLTVSSTRASTKGPSVFPLAPSSKSTSGGTAALGCLVKDYFPEPVTVSWNSGALTSGVHTFPAVLQSSGLYSLSSVVTVPSSSLGTQTYICNVNHKPSNTKVDKRVEPKSCEVKTDSTDHVKPKETENTKQPSKSCHKPKAIVHTEKVNMMSLTVLGLRMLFAKTVAVNFLLTAKLFFL

SEQ ID NO: 13699 - protein, 918 aa, Artificial Sequence
  Synthetic Polypeptide
MALPVTALLLPLALLLHAARPEVQLVESGGGLVQPGGSLRLSCAASGFSFSDFWMSWVRQAPGKGLEWVATISQAGSEKDYVDSVKGRFTISRDNAKKSLYLQMNSLRAEDTAVYYCASGVYSFDYRGQGTLVTVSSGTGGGGSGGGGSGGGGSEFDVQMIQTPSSLSASLGDRVTISCRASQDIGNYLNWYQQKPDGTVKLLIYYTSRLHSGVPSRFSGSGSGTEYSLTISNLEQEDIATYFCQQGSALPPTFGGGTKLEINLEGQPKANPTVTLFPPSSEELQANKATLVCLISDFYPGAVTVAWKADGSPVKAGVETTKPSKQSNNKYAASSYLSLTPEQWKSHRSYSCQVTHEGSTVEKTVAPTECSPIKTDVITMDPKDNCSKDANDTLLLQLTNTSAYYMYLLLLLKSVVYFAIITCCLLRRTAFCCNGEKSRAKRSGSGATNFSLLKQAGDVEENPGPTSMDWIWRILFLVGAATGAHSGPQLQLQESGPGLVKPSETLSLTCTVSGDSISSGDYYWGWIRQPPGKGLEWIGHIYYSGVTYYNPSLKSRVTISVDTSRNQFSLKLSSVTAADTAVYYCTREDSSNWRSRGQGTLVTVSSGSGGGGSGGGGSGGGGSFEALQLQQSGAELVRPGASVTLSCKASGYTFTDYEMHWVKQTPVHGLEWIGAIDPETGGTAYNQKFEGKAILTADKSSSTAYMELRSLTSEDSPVYYCARRRYYGSSSFDYWGQGTTLTVSSTRASTKGPSVFPLAPSSKSTSGGTAALGCLVKDYFPEPVTVSWNSGALTSGVHTFPAVLQSSGLYSLSSVVTVPSSSLGTQTYICNVNHKPSNTKVDKRVEPKSCEVKTDSTDHVKPKETENTKQPSKSCHKPKAIVHTEKVNMMSLTVLGLRMLFAKTVAVNFLLTAKLFFL

SEQ ID NO: 13700 - protein, 922 aa, Artificial Sequence
  Synthetic Polypeptide
MALPVTALLLPLALLLHAARPEVQLVESGGGLVQPGGSLRLSCAASGFSFSDFWMSWVRQAPGKGLEWVATISQAGSEKDYVDSVKGRFTISRDNAKKSLYLQMNSLRAEDTAVYYCASGVYSFDYRGQGTLVTVSSGTGGGGSGGGGSGGGGSEFDIVLTQSPASLAVSLGQRATISCRASKSVSTSGYSYLHWYQQKPGQPPKLLIYLASNLESGVPARFSGSGSGTDFTLNIHPVEEEDAATYYCQHSRELPFTFGSGTKLEIKLEGQPKANPTVTLFPPSSEELQANKATLVCLISDFYPGAVTVAWKADGSPVKAGVETTKPSKQSNNKYAASSYLSLTPEQWKSHRSYSCQVTHEGSTVEKTVAPTECSPIKTDVITMDPKDNCSKDANDTLLLQLTNTSAYYMYLLLLLKSVVYFAIITCCLLRRTAFCCNGEKSRAKRSGSGATNFSLLKQAGDVEENPGPTSMDWIWRILFLVGAATGAHSGPQLQLQESGPGLVKPSETLSLTCTVSGDSISSGDYYWGWIRQPPGKGLEWIGHIYYSGVTYYNPSLKSRVTISVDTSRNQFSLKLSSVTAADTAVYYCTREDSSNWRSRGQGTLVTVSSGSGGGGSGGGGSGGGGSFEQVQLVESGGGLVQPGGSLKLSCAASGFDFSRYWMSWVRQAPGKGLEWIGEINPTSSTINFTPSLKDKVFISRDNAKNTLYLQMSKVRSEDTALYYCARGNYYRYGDAMDYWGQGTSVTVSTRASTKGPSVFPLAPSSKSTSGGTAALGCLVKDYFPEPVTVSWNSGALTSGVHTFPAVLQSSGLYSLSSVVTVPSSSLGTQTYICNVNHKPSNTKVDKRVEPKSCEVKTDSTDHVKPKETENTKQPSKSCHKPKAIVHTEKVNMMSLTVLGLRMLFAKTVAVNFLLTAKLFFL

SEQ ID NO: 13701 - protein, 920 aa, Artificial Sequence
  Synthetic Polypeptide
MALPVTALLLPLALLLHAARPEVQLVESGGGLVQPGGSLRLSCAASGFSFSDFWMSWVRQAPGKGLEWVATISQAGSEKDYVDSVKGRFTISRDNAKKSLYLQMNSLRAEDTAVYYCASGVYSFDYRGQGTLVTVSSGTGGGGSGGGGSGGGGSEFDIQMTQSPSSLSASVGDRVTITCSASQDISNYLNWYQQKPGKAPKLLIYYTSNLHSGVPSRFSGSGSGTDFTLTISSLQPEDFATYYCQQYRKLPWTFGQGTKLEIKRLEGQPKANPTVTLFPPSSEELQANKATLVCLISDFYPGAVTVAWKADGSPVKAGVETTKPSKQSNNKYAASSYLSLTPEQWKSHRSYSCQVTHEGSTVEKTVAPTECSPIKTDVITMDPKDNCSKDANDTLLLQLTNTSAYYMYLLLLLKSVVYFAIITCCLLRRTAFCCNGEKSRAKRSGSGATNFSLLKQAGDVEENPGPTSMDWIWRILFLVGAATGAHSGPQLQLQESGPGLVKPSETLSLTCTVSGDSISSGDYYWGWIRQPPGKGLEWIGHIYYSGVTYYNPSLKSRVTISVDTSRNQFSLKLSSVTAADTAVYYCTREDSSNWRSRGQGTLVTVSSGSGGGGSGGGGSGGGGSFEQVQLVQSGAEVKKPGSSVKVSCKASGGTFSNYWMHWVRQAPGQGLEWMGATYRGHSDTYYNQKFKGRVTITADKSTSTAYMELSSLRSEDTAVYYCARGAIYDGYDVLDNWGQGTLVTVSSTRASTKGPSVFPLAPSSKSTSGGTAALGCLVKDYFPEPVTVSWNSGALTSGVHTFPAVLQSSGLYSLSSVVTVPSSSLGTQTYICNVNHKPSNTKVDKRVEPKSCEVKTDSTDHVKPKETENTKQPSKSCHKPKAIVHTEKVNMMSLTVLGLRMLFAKTVAVNFLLTAKLFFL

SEQ ID NO: 13702 - protein, 920 aa, Artificial Sequence
  Synthetic Polypeptide
MALPVTALLLPLALLLHAARPEVQLVESGGGLVQPGGSLRLSCAASGFSFSDFWMSWVRQAPGKGLEWVATISQAGSEKDYVDSVKGRFTISRDNAKKSLYLQMNSLRAEDTAVYYCASGVYSFDYRGQGTLVTVSSGTGGGGSGGGGSGGGGSEFDIVLTQSPATLSLSPGDRATISCRASESVTILGSHLIYWYQQKPGQPPRLLIQLASNVQTGVPARFSGSGSRTDFTLTISSVEPEDFAVYYCLQSRTIPRTFGQGTKLEIKRLEGQPKANPTVTLFPPSSEELQANKATLVCLISDFYPGAVTVAWKADGSPVKAGVETTKPSKQSNNKYAASSYLSLTPEQWKSHRSYSCQVTHEGSTVEKTVAPTECSPIKTDVITMDPKDNCSKDANDTLLLQLTNTSAYYMYLLLLLKSVVYFAIITCCLLRRTAFCCNGEKSRAKRSGSGATNFSLLKQAGDVEENPGPTSMDWIWRILFLVGAATGAHSGPQLQLQESGPGLVKPSETLSLTCTVSGDSISSGDYYWGWIRQPPGKGLEWIGHIYYSGVTYYNPSLKSRVTISVDTSRNQFSLKLSSVTAADTAVYYCTREDSSNWRSRGQGTLVTVSSGSGGGGSGGGGSGGGGSFEQVQLVQSGPEVKKPGESVKISCKASGYTFRHYSMNWVKQAPGQGLKWMGRINTESGVPIYADDFKGRFSFTVDTSASTAYLEISSLTSEDTAVYFCSNDYLYSLDFWGQGTTLTVSSTRASTKGPSVFPLAPSSKSTSGGTAALGCLVKDYFPEPVTVSWNSGALTSGVHTFPAVLQSSGLYSLSSVVTVPSSSLGTQTYICNVNHKPSNTKVDKRVEPKSCEVKTDSTDHVKPKETENTKQPSKSCHKPKAIVHTEKVNMMSLTVLGLRMLFAKTVAVNFLLTAKLFFL

SEQ ID NO: 13703 - protein, 921 aa, Artificial Sequence
  Synthetic Polypeptide
MALPVTALLLPLALLLHAARPEVQLVESGGGLVQPGGSLRLSCAASGFSFSDFWMSWVRQAPGKGLEWVATISQAGSEKDYVDSVKGRFTISRDNAKKSLYLQMNSLRAEDTAVYYCASGVYSFDYRGQGTLVTVSSGTGGGGSGGGGSGGGGSEFQSVLTQPPSVSGAPGQRVTISCTGSSSNIGAGFDVHWYQQLPGTAPKLLIYGNSNRPSGVPDRFSGSKSGTSASLAITGLQAEDEADYYCQSYDSSLSGYVFGTGTKVTVLGLEGQPKANPTVTLFPPSSEELQANKATLVCLISDFYPGAVTVAWKADGSPVKAGVETTKPSKQSNNKYAASSYLSLTPEQWKSHRSYSCQVTHEGSTVEKTVAPTECSPIKTDVITMDPKDNCSKDANDTLLLQLTNTSAYYMYLLLLLKSVVYFAIITCCLLRRTAFCCNGEKSRAKRSGSGATNFSLLKQAGDVEENPGPTSMDWIWRILFLVGAATGAHSGPQLQLQESGPGLVKPSETLSLTCTVSGDSISSGDYYWGWIRQPPGKGLEWIGHIYYSGVTYYNPSLKSRVTISVDTSRNQFSLKLSSVTAADTAVYYCTREDSSNWRSRGQGTLVTVSSGSGGGGSGGGGSGGGGSFEQVQLVQSGAEVKKPGASVKVSCKASGYTFTDYYMHWVRQAPGQRLEWMGWINPNSGGTNYAQKFQDRITVTRDTSSNTGYMELTRLRSDDTAVYYCARSPYSGVLDKWGQGTLVTVSSTRASTKGPSVFPLAPSSKSTSGGTAALGCLVKDYFPEPVTVSWNSGALTSGVHTFPAVLQSSGLYSLSSVVTVPSSSLGTQTYICNVNHKPSNTKVDKRVEPKSCEVKTDSTDHVKPKETENTKQPSKSCHKPKAIVHTEKVNMMSLTVLGLRMLFAKTVAVNFLLTAKLFFL

SEQ ID NO: 13704 - protein, 918 aa, Artificial Sequence
  Synthetic Polypeptide
MALPVTALLLPLALLLHAARPEVQLVESGGGLVQPGGSLRLSCAASGFSFSDFWMSWVRQAPGKGLEWVATISQAGSEKDYVDSVKGRFTISRDNAKKSLYLQMNSLRAEDTAVYYCASGVYSFDYRGQGTLVTVSSGTGGGGSGGGGSGGGGSEFQAVLTQPPSASGTPGQRVTISCSGSSSNIGSYTVSWYQQLPGTAPKFLIYSNNQRPSGVPDRFSGSKSGTSASLAISGLQSEDEADYYCAAWDDSLNGYVFGTGTKVTVLGLEGQPKANPTVTLFPPSSEELQANKATLVCLISDFYPGAVTVAWKADGSPVKAGVETTKPSKQSNNKYAASSYLSLTPEQWKSHRSYSCQVTHEGSTVEKTVAPTECSPIKTDVITMDPKDNCSKDANDTLLLQLTNTSAYYMYLLLLLKSVVYFAIITCCLLRRTAFCCNGEKSRAKRSGSGATNFSLLKQAGDVEENPGPTSMDWIWRILFLVGAATGAHSGPQLQLQESGPGLVKPSETLSLTCTVSGDSISSGDYYWGWIRQPPGKGLEWIGHIYYSGVTYYNPSLKSRVTISVDTSRNQFSLKLSSVTAADTAVYYCTREDSSNWRSRGQGTLVTVSSGSGGGGSGGGGSGGGGSFEVQLVQSGAEVKKPGESLKISCKGSGYDFTTYWIGWVRQMPGKGLEWMGIIYPGDSDTRYSPSVRGRVTISADKSINTAYLQWSSLEASDTAMYYCARMWTFSQDGWGQGTLVTVSSTRASTKGPSVFPLAPSSKSTSGGTAALGCLVKDYFPEPVTVSWNSGALTSGVHTFPAVLQSSGLYSLSSVVTVPSSSLGTQTYICNVNHKPSNTKVDKRVEPKSCEVKTDSTDHVKPKETENTKQPSKSCHKPKAIVHTEKVNMMSLTVLGLRMLFAKTVAVNFLLTAKLFFL

SEQ ID NO: 13705 - protein, 921 aa, Artificial Sequence
  Synthetic Polypeptide
MALPVTALLLPLALLLHAARPEVQLVESGGGLVQPGGSLRLSCAASGFSFSDFWMSWVRQAPGKGLEWVATISQAGSEKDYVDSVKGRFTISRDNAKKSLYLQMNSLRAEDTAVYYCASGVYSFDYRGQGTLVTVSSGTGGGGSGGGGSGGGGSEFDIVMTQSPDSLAVSLGERATINCKSSQSILYSSNQKNYLAWYQQKPGQSPKLLIYWASTRESGVPDRFSGSGSGTDFTLTISSLQAEDVAVYYCHQYISSYTFGQGTKLEIKLEGQPKANPTVTLFPPSSEELQANKATLVCLISDFYPGAVTVAWKADGSPVKAGVETTKPSKQSNNKYAASSYLSLTPEQWKSHRSYSCQVTHEGSTVEKTVAPTECSPIKTDVITMDPKDNCSKDANDTLLLQLTNTSAYYMYLLLLLKSVVYFAIITCCLLRRTAFCCNGEKSRAKRSGSGATNFSLLKQAGDVEENPGPTSMDWIWRILFLVGAATGAHSGPQLQLQESGPGLVKPSETLSLTCTVSGDSISSGDYYWGWIRQPPGKGLEWIGHIYYSGVTYYNPSLKSRVTISVDTSRNQFSLKLSSVTAADTAVYYCTREDSSNWRSRGQGTLVTVSSGSGGGGSGGGGSGGGGSFEQVQLVQSGAEVKKPGASVKVSCKASGYTFASQWMHWMRQAPGQGLEWIGWINPGNVNTKYNEKFKGRATLTVDTSTNTAYMELSSLRSEDTAVYYCARSTWYRPLDYWGQGTLVTVSSTRASTKGPSVFPLAPSSKSTSGGTAALGCLVKDYFPEPVTVSWNSGALTSGVHTFPAVLQSSGLYSLSSVVTVPSSSLGTQTYICNVNHKPSNTKVDKRVEPKSCEVKTDSTDHVKPKETENTKQPSKSCHKPKAIVHTEKVNMMSLTVLGLRMLFAKTVAVNFLLTAKLFFL

SEQ ID NO: 13706 - protein, 921 aa, Artificial Sequence
  Synthetic Polypeptide
MALPVTALLLPLALLLHAARPEVQLVESGGGLVQPGGSLRLSCAASGFSFSDFWMSWVRQAPGKGLEWVATISQAGSEKDYVDSVKGRFTISRDNAKKSLYLQMNSLRAEDTAVYYCASGVYSFDYRGQGTLVTVSSGTGGGGSGGGGSGGGGSEFDHIVLTQSPSSLSASLGDRVTISCRASQDISTYLNWYQQKPDGTVKLLIFYTSRLHAGVPSRFSGSGSGTHHSLTISNLEQEDIATYFCQQGNSLPFTFGSGTKLEIKRLEGQPKANPTVTLFPPSSEELQANKATLVCLISDFYPGAVTVAWKADGSPVKAGVETTKPSKQSNNKYAASSYLSLTPEQWKSHRSYSCQVTHEGSTVEKTVAPTECSPIKTDVITMDPKDNCSKDANDTLLLQLTNTSAYYMYLLLLLKSVVYFAIITCCLLRRTAFCCNGEKSRAKRSGSGATNFSLLKQAGDVEENPGPTSMDWIWRILFLVGAATGAHSGPQLQLQESGPGLVKPSETLSLTCTVSGDSISSGDYYWGWIRQPPGKGLEWIGHIYYSGVTYYNPSLKSRVTISVDTSRNQFSLKLSSVTAADTAVYYCTREDSSNWRSRGQGTLVTVSSGSGGGGSGGGGSGGGGSFEQVQLKESGPELEKPGASVKISCKASGYSFTAYSMNWVKQNNGMSLEWIGSIDPYYGDTKYAQKFKGKATLTVDKASSTAYLQLKSLTSEDSAVYYCARRMITTGDWYFDVWGAGTTVTVSSTRASTKGPSVFPLAPSSKSTSGGTAALGCLVKDYFPEPVTVSWNSGALTSGVHTFPAVLQSSGLYSLSSVVTVPSSSLGTQTYICNVNHKPSNTKVDKRVEPKSCEVKTDSTDHVKPKETENTKQPSKSCHKPKAIVHTEKVNMMSLTVLGLRMLFAKTVAVNFLLTAKLFFL

SEQ ID NO: 13707 - protein, 921 aa, Artificial Sequence; identical to SEQ ID NO: 13706
  Synthetic Polypeptide

SEQ ID NO: 13708 - protein, 921 aa, Artificial Sequence
  Synthetic Polypeptide
MALPVTALLLPLALLLHAARPEVQLVESGGGLVQPGGSLRLSCAASGFSFSDFWMSWVRQAPGKGLEWVATISQAGSEKDYVDSVKGRFTISRDNAKKSLYLQMNSLRAEDTAVYYCASGVYSFDYRGQGTLVTVSSGTGGGGSGGGGSGGGGSEFDEIVLTQSPATLSLSPGERATLSCRASQSVSSYLAWYQQKPGQAPRLLIYDASNRATGIPARFSGSGSGTDFTLTISSLEPEDFAVYYCQQRSNWPITFGQGTRLEIKLEGQPKANPTVTLFPPSSEELQANKATLVCLISDFYPGAVTVAWKADGSPVKAGVETTKPSKQSNNKYAASSYLSLTPEQWKSHRSYSCQVTHEGSTVEKTVAPTECSPIKTDVITMDPKDNCSKDANDTLLLQLTNTSAYYMYLLLLLKSVVYFAIITCCLLRRTAFCCNGEKSRAKRSGSGATNFSLLKQAGDVEENPGPTSMDWIWRILFLVGAATGAHSGPQLQLQESGPGLVKPSETLSLTCTVSGDSISSGDYYWGWIRQPPGKGLEWIGHIYYSGVTYYNPSLKSRVTISVDTSRNQFSLKLSSVTAADTAVYYCTREDSSNWRSRGQGTLVTVSSGSGGGGSGGGGSGGGGSFEEVQLVESGGGLVQPGRSLRLSCAASGFTFNDYAMHWVRQAPGKGLEWVSTISWNSGSIGYADSVKGRFTISRDNAKKSLYLQMNSLRAEDTALYYCAKDIQYGNYYYGMDVWGQGTTVTVSSTRASTKGPSVFPLAPSSKSTSGGTAALGCLVKDYFPEPVTVSWNSGALTSGVHTFPAVLQSSGLYSLSSVVTVPSSSLGTQTYICNVNHKPSNTKVDKRVEPKSCEVKTDSTDHVKPKETENTKQPSKSCHKPKAIVHTEKVNMMSLTVLGLRMLFAKTVAVNFLLTAKLFFL

SEQ ID NO: 13709 - protein, 923 aa, Artificial Sequence
  Synthetic Polypeptide
MALPVTALLLPLALLLHAARPEVQLVESGGGLVQPGGSLRLSCAASGFSFSDFWMSWVRQAPGKGLEWVATISQAGSEKDYVDSVKGRFTISRDNAKKSLYLQMNSLRAEDTAVYYCASGVYSFDYRGQGTLVTVSSGTGGGGSGGGGSGGGGSEFDIVMTQTPLSLPVTPGEPASISCRSSKSLLHSNGITYLYWYLQKPGQSPQLLIYQMSNLVSGVPDRFSGSGSGTDFTLKISRVEAEDVGVYYCAQNLELPYTFGGGTKVEIKRLEGQPKANPTVTLFPPSSEELQANKATLVCLISDFYPGAVTVAWKADGSPVKAGVETTKPSKQSNNKYAASSYLSLTPEQWKSHRSYSCQVTHEGSTVEKTVAPTECSPIKTDVITMDPKDNCSKDANDTLLLQLTNTSAYYMYLLLLLKSVVYFAIITCCLLRRTAFCCNGEKSRAKRSGSGATNFSLLKQAGDVEENPGPTSMDWIWRILFLVGAATGAHSGPQLQLQESGPGLVKPSETLSLTCTVSGDSISSGDYYWGWIRQPPGKGLEWIGHIYYSGVTYYNPSLKSRVTISVDTSRNQFSLKLSSVTAADTAVYYCTREDSSNWRSRGQGTLVTVSSGSGGGGSGGGGSGGGGSFEQVQLVQSGAEVKKPGSSVKVSCKASGYAFSYSWINWVRQAPGQGLEWMGRIFPGDGDTDYNGKFKGRVTITADKSTSTAYMELSSLRSEDTAVYYCARNVFDGYWLVYWGQGTLVTVSSTRASTKGPSVFPLAPSSKSTSGGTAALGCLVKDYFPEPVTVSWNSGALTSGVHTFPAVLQSSGLYSLSSVVTVPSSSLGTQTYICNVNHKPSNTKVDKRVEPKSCEVKTDSTDHVKPKETENTKQPSKSCHKPKAIVHTEKVNMMSLTVLGLRMLFAKTVAVNFLLTAKLFFL

SEQ ID NO: 13710 - protein, 924 aa, Artificial Sequence
  Synthetic Polypeptide
MALPVTALLLPLALLLHAARPEVQLVESGGGLVQPGGSLRLSCAASGFSFSDFWMSWVRQAPGKGLEWVATISQAGSEKDYVDSVKGRFTISRDNAKKSLYLQMNSLRAEDTAVYYCASGVYSFDYRGQGTLVTVSSGTGGGGSGGGGSGGGGSEFDIQMTQSPSSLSASVGDRVTITCRSSQSIVHSVGNTFLEWYQQKPGKAPKLLIYKVSNRFSGVPSRFSGSGSGTDFTLTISSLQPEDFATYYCFQGSQFPYTFGQGTKVEIKRLEGQPKANPTVTLFPPSSEELQANKATLVCLISDFYPGAVTVAWKADGSPVKAGVETTKPSKQSNNKYAASSYLSLTPEQWKSHRSYSCQVTHEGSTVEKTVAPTECSPIKTDVITMDPKDNCSKDANDTLLLQLTNTSAYYMYLLLLLKSVVYFAIITCCLLRRTAFCCNGEKSRAKRSGSGATNFSLLKQAGDVEENPGPTSMDWIWRILFLVGAATGAHSGPQLQLQESGPGLVKPSETLSLTCTVSGDSISSGDYYWGWIRQPPGKGLEWIGHIYYSGVTYYNPSLKSRVTISVDTSRNQFSLKLSSVTAADTAVYYCTREDSSNWRSRGQGTLVTVSSGSGGGGSGGGGSGGGGSFEEVQLVESGGGLVQPGGSLRLSCAASGYEFSRSWMNWVRQAPGKGLEWVGRIYPGDGDTNYSGKFKGRFTISADTSKNTAYLQMNSLRAEDTAVYYCARDGSSWDWYFDVWGQGTLVTVSSTRASTKGPSVFPLAPSSKSTSGGTAALGCLVKDYFPEPVTVSWNSGALTSGVHTFPAVLQSSGLYSLSSVVTVPSSSLGTQTYICNVNHKPSNTKVDKRVEPKSCEVKTDSTDHVKPKETENTKQPSKSCHKPKAIVHTEKVNMMSLTVLGLRMLFAKTVAVNFLLTAKLFFL

SEQ ID NO: 13711 - protein, 922 aa, Artificial Sequence
  Synthetic Polypeptide
MALPVTALLLPLALLLHAARPEVQLVESGGGLVQPGGSLRLSCAASGFSFSDFWMSWVRQAPGKGLEWVATISQAGSEKDYVDSVKGRFTISRDNAKKSLYLQMNSLRAEDTAVYYCASGVYSFDYRGQGTLVTVSSGTGGGGSGGGGSGGGGSEFDIQMTQSPSSLSASVGDRVTITCRASQTIWSYLNWYQQRPGKAPNLLIYAASSLQSGVPSRFSGRGSGTDFTLTISSLQAEDFATYYCQQSYSIPQIFGQGTKLEIKLEGQPKANPTVTLFPPSSEELQANKATLVCLISDFYPGAVTVAWKADGSPVKAGVETTKPSKQSNNKYAASSYLSLTPEQWKSHRSYSCQVTHEGSTVEKTVAPTECSPIKTDVITMDPKDNCSKDANDTLLLQLTNTSAYYMYLLLLLKSVVYFAIITCCLLRRTAFCCNGEKSRAKRSGSGATNFSLLKQAGDVEENPGPTSMDWIWRILFLVGAATGAHSGPQLQLQESGPGLVKPSETLSLTCTVSGDSISSGDYYWGWIRQPPGKGLEWIGHIYYSGVTYYNPSLKSRVTISVDTSRNQFSLKLSSVTAADTAVYYCTREDSSNWRSRGQGTLVTVSSGSGGGGSGGGGSGGGGSFEQVQLQQSGPGLVKPSQTLSLTCAISGDSVSSNSAAWNWIRQSPSRGLEWLGRTYYRSKWYNDYAVSVKSRITINPDTSKNQFSLQLNSVTPEDTAVYYCAREVTGDLEDAFDIWGQGTMVTVSSTRASTKGPSVFPLAPSSKSTSGGTAALGCLVKDYFPEPVTVSWNSGALTSGVHTFPAVLQSSGLYSLSSVVTVPSSSLGTQTYICNVNHKPSNTKVDKRVEPKSCEVKTDSTDHVKPKETENTKQPSKSCHKPKAIVHTEKVNMMSLTVLGLRMLFAKTVAVNFLLTAKLFFL

SEQ ID NO: 13712 - protein, 915 aa, Artificial Sequence
  Synthetic Polypeptide
MALPVTALLLPLALLLHAARPEVQLVESGGGLVQPGGSLRLSCAASGFSFSDFWMSWVRQAPGKGLEWVATISQAGSEKDYVDSVKGRFTISRDNAKKSLYLQMNSLRAEDTAVYYCASGVYSFDYRGQGTLVTVSSGTGGGGSGGGGSGGGGSEFDIQMTQSPATIENTSLSASVGDRVTITCRASQGISSWLTWYQQKPEKAPKSLIYAASSLQSGVPSRFSGSGSGTDFTLTISSLQPEDFATYYCQQYDSYPITFGQGTRLEIKLEGQPKANPTVTLFPPSSEELQANKATLVCLISDFYPGAVTVAWKADGSPVKAGVETTKPSKQSNNKYAASSYLSLTPEQWKSHRSYSCQVTHEGSTVEKTVAPTECSPIKTDVITMDPKDNCSKDANDTLLLQLTNTSAYYMYLLLLLKSVVYFAIITCCLLRRTAFCCNGEKSRAKRSGSGATNFSLLKQAGDVEENPGPTSMDWIWRILFLVGAATGAHSGPQLQLQESGPGLVKPSETLSLTCTVSGDSISSGDYYWGWIRQPPGKGLEWIGHIYYSGVTYYNPSLKSRVTISVDTSRNQFSLKLSSVTAADTAVYYCTREDSSNWRSRGQGTLVTVSSGSGGGGSGGGGSGGGGSFEQVQLQQWGAGLLKPSETLSLTCAVYGGSFSAYYWSWIRQPPGKGLEWIGDINHGGGTNYNPSLKSRVTISVDTSKNQFSLKLNSVTAADTAVYYCASLTAYWGQGSLVTVSSTRASTKGPSVFPLAPSSKSTSGGTAALGCLVKDYFPEPVTVSWNSGALTSGVHTFPAVLQSSGLYSLSSVVTVPSSSLGTQTYICNVNHKPSNTKVDKRVEPKSCEVKTDSTDHVKPKETENTKQPSKSCHKPKAIVHTEKVNMMSLTVLGLRMLFAKTVAVNFLLTAKLFFL

SEQ ID NO: 13713 - protein, 920 aa, Artificial Sequence
  Synthetic Polypeptide
MALPVTALLLPLALLLHAARPEVQLVESGGGLVQPGGSLRLSCAASGFSFSDFWMSWVRQAPGKGLEWVATISQAGSEKDYVDSVKGRFTISRDNAKKSLYLQMNSLRAEDTAVYYCASGVYSFDYRGQGTLVTVSSGTGGGGSGGGGSGGGGSEFDEIVLTQSPDSLAVSLGERATINCKASQSVDFDGDSYLNWYQQKPGQPPKVLIYAASTLQSGVPSRFSGSGSGTDFTLTINSLEAEDAATYYCQQSNEDPWTFGGGTKVEIKLEGQPKANPTVTLFPPSSEELQANKATLVCLISDFYPGAVTVAWKADGSPVKAGVETTKPSKQSNNKYAASSYLSLTPEQWKSHRSYSCQVTHEGSTVEKTVAPTECSPIKTDVITMDPKDNCSKDANDTLLLQLTNTSAYYMYLLLLLKSVVYFAIITCCLLRRTAFCCNGEKSRAKRSGSGATNFSLLKQAGDVEENPGPTSMDWIWRILFLVGAATGAHSGPQLQLQESGPGLVKPSETLSLTCTVSGDSISSGDYYWGWIRQPPGKGLEWIGHIYYSGVTYYNPSLKSRVTISVDTSRNQFSLKLSSVTAADTAVYYCTREDSSNWRSRGQGTLVTVSSGSGGGGSGGGGSGGGGSFEQVQLVQSGAEVKKPGASVKVSCKVSGYTFTDYYITWVRQAPGQALEWMGWIYPGSGNTKYSQKFQGRFVFSVDTSASTAYLQLSSLKAEDTAVYYCANYGNYWFAYWGQGTLVTVSSTRASTKGPSVFPLAPSSKSTSGGTAALGCLVKDYFPEPVTVSWNSGALTSGVHTFPAVLQSSGLYSLSSVVTVPSSSLGTQTYICNVNHKPSNTKVDKRVEPKSCEVKTDSTDHVKPKETENTKQPSKSCHKPKAIVHTEKVNMMSLTVLGLRMLFAKTVAVNFLLTAKLFFL

SEQ ID NO: 13714 - protein, 917 aa, Artificial Sequence
  Synthetic Polypeptide
MALPVTALLLPLALLLHAARPEVQLVESGGGLVQPGGSLRLSCAASGFSFSDFWMSWVRQAPGKGLEWVATISQAGSEKDYVDSVKGRFTISRDNAKKSLYLQMNSLRAEDTAVYYCASGVYSFDYRGQGTLVTVSSGTGGGGSGGGGSGGGGSEFDIQMTQSPSSLSASVGDRVTITCRASQGISSWLAWYQQKPEKAPKSLIYAASSLQSGVPSRFSGSGSGTDFTLTISSLQPEDFATYYCQQYNSYPPTFGGGTKVEIKLEGQPKANPTVTLFPPSSEELQANKATLVCLISDFYPGAVTVAWKADGSPVKAGVETTKPSKQSNNKYAASSYLSLTPEQWKSHRSYSCQVTHEGSTVEKTVAPTECSPIKTDVITMDPKDNCSKDANDTLLLQLTNTSAYYMYLLLLLKSVVYFAIITCCLLRRTAFCCNGEKSRAKRSGSGATNFSLLKQAGDVEENPGPTSMDWIWRILFLVGAATGAHSGPQLQLQESGPGLVKPSETLSLTCTVSGDSISSGDYYWGWIRQPPGKGLEWIGHIYYSGVTYYNPSLKSRVTISVDTSRNQFSLKLSSVTAADTAVYYCTREDSSNWRSRGQGTLVTVSSGSGGGGSGGGGSGGGGSFEEVQLVQSGGGLVHPGGSLRLSCAGSGFAFSSSTMHWIRQAPGKGLEWISLIGSGGGIYYGDSVKGRFTISRDNAKNSLYLQMNSLRAEDMAVYYCVRGYFDWVDYFDYWGQGTLVTVSSTRASTKGPSVFPLAPSSKSTSGGTAALGCLVKDYFPEPVTVSWNSGALTSGVHTFPAVLQSSGLYSLSSVVTVPSSSLGTQTYICNVNHKPSNTKVDKRVEPKSCEVKTDSTDHVKPKETENTKQPSKSCHKPKAIVHTEKVNMMSLTVLGLRMLFAKTVAVNFLLTAKLFFL

SEQ ID NO: 13715 - protein, 927 aa, Artificial Sequence
  Synthetic Polypeptide
MALPVTALLLPLALLLHAARPEVQLVESGGGLVQPGGSLRLSCAASGFSFSDFWMSWVRQAPGKGLEWVATISQAGSEKDYVDSVKGRFTISRDNAKKSLYLQMNSLRAEDTAVYYCASGVYSFDYRGQGTLVTVSSGTGGGGSGGGGSGGGGSEFDDIVMTQSPDSLTVSLGERTTINCKSSQSVLDSSKNKNSLAWYQQKPGQPPKLLLSWASTRESGIPDRFSGSGSGTDFTLTIDSLQPEDSATYYCQQSAHFPITFGQGTRLEIKLEGQPKANPTVTLFPPSSEELQANKATLVCLISDFYPGAVTVAWKADGSPVKAGVETTKPSKQSNNKYAASSYLSLTPEQWKSHRSYSCQVTHEGSTVEKTVAPTECSPIKTDVITMDPKDNCSKDANDTLLLQLTNTSAYYMYLLLLLKSVVYFAIITCCLLRRTAFCCNGEKSRAKRSGSGATNFSLLKQAGDVEENPGPTSMDWIWRILFLVGAATGAHSGPQLQLQESGPGLVKPSETLSLTCTVSGDSISSGDYYWGWIRQPPGKGLEWIGHIYYSGVTYYNPSLKSRVTISVDTSRNQFSLKLSSVTAADTAVYYCTREDSSNWRSRGQGTLVTVSSGSGGGGSGGGGSGGGGSFEQVQLVQSGAEVKKPGASVKVSCKASGYTFTNYGMNWVKQAPGQGLKWMGWINTYTGEPTYADDFKGRVTMTSDTSTSTAYLELHNLRSDDTAVYYCARWSWSDGYYVYFDYWGQGTTVTVSSTRASTKGPSVFPLAPSSKSTSGGTAALGCLVKDYFPEPVTVSWNSGALTSGVHTFPAVLQSSGLYSLSSVVTVPSSSLGTQTYICNVNHKPSNTKVDKRVEPKSCEVKTDSTDHVKPKETENTKQPSKSCHKPKAIVHTEKVNMMSLTVLGLRMLFAKTVAVNFLLTAKLFFL

SEQ ID NO: 13716 - protein, 923 aa, Artificial Sequence
  Synthetic Polypeptide
MALPVTALLLPLALLLHAARPEVQLVESGGGLVQPGGSLRLSCAASGFSFSDFWMSWVRQAPGKGLEWVATISQAGSEKDYVDSVKGRFTISRDNAKKSLYLQMNSLRAEDTAVYYCASGVYSFDYRGQGTLVTVSSGTGGGGSGGGGSGGGGSEFDEIVLTQSPGSLAVSPGERVTMSCKSSQSVFFSSSQKNYLAWYQQIPGQSPRLLIYWASTRESGVPDRFTGSGSGTDFTLTISSVQPEDLAIYYCHQYLSSRTFGQGTKLEIKRLEGQPKANPTVTLFPPSSEELQANKATLVCLISDFYPGAVTVAWKADGSPVKAGVETTKPSKQSNNKYAASSYLSLTPEQWKSHRSYSCQVTHEGSTVEKTVAPTECSPIKTDVITMDPKDNCSKDANDTLLLQLTNTSAYYMYLLLLLKSVVYFAIITCCLLRRTAFCCNGEKSRAKRSGSGATNFSLLKQAGDVEENPGPTSMDWIWRILFLVGAATGAHSGPQLQLQESGPGLVKPSETLSLTCTVSGDSISSGDYYWGWIRQPPGKGLEWIGHIYYSGVTYYNPSLKSRVTISVDTSRNQFSLKLSSVTAADTAVYYCTREDSSNWRSRGQGTLVTVSSGSGGGGSGGGGSGGGGSFEQVQLQQPGAEVVKPGASVKMSCKASGYTFTSYYIHWIKQTPGQGLEWVGVIYPGNDDISYNQKFQGKATLTADKSSTTAYMQLSSLTSEDSAVYYCAREVRLRYFDVWGQGTTVTVSSTRASTKGPSVFPLAPSSKSTSGGTAALGCLVKDYFPEPVTVSWNSGALTSGVHTFPAVLQSSGLYSLSSVVTVPSSSLGTQTYICNVNHKPSNTKVDKRVEPKSCEVKTDSTDHVKPKETENTKQPSKSCHKPKAIVHTEKVNMMSLTVLGLRMLFAKTVAVNFLLTAKLFFL

SEQ ID NO: 13717 - protein, 927 aa, Artificial Sequence
  Synthetic Polypeptide
MALPVTALLLPLALLLHAARPEVQLVESGGGLVQPGGSLRLSCAASGFSFSDFWMSWVRQAPGKGLEWVATISQAGSEKDYVDSVKGRFTISRDNAKKSLYLQMNSLRAEDTAVYYCASGVYSFDYRGQGTLVTVSSGTGGGGSGGGGSGGGGSEFDVLLTQSPLSLPVTLGQPASISCRSSQTIVHSNGNTYLEWFQQRPGQSPRLLIYQVSNRFSGVPDRFSGSGSGTDFTLKISRVEAEDVGVYYCFQGSHVPRTFGGGTKVEIKRALEGQPKANPTVTLFPPSSEELQANKATLVCLISDFYPGAVTVAWKADGSPVKAGVETTKPSKQSNNKYAASSYLSLTPEQWKSHRSYSCQVTHEGSTVEKTVAPTECSPIKTDVITMDPKDNCSKDANDTLLLQLTNTSAYYMYLLLLLKSVVYFAIITCCLLRRTAFCCNGEKSRAKRSGSGATNFSLLKQAGDVEENPGPTSMDWIWRILFLVGAATGAHSGPQLQLQESGPGLVKPSETLSLTCTVSGDSISSGDYYWGWIRQPPGKGLEWIGHIYYSGVTYYNPSLKSRVTISVDTSRNQFSLKLSSVTAADTAVYYCTREDSSNWRSRGQGTLVTVSSGSGGGGSGGGGSGGGGSFEQIQLVQSGSELKKPGASVKVSCKASGYTFTNYGMNWVRQAPGQGLKWMGWINTNTGEPKYAEEFKGRFALSLDTSVSTAYLQINSLKAEDTAVYFCARGYGNYARGAWLAYWGQGTLVTVSSTRASTKGPSVFPLAPSSKSTSGGTAALGCLVKDYFPEPVTVSWNSGALTSGVHTFPAVLQSSGLYSLSSVVTVPSSSLGTQTYICNVNHKPSNTKVDKRVEPKSCEVKTDSTDHVKPKETENTKQPSKSCHKPKAIVHTEKVNMMSLTVLGLRMLFAKTVAVNFLLTAKLFFL

SEQ ID NO: 13718 - protein, 912 aa, Artificial Sequence
  Synthetic Polypeptide
MALPVTALLLPLALLLHAARPEVQLVESGGGLVQPGGSLRLSCAASGFSFSDFWMSWVRQAPGKGLEWVATISQAGSEKDYVDSVKGRFTISRDNAKKSLYLQMNSLRAEDTAVYYCASGVYSFDYRGQGTLVTVSSGTGGGGSGGGGSGGGGSEFDEIVLTQSPATLSLSPGERATLSCSASSSINYIYWLQQKPGQAPRILIYLTSNLASGVPARFSGSGSGTDFTLTISSLEPEDFAVYYCLQWSSNPLTFGGGTKVEIKLEGQPKANPTVTLFPPSSEELQANKATLVCLISDFYPGAVTVAWKADGSPVKAGVETTKPSKQSNNKYAASSYLSLTPEQWKSHRSYSCQVTHEGSTVEKTVAPTECSPIKTDVITMDPKDNCSKDANDTLLLQLTNTSAYYMYLLLLLKSVVYFAIITCCLLRRTAFCCNGEKSRAKRSGSGATNFSLLKQAGDVEENPGPTSMDWIWRILFLVGAATGAHSGPQLQLQESGPGLVKPSETLSLTCTVSGDSISSGDYYWGWIRQPPGKGLEWIGHIYYSGVTYYNPSLKSRVTISVDTSRNQFSLKLSSVTAADTAVYYCTREDSSNWRSRGQGTLVTVSSGSGGGGSGGGGSGGGGSFEEVQLVESGGGLVKPGGSLRLSCAASGFTFSSYDMSWVRQAPGKGLEWVSTISSGGSYTYYLDSIKGRFTISRDNAKNSLYLQMNSLRAEDTAVYYCARQGLDYWGRGTLVTVSSTRASTKGPSVFPLAPSSKSTSGGTAALGCLVKDYFPEPVTVSWNSGALTSGVHTFPAVLQSSGLYSLSSVVTVPSSSLGTQTYICNVNHKPSNTKVDKRVEPKSCEVKTDSTDHVKPKETENTKQPSKSCHKPKAIVHTEKVNMMSLTVLGLRMLFAKTVAVNFLLTAKLFFL

SEQ ID NO: 13719 - protein, 921 aa, Artificial Sequence
  Synthetic Polypeptide
MALPVTALLLPLALLLHAARPEVQLVESGGGLVQPGGSLRLSCAASGFSFSDFWMSWVRQAPGKGLEWVATISQAGSEKDYVDSVKGRFTISRDNAKKSLYLQMNSLRAEDTAVYYCASGVYSFDYRGQGTLVTVSSGTGGGGSGGGGSGGGGSEFDIVMTQSPDSLAVSLGERATINCRASKSVSTSGYSFMHWYQQKPGQPPKLLIYLASNLESGVPDRFSGSGSGTDFTLTISSLQAEDVAVYYCQHSREVPWTFGQGTKVEIKRLEGQPKANPTVTLFPPSSEELQANKATLVCLISDFYPGAVTVAWKADGSPVKAGVETTKPSKQSNNKYAASSYLSLTPEQWKSHRSYSCQVTHEGSTVEKTVAPTECSPIKTDVITMDPKDNCSKDANDTLLLQLTNTSAYYMYLLLLLKSVVYFAIITCCLLRRTAFCCNGEKSRAKRSGSGATNFSLLKQAGDVEENPGPTSMDWIWRILFLVGAATGAHSGPQLQLQESGPGLVKPSETLSLTCTVSGDSISSGDYYWGWIRQPPGKGLEWIGHIYYSGVTYYNPSLKSRVTISVDTSRNQFSLKLSSVTAADTAVYYCTREDSSNWRSRGQGTLVTVSSGSGGGGSGGGGSGGGGSFEQVQLVQSGAEVKKPGASVKVSCKASGYTFTNYGMNWVRQAPGQGLEWMGWINTYTGEPTYADAFKGRFAFSLDTSTSTAYLQINSLRSDDTAVYYCARDYGDYGMDYWGQGTTVTVSSTRASTKGPSVFPLAPSSKSTSGGTAALGCLVKDYFPEPVTVSWNSGALTSGVHTFPAVLQSSGLYSLSSVVTVPSSSLGTQTYICNVNHKPSNTKVDKRVEPKSCEVKTDSTDHVKPKETENTKQPSKSCHKPKAIVHTEKVNMMSLTVLGLRMLFAKTVAVNFLLTAKLFFL

SEQ ID NO: 13720 - protein, 917 aa, Artificial Sequence
  Synthetic Polypeptide
MALPVTALLLPLALLLHAARPEVQLVESGGGLVQPGGSLRLSCAASGFSFSDFWMSWVRQAPGKGLEWVATISQAGSEKDYVDSVKGRFTISRDNAKKSLYLQMNSLRAEDTAVYYCASGVYSFDYRGQGTLVTVSSGTGGGGSGGGGSGGGGSEFDIVMTQTPLTLSVTIGQPASISCKSSQSLLDSDGKTYLNWLLQRPGQSPERLIYLVSKLDSGVPDRFTGSGSGTDFTLKISRVEAEDLGVYCCWQGTHFPYTFGGGTKVEIKGLEGQPKANPTVTLFPPSSEELQANKATLVCLISDFYPGAVTVAWKADGSPVKAGVETTKPSKQSNNKYAASSYLSLTPEQWKSHRSYSCQVTHEGSTVEKTVAPTECSPIKTDVITMDPKDNCSKDANDTLLLQLTNTSAYYMYLLLLLKSVVYFAIITCCLLRRTAFCCNGEKSRAKRSGSGATNFSLLKQAGDVEENPGPTSMDWIWRILFLVGAATGAHSGPQLQLQESGPGLVKPSETLSLTCTVSGDSISSGDYYWGWIRQPPGKGLEWIGHIYYSGVTYYNPSLKSRVTISVDTSRNQFSLKLSSVTAADTAVYYCTREDSSNWRSRGQGTLVTVSSGSGGGGSGGGGSGGGGSFEQVQLQQPGAELVRPGASVKLSCKASGYTFTSYWMNWVKQRPGQGLEWIGMIDPSDSETHYNHIFKDKATLTVDKSSSTAYLQLSSLTSEDSAVYYCARNLYLWGQGTSVTVSSTRASTKGPSVFPLAPSSKSTSGGTAALGCLVKDYFPEPVTVSWNSGALTSGVHTFPAVLQSSGLYSLSSVVTVPSSSLGTQTYICNVNHKPSNTKVDKRVEPKSCEVKTDSTDHVKPKETENTKQPSKSCHKPKAIVHTEKVNMMSLTVLGLRMLFAKTVAVNFLLTAKLFFL

SEQ ID NO: 13721 - protein, 925 aa, Artificial Sequence
  Synthetic Polypeptide
MALPVTALLLPLALLLHAARPEVQLVESGGGLVQPGGSLRLSCAASGFSFSDFWMSWVRQAPGKGLEWVATISQAGSEKDYVDSVKGRFTISRDNAKKSLYLQMNSLRAEDTAVYYCASGVYSFDYRGQGTLVTVSSGTGGGGSGGGGSGGGGSEFDIVMTQSPDSLAVSLGERATINCESSQSLLNSGNQKNYLTWYQQKPGQPPKPLIYWASTRESGVPDRFSGSGSGTDFTLTISSLQAEDVAVYYCQNDYSYPYTFGQGTKLEIKRLEGQPKANPTVTLFPPSSEELQANKATLVCLISDFYPGAVTVAWKADGSPVKAGVETTKPSKQSNNKYAASSYLSLTPEQWKSHRSYSCQVTHEGSTVEKTVAPTECSPIKTDVITMDPKDNCSKDANDTLLLQLTNTSAYYMYLLLLLKSVVYFAIITCCLLRRTAFCCNGEKSRAKRSGSGATNFSLLKQAGDVEENPGPTSMDWIWRILFLVGAATGAHSGPQLQLQESGPGLVKPSETLSLTCTVSGDSISSGDYYWGWIRQPPGKGLEWIGHIYYSGVTYYNPSLKSRVTISVDTSRNQFSLKLSSVTAADTAVYYCTREDSSNWRSRGQGTLVTVSSGSGGGGSGGGGSGGGGSFEEVQLVQSGAEVKKPGESLKISCKGSGYSFTDYYMKWARQMPGKGLEWMGDIIPSNGATFYNQKFKGQVTISADKSISTTYLQWSSLKASDTAMYYCARSHLLRASWFAYWGQGTMVTVSSTRASTKGPSVFPLAPSSKSTSGGTAALGCLVKDYFPEPVTVSWNSGALTSGVHTFPAVLQSSGLYSLSSVVTVPSSSLGTQTYICNVNHKPSNTKVDKRVEPKSCEVKTDSTDHVKPKETENTKQPSKSCHKPKAIVHTEKVNMMSLTVLGLRMLFAKTVAVNFLLTAKLFFL

SEQ ID NO: 13722 - protein, 920 aa, Artificial Sequence
  Synthetic Polypeptide
MALPVTALLLPLALLLHAARPEVQLVESGGGLVQPGGSLRLSCAASGFSFSDFWMSWVRQAPGKGLEWVATISQAGSEKDYVDSVKGRFTISRDNAKKSLYLQMNSLRAEDTAVYYCASGVYSFDYRGQGTLVTVSSGTGGGGSGGGGSGGGGSEFDIQMTQSTSSLSASLGDRVTISCSASQGINNYLNWYQQKPDGTVELLIYYTSTLQSGVPSRFSGSGSGTDYSLTISNLEPEDIGTYYCQQYSKLPRTFGGGTKLEIKLEGQPKANPTVTLFPPSSEELQANKATLVCLISDFYPGAVTVAWKADGSPVKAGVETTKPSKQSNNKYAASSYLSLTPEQWKSHRSYSCQVTHEGSTVEKTVAPTECSPIKTDVITMDPKDNCSKDANDTLLLQLTNTSAYYMYLLLLLKSVVYFAIITCCLLRRTAFCCNGEKSRAKRSGSGATNFSLLKQAGDVEENPGPTSMDWIWRILFLVGAATGAHSGPQLQLQESGPGLVKPSETLSLTCTVSGDSISSGDYYWGWIRQPPGKGLEWIGHIYYSGVTYYNPSLKSRVTISVDTSRNQFSLKLSSVTAADTAVYYCTREDSSNWRSRGQGTLVTVSSGSGGGGSGGGGSGGGGSFEQVQLQQSGSELMMPGASVKISCKATGYTFSNYWIEWVKQRPGHGLEWIGEILPGTGRTIYNEKFKGKATFTADISSNTVQMQLSSLTSEDSAVYYCARRDYYGNFYYAMDYWGQGTSVTVSSTRASTKGPSVFPLAPSSKSTSGGTAALGCLVKDYFPEPVTVSWNSGALTSGVHTFPAVLQSSGLYSLSSVVTVPSSSLGTQTYICNVNHKPSNTKVDKRVEPKSCEVKTDSTDHVKPKETENTKQPSKSCHKPKAIVHTEKVNMMSLTVLGLRMLFAKTVAVNFLLTAKLFFL

SEQ ID NO: 13723 - protein, 915 aa, Artificial Sequence
  Synthetic Polypeptide
MALPVTALLLPLALLLHAARPEVQLVESGGGLVQPGGSLRLSCAASGFSFSDFWMSWVRQAPGKGLEWVATISQAGSEKDYVDSVKGRFTISRDNAKKSLYLQMNSLRAEDTAVYYCASGVYSFDYRGQGTLVTVSSGTGGGGSGGGGSGGGGSEFDIQMTQSPASLSVSVGETVTITCRASENIYSNLAWYQQKQGKSPQLLVYAATNLADGVPSRFSGSGSGTQYSLKINSLQSEDFGSYYCQHFWGTWTFGGGTTLEIKLEGQPKANPTVTLFPPSSEELQANKATLVCLISDFYPGAVTVAWKADGSPVKAGVETTKPSKQSNNKYAASSYLSLTPEQWKSHRSYSCQVTHEGSTVEKTVAPTECSPIKTDVITMDPKDNCSKDANDTLLLQLTNTSAYYMYLLLLLKSVVYFAIITCCLLRRTAFCCNGEKSRAKRSGSGATNFSLLKQAGDVEENPGPTSMDWIWRILFLVGAATGAHSGPQLQLQESGPGLVKPSETLSLTCTVSGDSISSGDYYWGWIRQPPGKGLEWIGHIYYSGVTYYNPSLKSRVTISVDTSRNQFSLKLSSVTAADTAVYYCTREDSSNWRSRGQGTLVTVSSGSGGGGSGGGGSGGGGSFEEVQLQQSGPELVKPGASVKMSCKASGYTFTDYYMKWMKQSHGKSLEWIGDINPNNGGTTYNQKFKGKATLTVDKSSSTAYMQLNSLTSEDSAVYYCARDYGYGYFDYWGQGTTLTVSSTRASTKGPSVFPLAPSSKSTSGGTAALGCLVKDYFPEPVTVSWNSGALTSGVHTFPAVLQSSGLYSLSSVVTVPSSSLGTQTYICNVNHKPSNTKVDKRVEPKSCEVKTDSTDHVKPKETENTKQPSKSCHKPKAIVHTEKVNMMSLTVLGLRMLFAKTVAVNFLLTAKLFFL

SEQ ID NO: 13724 - protein, 918 aa, Artificial Sequence
  Synthetic Polypeptide
MALPVTALLLPLALLLHAARPEVQLVESGGGLVQPGGSLRLSCAASGFSFSDFWMSWVRQAPGKGLEWVATISQAGSEKDYVDSVKGRFTISRDNAKKSLYLQMNSLRAEDTAVYYCASGVYSFDYRGQGTLVTVSSGTGGGGSGGGGSGGGGSEFEIVLTQSPGTLSLSPGERATLSCRASQSVGGYLAWYQQKPGQAPRLLIYDASNRATGIPARFSGSGSGTDFTLTISSLEPEDFAVYYCQQRNNWPPMYTFGQGTKLEIKRLEGQPKANPTVTLFPPSSEELQANKATLVCLISDFYPGAVTVAWKADGSPVKAGVETTKPSKQSNNKYAASSYLSLTPEQWKSHRSYSCQVTHEGSTVEKTVAPTECSPIKTDVITMDPKDNCSKDANDTLLLQLTNTSAYYMYLLLLLKSVVYFAIITCCLLRRTAFCCNGEKSRAKRSGSGATNFSLLKQAGDVEENPGPTSMDWIWRILFLVGAATGAHSGPQLQLQESGPGLVKPSETLSLTCTVSGDSISSGDYYWGWIRQPPGKGLEWIGHIYYSGVTYYNPSLKSRVTISVDTSRNQFSLKLSSVTAADTAVYYCTREDSSNWRSRGQGTLVTVSSGSGGGGSGGGGSGGGGSFEQVQLVQSGAEVKKPGSSVKVSCKASGGTFSSYAISWVRQAPGQGLEWMGGIIPILGTANYAQKFQGRVTITADESTSTAYMELSSLRSEDTAVYYCARWGGGAFDIWGQGTMVTVSSTRASTKGPSVFPLAPSSKSTSGGTAALGCLVKDYFPEPVTVSWNSGALTSGVHTFPAVLQSSGLYSLSSVVTVPSSSLGTQTYICNVNHKPSNTKVDKRVEPKSCEVKTDSTDHVKPKETENTKQPSKSCHKPKAIVHTEKVNMMSLTVLGLRMLFAKTVAVNFLLTAKLFFL

SEQ ID NO: 13725 - protein, 913 aa, Artificial Sequence
  Synthetic Polypeptide
MALPVTALLLPLALLLHAARPEVQLVESGGGLVQPGGSLRLSCAASGFSFSDFWMSWVRQAPGKGLEWVATISQAGSEKDYVDSVKGRFTISRDNAKKSLYLQMNSLRAEDTAVYYCASGVYSFDYRGQGTLVTVSSGTGGGGSGGGGSGGGGSEFQIVLTQSPALMSASPGEKVTMTCSASSSVRYMYWYQQKPRSSPKPWIHLTSNLASGVPARFSGSGSGTSYSLTISSMEAEDAATYYCQQWSSHPFTFGSGTKLEIKLEGQPKANPTVTLFPPSSEELQANKATLVCLISDFYPGAVTVAWKADGSPVKAGVETTKPSKQSNNKYAASSYLSLTPEQWKSHRSYSCQVTHEGSTVEKTVAPTECSPIKTDVITMDPKDNCSKDANDTLLLQLTNTSAYYMYLLLLLKSVVYFAIITCCLLRRTAFCCNGEKSRAKRSGSGATNFSLLKQAGDVEENPGPTSMDWIWRILFLVGAATGAHSGPQLQLQESGPGLVKPSETLSLTCTVSGDSISSGDYYWGWIRQPPGKGLEWIGHIYYSGVTYYNPSLKSRVTISVDTSRNQFSLKLSSVTAADTAVYYCTREDSSNWRSRGQGTLVTVSSGSGGGGSGGGGSGGGGSFEDVQLQESGPGLVKPSQSLSLTCTVTGFSITSDYSWNWIRQFPGNKLEWMGYISYSGHTSYNPSLESRISITRDTSKNQFFLQLNSVTTEDTATYYCTRGNWDVVYWGQGTLVTVSATRASTKGPSVFPLAPSSKSTSGGTAALGCLVKDYFPEPVTVSWNSGALTSGVHTFPAVLQSSGLYSLSSVVTVPSSSLGTQTYICNVNHKPSNTKVDKRVEPKSCEVKTDSTDHVKPKETENTKQPSKSCHKPKAIVHTEKVNMMSLTVLGLRMLFAKTVAVNFLLTAKLFFL

SEQ ID NO: 13726 - protein, 923 aa, Artificial Sequence
  Synthetic Polypeptide
MALPVTALLLPLALLLHAARPEVQLVESGGGLVQPGGSLRLSCAASGFSFSDFWMSWVRQAPGKGLEWVATISQAGSEKDYVDSVKGRFTISRDNAKKSLYLQMNSLRAEDTAVYYCASGVYSFDYRGQGTLVTVSSGTGGGGSGGGGSGGGGSEFDVVMTQSPLSLPVTLGQPASISCRSSQSIVHSDGNTYLEWYQQRPGQSPRRLIYKVSNRFSGVPDRFSGSGSGTDFTLKISRVEAEDVGVYYCFQGSHAPWTFGGGTKVEIKLEGQPKANPTVTLFPPSSEELQANKATLVCLISDFYPGAVTVAWKADGSPVKAGVETTKPSKQSNNKYAASSYLSLTPEQWKSHRSYSCQVTHEGSTVEKTVAPTECSPIKTDVITMDPKDNCSKDANDTLLLQLTNTSAYYMYLLLLLKSVVYFAIITCCLLRRTAFCCNGEKSRAKRSGSGATNFSLLKQAGDVEENPGPTSMDWIWRILFLVGAATGAHSGPQLQLQESGPGLVKPSETLSLTCTVSGDSISSGDYYWGWIRQPPGKGLEWIGHIYYSGVTYYNPSLKSRVTISVDTSRNQFSLKLSSVTAADTAVYYCTREDSSNWRSRGQGTLVTVSSGSGGGGSGGGGSGGGGSFEEVQLVESGGGLVQPGGSLRLSCAASGFTFSSYGMHWVRQAPGKGLEWVAYITTRSSTIYYADSVKGRFTISRDNAKNSLYLQMNSLRAEDTAVYYCTREPLTGYYAMDYWGQGTSVTVSSTRASTKGPSVFPLAPSSKSTSGGTAALGCLVKDYFPEPVTVSWNSGALTSGVHTFPAVLQSSGLYSLSSVVTVPSSSLGTQTYICNVNHKPSNTKVDKRVEPKSCEVKTDSTDHVKPKETENTKQPSKSCHKPKAIVHTEKVNMMSLTVLGLRMLFAKTVAVNFLLTAKLFFL

SEQ ID NO: 13727 - protein, 915 aa, Artificial Sequence
  Synthetic Polypeptide
MALPVTALLLPLALLLHAARPEVQLVESGGGLVQPGGSLRLSCAASGFSFSDFWMSWVRQAPGKGLEWVATISQAGSEKDYVDSVKGRFTISRDNAKKSLYLQMNSLRAEDTAVYYCASGVYSFDYRGQGTLVTVSSGTGGGGSGGGGSGGGGSEFDIQMTQSPSSLSASVGDRVTITCRASQSISLWLNWYQQKPGKAPKLLIYAASTLQSGVPSRFSGSGSGTDFTLTISSLQPEDFATYYCQQYYTSPYTFGQGTKVEIKRLEGQPKANPTVTLFPPSSEELQANKATLVCLISDFYPGAVTVAWKADGSPVKAGVETTKPSKQSNNKYAASSYLSLTPEQWKSHRSYSCQVTHEGSTVEKTVAPTECSPIKTDVITMDPKDNCSKDANDTLLLQLTNTSAYYMYLLLLLKSVVYFAIITCCLLRRTAFCCNGEKSRAKRSGSGATNFSLLKQAGDVEENPGPTSMDWIWRILFLVGAATGAHSGPQLQLQESGPGLVKPSETLSLTCTVSGDSISSGDYYWGWIRQPPGKGLEWIGHIYYSGVTYYNPSLKSRVTISVDTSRNQFSLKLSSVTAADTAVYYCTREDSSNWRSRGQGTLVTVSSGSGGGGSGGGGSGGGGSFEQVQLLESGGGLVQPGGSLRLSCAASGFTFSSYAMSWVRQAPGKGLEWVSVIRSSGSSTYYADSVKGRFTISRDNSKNTLYLQMNSLRAEDTAVYYCARGGGYFDYWGQGTLVTVSSTRASTKGPSVFPLAPSSKSTSGGTAALGCLVKDYFPEPVTVSWNSGALTSGVHTFPAVLQSSGLYSLSSVVTVPSSSLGTQTYICNVNHKPSNTKVDKRVEPKSCEVKTDSTDHVKPKETENTKQPSKSCHKPKAIVHTEKVNMMSLTVLGLRMLFAKTVAVNFLLTAKLFFL

SEQ ID NO: 13728 - protein, 918 aa, Artificial Sequence
  Synthetic Polypeptide
MALPVTALLLPLALLLHAARPEVQLVESGGGLVQPGGSLRLSCAASGFSFSDFWMSWVRQAPGKGLEWVATISQAGSEKDYVDSVKGRFTISRDNAKKSLYLQMNSLRAEDTAVYYCASGVYSFDYRGQGTLVTVSSGTGGGGSGGGGSGGGGSEFDIQMTQSPSSLSASVGDRVTITCRASQSISSYLNWYQQKPGKAPKLLIYAVSTLQSGVPSRFSGSGSGTDFTLTISSLQPEDFATYYCQQSGTFPPTTFGQGTKVEIKRLEGQPKANPTVTLFPPSSEELQANKATLVCLISDFYPGAVTVAWKADGSPVKAGVETTKPSKQSNNKYAASSYLSLTPEQWKSHRSYSCQVTHEGSTVEKTVAPTECSPIKTDVITMDPKDNCSKDANDTLLLQLTNTSAYYMYLLLLLKSVVYFAIITCCLLRRTAFCCNGEKSRAKRSGSGATNFSLLKQAGDVEENPGPTSMDWIWRILFLVGAATGAHSGPQLQLQESGPGLVKPSETLSLTCTVSGDSISSGDYYWGWIRQPPGKGLEWIGHIYYSGVTYYNPSLKSRVTISVDTSRNQFSLKLSSVTAADTAVYYCTREDSSNWRSRGQGTLVTVSSGSGGGGSGGGGSGGGGSFEQVQLLESGGGLVQPGGSLRLSCAASGFTFSSHGMHWVRQAPGKGLEWVSVISGSGSNTGYADSVKGRFTISRDNSKNTLYLQMNSLRAEDTAVYYCARQWGSYAFDSWGQGTLVTVSSTRASTKGPSVFPLAPSSKSTSGGTAALGCLVKDYFPEPVTVSWNSGALTSGVHTFPAVLQSSGLYSLSSVVTVPSSSLGTQTYICNVNHKPSNTKVDKRVEPKSCEVKTDSTDHVKPKETENTKQPSKSCHKPKAIVHTEKVNMMSLTVLGLRMLFAKTVAVNFLLTAKLFFL

SEQ ID NO: 13729 - protein, 928 aa, Artificial Sequence
  Synthetic Polypeptide
MALPVTALLLPLALLLHAARPEVQLVESGGGLVQPGGSLRLSCAASGFSFSDFWMSWVRQAPGKGLEWVATISQAGSEKDYVDSVKGRFTISRDNAKKSLYLQMNSLRAEDTAVYYCASGVYSFDYRGQGTLVTVSSGTGGGGSGGGGSGGGGSEFDIVMSQSPSSLAVSVGEKVTMSCKSSQSLLHSSNQKNYLAWYQQKPGQSPKVLIYWASTRESGVPDRFTGSGSGTDFTLTITSVKSEDLAVYYCQQYYSYPWTFGGGTRLEIKRLEGQPKANPTVTLFPPSSEELQANKATLVCLISDFYPGAVTVAWKADGSPVKAGVETTKPSKQSNNKYAASSYLSLTPEQWKSHRSYSCQVTHEGSTVEKTVAPTECSPIKTDVITMDPKDNCSKDANDTLLLQLTNTSAYYMYLLLLLKSVVYFAIITCCLLRRTAFCCNGEKSRAKRSGSGATNFSLLKQAGDVEENPGPTSMDWIWRILFLVGAATGAHSGPQLQLQESGPGLVKPSETLSLTCTVSGDSISSGDYYWGWIRQPPGKGLEWIGHIYYSGVTYYNPSLKSRVTISVDTSRNQFSLKLSSVTAADTAVYYCTREDSSNWRSRGQGTLVTVSSGSGGGGSGGGGSGGGGSFEEVQLQQSVAELVKPGASVKMSCKVSGYTLTDHTIHWMKQRPEQGLEWIGYIYPRDGITGYNEKFKGKATLTADTSSSTAYMQLNSLTSEDSAVYFCARWGYSYRNYAYYYDYWGQGTTLTVSSTRASTKGPSVFPLAPSSKSTSGGTAALGCLVKDYFPEPVTVSWNSGALTSGVHTFPAVLQSSGLYSLSSVVTVPSSSLGTQTYICNVNHKPSNTKVDKRVEPKSCEVKTDSTDHVKPKETENTKQPSKSCHKPKAIVHTEKVNMMSLTVLGLRMLFAKTVAVNFLLTAKLFFL

SEQ ID NO: 13730 - protein, 925 aa, Artificial Sequence
  Synthetic Polypeptide
MALPVTALLLPLALLLHAARPEVQLVESGGGLVQPGGSLRLSCAASGFSFSDFWMSWVRQAPGKGLEWVATISQAGSEKDYVDSVKGRFTISRDNAKKSLYLQMNSLRAEDTAVYYCASGVYSFDYRGQGTLVTVSSGTGGGGSGGGGSGGGGSEFEIVLTQSPGTLSLSPGERATLSCRASQSVSSSYLAWYQQKPGQAPRLLIYGTSSRATGIPDRFSGSGSGTDFTLTISRLEPEDFAVYYCQQYGSSPFTFGGGTKVEIKRLEGQPKANPTVTLFPPSSEELQANKATLVCLISDFYPGAVTVAWKADGSPVKAGVETTKPSKQSNNKYAASSYLSLTPEQWKSHRSYSCQVTHEGSTVEKTVAPTECSPIKTDVITMDPKDNCSKDANDTLLLQLTNTSAYYMYLLLLLKSVVYFAIITCCLLRRTAFCCNGEKSRAKRSGSGATNFSLLKQAGDVEENPGPTSMDWIWRILFLVGAATGAHSGPQLQLQESGPGLVKPSETLSLTCTVSGDSISSGDYYWGWIRQPPGKGLEWIGHIYYSGVTYYNPSLKSRVTISVDTSRNQFSLKLSSVTAADTAVYYCTREDSSNWRSRGQGTLVTVSSGSGGGGSGGGGSGGGGSFEQVQLQESGPGLAKPSETLSLTCTVSGDSITSYYWSWIRQPPGKGLEWIGYIYYSGSTNYNPSLKSRVTISVDTSKNQFSLKLSSVTAADTAVYYCARDQRRIAAAGTHFYGMDVWGQGTTVTVSSTRASTKGPSVFPLAPSSKSTSGGTAALGCLVKDYFPEPVTVSWNSGALTSGVHTFPAVLQSSGLYSLSSVVTVPSSSLGTQTYICNVNHKPSNTKVDKRVEPKSCEVKTDSTDHVKPKETENTKQPSKSCHKPKAIVHTEKVNMMSLTVLGLRMLFAKTVAVNFLLTAKLFFL

SEQ ID NO: 13731 - protein, 917 aa, Artificial Sequence
  Synthetic Polypeptide
MALPVTALLLPLALLLHAARPEVQLVESGGGLVQPGGSLRLSCAASGFSFSDFWMSWVRQAPGKGLEWVATISQAGSEKDYVDSVKGRFTISRDNAKKSLYLQMNSLRAEDTAVYYCASGVYSFDYRGQGTLVTVSSGTGGGGSGGGGSGGGGSEFDILLTQSPVILSVSPGERVSFSCRASQSIGTNIHWYQQRTNGSPRLLIKYASESISGIPSRFSGSGSGTDFTLSINSVESEDIADYYCQQNNNWPTTFGAGTKLELKLEGQPKANPTVTLFPPSSEELQANKATLVCLISDFYPGAVTVAWKADGSPVKAGVETTKPSKQSNNKYAASSYLSLTPEQWKSHRSYSCQVTHEGSTVEKTVAPTECSPIKTDVITMDPKDNCSKDANDTLLLQLTNTSAYYMYLLLLLKSVVYFAIITCCLLRRTAFCCNGEKSRAKRSGSGATNFSLLKQAGDVEENPGPTSMDWIWRILFLVGAATGAHSGPQLQLQESGPGLVKPSETLSLTCTVSGDSISSGDYYWGWIRQPPGKGLEWIGHIYYSGVTYYNPSLKSRVTISVDTSRNQFSLKLSSVTAADTAVYYCTREDSSNWRSRGQGTLVTVSSGSGGGGSGGGGSGGGGSFEQVQLKQSGPGLVQPSQSLSITCTVSGFSLTNYGVHWVRQSPGKGLEWLGVIWSGGNTDYNTPFTSRLSINKDNSKSQVFFKMNSLQSNDTAIYYCARALTYYDYEFAYWGQGTLVTVSATRASTKGPSVFPLAPSSKSTSGGTAALGCLVKDYFPEPVTVSWNSGALTSGVHTFPAVLQSSGLYSLSSVVTVPSSSLGTQTYICNVNHKPSNTKVDKRVEPKSCEVKTDSTDHVKPKETENTKQPSKSCHKPKAIVHTEKVNMMSLTVLGLRMLFAKTVAVNFLLTAKLFFL

SEQ ID NO: 13732 - protein, 910 aa, Artificial Sequence
  Synthetic Polypeptide
MALPVTALLLPLALLLHAARPEVQLVESGGGLVQPGGSLRLSCAASGFSFSDFWMSWVRQAPGKGLEWVATISQAGSEKDYVDSVKGRFTISRDNAKKSLYLQMNSLRAEDTAVYYCASGVYSFDYRGQGTLVTVSSGTGGGGSGGGGSGGGGSEFMTQSPKFLLVSAGDRVTLTCKASQSVNNDVYWYQQEPGQSPKLLIYWASTRESGVPDRFTGSGSGTDFTLTISSVQAEDLAVYYCKQSYNLYTFGGGTKLEIKRLEGQPKANPTVTLFPPSSEELQANKATLVCLISDFYPGAVTVAWKADGSPVKAGVETTKPSKQSNNKYAASSYLSLTPEQWKSHRSYSCQVTHEGSTVEKTVAPTECSPIKTDVITMDPKDNCSKDANDTLLLQLTNTSAYYMYLLLLLKSVVYFAIITCCLLRRTAFCCNGEKSRAKRSGSGATNFSLLKQAGDVEENPGPTSMDWIWRILFLVGAATGAHSGPQLQLQESGPGLVKPSETLSLTCTVSGDSISSGDYYWGWIRQPPGKGLEWIGHIYYSGVTYYNPSLKSRVTISVDTSRNQFSLKLSSVTAADTAVYYCTREDSSNWRSRGQGTLVTVSSGSGGGGSGGGGSGGGGSFEESGRGLVQPGGSRKLSCAASGFTFSTSGMHWVRQAPEKGLEWVAYISSGSTTIYHADTVKGRFTISRDNPKNTLFLQMTSLRSEDTAMYYCCARSGQFGNYFDYWGQGTTLTVSSTRASTKGPSVFPLAPSSKSTSGGTAALGCLVKDYFPEPVTVSWNSGALTSGVHTFPAVLQSSGLYSLSSVVTVPSSSLGTQTYICNVNHKPSNTKVDKRVEPKSCEVKTDSTDHVKPKETENTKQPSKSCHKPKAIVHTEKVNMMSLTVLGLRMLFAKTVAVNFLLTAKLFFL

SEQ ID NO: 13733 - protein, 915 aa, Artificial Sequence
  Synthetic Polypeptide
MALPVTALLLPLALLLHAARPEVQLVESGGGLVQPGGSLRLSCAASGFSFSDFWMSWVRQAPGKGLEWVATISQAGSEKDYVDSVKGRFTISRDNAKKSLYLQMNSLRAEDTAVYYCASGVYSFDYRGQGTLVTVSSGTGGGGSGGGGSGGGGSEFQSPSSLAVSAGEKVTMSCKSSQSLLNSRTRKNYLAWYQQKPGQSPKLLIYWASTRESGVPDRFTGSGSGTDFTLTISSVQAEDLAVYYCKQSNLYTFGGGTKLEIKLEGQPKANPTVTLFPPSSEELQANKATLVCLISDFYPGAVTVAWKADGSPVKAGVETTKPSKQSNNKYAASSYLSLTPEQWKSHRSYSCQVTHEGSTVEKTVAPTECSPIKTDVITMDPKDNCSKDANDTLLLQLTNTSAYYMYLLLLLKSVVYFAIITCCLLRRTAFCCNGEKSRAKRSGSGATNFSLLKQAGDVEENPGPTSMDWIWRILFLVGAATGAHSGPQLQLQESGPGLVKPSETLSLTCTVSGDSISSGDYYWGWIRQPPGKGLEWIGHIYYSGVTYYNPSLKSRVTISVDTSRNQFSLKLSSVTAADTAVYYCTREDSSNWRSRGQGTLVTVSSGSGGGGSGGGGSGGGGSFEQVQLEESGPELVKPGASVKLSCKASGYTFTEYIIHWVKQRSGQGLEWIGWFYPGSGSIKYNEKFKDKATLTADKSSSTVYMELSGLTSEDSAVYFCARHDGYSYFDYWGQGTTLTVSSTRASTKGPSVFPLAPSSKSTSGGTAALGCLVKDYFPEPVTVSWNSGALTSGVHTFPAVLQSSGLYSLSSVVTVPSSSLGTQTYICNVNHKPSNTKVDKRVEPKSCEVKTDSTDHVKPKETENTKQPSKSCHKPKAIVHTEKVNMMSLTVLGLRMLFAKTVAVNFLLTAKLFFL

SEQ ID NO: 13734 - protein, 918 aa, Artificial Sequence
  Synthetic Polypeptide
MALPVTALLLPLALLLHAARPEVQLVESGGGLVQPGGSLRLSCAASGFSFSDFWMSWVRQAPGKGLEWVATISQAGSEKDYVDSVKGRFTISRDNAKKSLYLQMNSLRAEDTAVYYCASGVYSFDYRGQGTLVTVSSGTGGGGSGGGGSGGGGSEFDIQMTQSPSSLSASLGERVSLTCRATQELSGYLSWLQQKPDGTIKRLIYAASTLDSGVPKRFSGNRSGSDYSLTISSLESEDFADYYCLQYAIYPYTFGGGTKLEIKLEGQPKANPTVTLFPPSSEELQANKATLVCLISDFYPGAVTVAWKADGSPVKAGVETTKPSKQSNNKYAASSYLSLTPEQWKSHRSYSCQVTHEGSTVEKTVAPTECSPIKTDVITMDPKDNCSKDANDTLLLQLTNTSAYYMYLLLLLKSVVYFAIITCCLLRRTAFCCNGEKSRAKRSGSGATNFSLLKQAGDVEENPGPTSMDWIWRILFLVGAATGAHSGPQLQLQESGPGLVKPSETLSLTCTVSGDSISSGDYYWGWIRQPPGKGLEWIGHIYYSGVTYYNPSLKSRVTISVDTSRNQFSLKLSSVTAADTAVYYCTREDSSNWRSRGQGTLVTVSSGSGGGGSGGGGSGGGGSFEEVQLQQSGPELVKPGASVKMSCKASGYTFTSYFIHWVKQKPGQGLEWIGFINPYNDGSKYNEKFKGKATLTSDKSSSTAYMELSSLTSEDSAVYYCTRDDGYYGYAMDYWGQGTSVTVSSTRASTKGPSVFPLAPSSKSTSGGTAALGCLVKDYFPEPVTVSWNSGALTSGVHTFPAVLQSSGLYSLSSVVTVPSSSLGTQTYICNVNHKPSNTKVDKRVEPKSCEVKTDSTDHVKPKETENTKQPSKSCHKPKAIVHTEKVNMMSLTVLGLRMLFAKTVAVNFLLTAKLFFL

SEQ ID NO: 13735 - protein, 923 aa, Artificial Sequence
  Synthetic Polypeptide
MALPVTALLLPLALLLHAARPEVQLVESGGGLVQPGGSLRLSCAASGFSFSDFWMSWVRQAPGKGLEWVATISQAGSEKDYVDSVKGRFTISRDNAKKSLYLQMNSLRAEDTAVYYCASGVYSFDYRGQGTLVTVSSGTGGGGSGGGGSGGGGSEFDTIVLTQSPASLAVSLGQRATISCRASESVDSYGNSFMHWYQQKPGQPPKLLIYLASNLESGVPARFSGSGSRTDFTLTIDPVEADDAATYYCQQNNYDPWTFGGGTKLEIKLEGQPKANPTVTLFPPSSEELQANKATLVCLISDFYPGAVTVAWKADGSPVKAGVETTKPSKQSNNKYAASSYLSLTPEQWKSHRSYSCQVTHEGSTVEKTVAPTECSPIKTDVITMDPKDNCSKDANDTLLLQLTNTSAYYMYLLLLLKSVVYFAIITCCLLRRTAFCCNGEKSRAKRSGSGATNFSLLKQAGDVEENPGPTSMDWIWRILFLVGAATGAHSGPQLQLQESGPGLVKPSETLSLTCTVSGDSISSGDYYWGWIRQPPGKGLEWIGHIYYSGVTYYNPSLKSRVTISVDTSRNQFSLKLSSVTAADTAVYYCTREDSSNWRSRGQGTLVTVSSGSGGGGSGGGGSGGGGSFEEVQLQQSGPELVKPGASVKMSCKASGYTFTSYVMHWVKQKPGQGLEWIGYINPYNDGTKYNEKFKGKATLTSDTSSSTAYMELNSLTSEDSAVYFCARPIYFDNDYFDYWGQGTTLKVSSTRASTKGPSVFPLAPSSKSTSGGTAALGCLVKDYFPEPVTVSWNSGALTSGVHTFPAVLQSSGLYSLSSVVTVPSSSLGTQTYICNVNHKPSNTKVDKRVEPKSCEVKTDSTDHVKPKETENTKQPSKSCHKPKAIVHTEKVNMMSLTVLGLRMLFAKTVAVNFLLTAKLFFL

SEQ ID NO: 13736 - protein, 918 aa, Artificial Sequence
  Synthetic Polypeptide
MALPVTALLLPLALLLHAARPEVQLVESGGGLVQPGGSLRLSCAASGFSFSDFWMSWVRQAPGKGLEWVATISQAGSEKDYVDSVKGRFTISRDNAKKSLYLQMNSLRAEDTAVYYCASGVYSFDYRGQGTLVTVSSGTGGGGSGGGGSGGGGSEFDIQMTQSPSSLSASVGDRVTITCKASQDVGIAVAWYQQKPGKVPKLLIYWASTRHTGVPDRFSGSGSGTDFTLTISSLQPEDVATYYCQQYSSYPYTFGQGTKVEIKRLEGQPKANPTVTLFPPSSEELQANKATLVCLISDFYPGAVTVAWKADGSPVKAGVETTKPSKQSNNKYAASSYLSLTPEQWKSHRSYSCQVTHEGSTVEKTVAPTECSPIKTDVITMDPKDNCSKDANDTLLLQLTNTSAYYMYLLLLLKSVVYFAIITCCLLRRTAFCCNGEKSRAKRSGSGATNFSLLKQAGDVEENPGPTSMDWIWRILFLVGAATGAHSGPQLQLQESGPGLVKPSETLSLTCTVSGDSISSGDYYWGWIRQPPGKGLEWIGHIYYSGVTYYNPSLKSRVTISVDTSRNQFSLKLSSVTAADTAVYYCTREDSSNWRSRGQGTLVTVSSGSGGGGSGGGGSGGGGSFEEVQLVESGGGLVQPGGSLRLSCAASGFDFSRYWMSWVRQAPGKGLEWIGEINPDSSTINYAPSLKDKFIISRDNAKNSLYLQMNSLRAEDTAVYYCARPDGNYWYFDVWGQGTLVTVSSTRASTKGPSVFPLAPSSKSTSGGTAALGCLVKDYFPEPVTVSWNSGALTSGVHTFPAVLQSSGLYSLSSVVTVPSSSLGTQTYICNVNHKPSNTKVDKRVEPKSCEVKTDSTDHVKPKETENTKQPSKSCHKPKAIVHTEKVNMMSLTVLGLRMLFAKTVAVNFLLTAKLFFL

SEQ ID NO: 13737 - protein, 918 aa, Artificial Sequence
  Synthetic Polypeptide
MALPVTALLLPLALLLHAARPEVQLVESGGGLVQPGGSLRLSCAASGFSFSDFWMSWVRQAPGKGLEWVATISQAGSEKDYVDSVKGRFTISRDNAKKSLYLQMNSLRAEDTAVYYCASGVYSFDYRGQGTLVTVSSGTGGGGSGGGGSGGGGSEFDIVMTQSQKSMSTSVGDRVSITCKASQDVITGVAWYQQKPGQSPKLLIYSASYRYTGVPDRFTGSGSGTDFTFTISNVQAEDLAVYYCQQHYSTPLTFGAGTKLELKLEGQPKANPTVTLFPPSSEELQANKATLVCLISDFYPGAVTVAWKADGSPVKAGVETTKPSKQSNNKYAASSYLSLTPEQWKSHRSYSCQVTHEGSTVEKTVAPTECSPIKTDVITMDPKDNCSKDANDTLLLQLTNTSAYYMYLLLLLKSVVYFAIITCCLLRRTAFCCNGEKSRAKRSGSGATNFSLLKQAGDVEENPGPTSMDWIWRILFLVGAATGAHSGPQLQLQESGPGLVKPSETLSLTCTVSGDSISSGDYYWGWIRQPPGKGLEWIGHIYYSGVTYYNPSLKSRVTISVDTSRNQFSLKLSSVTAADTAVYYCTREDSSNWRSRGQGTLVTVSSGSGGGGSGGGGSGGGGSFEQVQLQQPGAELVRPGASVKLSCKASGYSFTTYWMNWVKQRPGQGLEWIGMIHPSDSETRLNQKFKDKATLTVDKSSSTAYMQLSSPTSEDSAVYYCARSTMIATRAMDYWGQGTSVTVSSTRASTKGPSVFPLAPSSKSTSGGTAALGCLVKDYFPEPVTVSWNSGALTSGVHTFPAVLQSSGLYSLSSVVTVPSSSLGTQTYICNVNHKPSNTKVDKRVEPKSCEVKTDSTDHVKPKETENTKQPSKSCHKPKAIVHTEKVNMMSLTVLGLRMLFAKTVAVNFLLTAKLFFL

SEQ ID NO: 13738 - protein, 924 aa, Artificial Sequence
  Synthetic Polypeptide
MALPVTALLLPLALLLHAARPEVQLVESGGGLVQPGGSLRLSCAASGFSFSDFWMSWVRQAPGKGLEWVATISQAGSEKDYVDSVKGRFTISRDNAKKSLYLQMNSLRAEDTAVYYCASGVYSFDYRGQGTLVTVSSGTGGGGSGGGGSGGGGSEFQSVLTQPPSVSGAPGQRVTISCTGSGSNIGAPYDVSWYQQLPGTAPKLLIYHNNKRPSGVPDRFSGSKSGTSASLAITGLQAEDEADYYCATVEAGLSGSVFGGGTKLTVLGALEGQPKANPTVTLFPPSSEELQANKATLVCLISDFYPGAVTVAWKADGSPVKAGVETTKPSKQSNNKYAASSYLSLTPEQWKSHRSYSCQVTHEGSTVEKTVAPTECSPIKTDVITMDPKDNCSKDANDTLLLQLTNTSAYYMYLLLLLKSVVYFAIITCCLLRRTAFCCNGEKSRAKRSGSGATNFSLLKQAGDVEENPGPTSMDWIWRILFLVGAATGAHSGPQLQLQESGPGLVKPSETLSLTCTVSGDSISSGDYYWGWIRQPPGKGLEWIGHIYYSGVTYYNPSLKSRVTISVDTSRNQFSLKLSSVTAADTAVYYCTREDSSNWRSRGQGTLVTVSSGSGGGGSGGGGSGGGGSFEQVQLVQSGAEVKKPGASVKVSCKVSGYTLTELSIHWVRQAPGKGLEWMGGFDPEENEIVYAQRFQGRVTMTEDTSTDTAYMELSSLRSEDTAVYYCAIVGSFSPLTLGLWGQGTMVTVSSTRASTKGPSVFPLAPSSKSTSGGTAALGCLVKDYFPEPVTVSWNSGALTSGVHTFPAVLQSSGLYSLSSVVTVPSSSLGTQTYICNVNHKPSNTKVDKRVEPKSCEVKTDSTDHVKPKETENTKQPSKSCHKPKAIVHTEKVNMMSLTVLGLRMLFAKTVAVNFLLTAKLFFL

SEQ ID NO: 13739 - protein, 924 aa, Artificial Sequence
  Synthetic Polypeptide
MALPVTALLLPLALLLHAARPEVQLVESGGGLVQPGGSLRLSCAASGFSFSDFWMSWVRQAPGKGLEWVATISQAGSEKDYVDSVKGRFTISRDNAKKSLYLQMNSLRAEDTAVYYCASGVYSFDYRGQGTLVTVSSGTGGGGSGGGGSGGGGSEFQSVLTQPPSVSGAPGQRVTISCTGSGSNIGAPYDVSWYQQLPGTAPKLLIYHNNKRPSGVPDRFSGSKSGTSASLAITGLQAEDEADYYCQSYDSSSISTIFGGGTKLTVLGALEGQPKANPTVTLFPPSSEELQANKATLVCLISDFYPGAVTVAWKADGSPVKAGVETTKPSKQSNNKYAASSYLSLTPEQWKSHRSYSCQVTHEGSTVEKTVAPTECSPIKTDVITMDPKDNCSKDANDTLLLQLTNTSAYYMYLLLLLKSVVYFAIITCCLLRRTAFCCNGEKSRAKRSGSGATNFSLLKQAGDVEENPGPTSMDWIWRILFLVGAATGAHSGPQLQLQESGPGLVKPSETLSLTCTVSGDSISSGDYYWGWIRQPPGKGLEWIGHIYYSGVTYYNPSLKSRVTISVDTSRNQFSLKLSSVTAADTAVYYCTREDSSNWRSRGQGTLVTVSSGSGGGGSGGGGSGGGGSFEQVQLVQSGAEVKKPGASVKVSCKVSGYTLTELSIHWVRQAPGKGLEWMGGFDPEENEIVYAQRFQGRVTMTEDTSTDTAYMELSSLRSEDTAVYYCAIVGSFSGIAYRPWGQGTMVTVSSTRASTKGPSVFPLAPSSKSTSGGTAALGCLVKDYFPEPVTVSWNSGALTSGVHTFPAVLQSSGLYSLSSVVTVPSSSLGTQTYICNVNHKPSNTKVDKRVEPKSCEVKTDSTDHVKPKETENTKQPSKSCHKPKAIVHTEKVNMMSLTVLGLRMLFAKTVAVNFLLTAKLFFL

SEQ ID NO: 13740 - protein, 912 aa, Artificial Sequence
  Synthetic Polypeptide
MALPVTALLLPLALLLHAARPEVQLVESGGGLVQPGGSLRLSCAASGFSFSDFWMSWVRQAPGKGLEWVATISQAGSEKDYVDSVKGRFTISRDNAKKSLYLQMNSLRAEDTAVYYCASGVYSFDYRGQGTLVTVSSGTGGGGSGGGGSGGGGSEFDIQMTQSPSSLSASVGDRVTITCRASQGIRNNLAWYQQKPGKAPKRLIYAASNLQSGVPSRFTGSGSGTEFTLIVSSLQPEDFATYYCLQHHSYPLTSGGGTKVELEGQPKANPTVTLFPPSSEELQANKATLVCLISDFYPGAVTVAWKADGSPVKAGVETTKPSKQSNNKYAASSYLSLTPEQWKSHRSYSCQVTHEGSTVEKTVAPTECSPIKTDVITMDPKDNCSKDANDTLLLQLTNTSAYYMYLLLLLKSVVYFAIITCCLLRRTAFCCNGEKSRAKRSGSGATNFSLLKQAGDVEENPGPTSMDWIWRILFLVGAATGAHSGPQLQLQESGPGLVKPSETLSLTCTVSGDSISSGDYYWGWIRQPPGKGLEWIGHIYYSGVTYYNPSLKSRVTISVDTSRNQFSLKLSSVTAADTAVYYCTREDSSNWRSRGQGTLVTVSSGSGGGGSGGGGSGGGGSFEEVQVLESGGGLVQPGGSLRLSCAASGFTFSSYAMSWVRQAPGKGLEWVSAISGSGGSTNYADSVKGRFTISRDNSKNTLYLQMNSLRAEDTAVYYCAGSSGWSEYWGQGTLVTVSSTRASTKGPSVFPLAPSSKSTSGGTAALGCLVKDYFPEPVTVSWNSGALTSGVHTFPAVLQSSGLYSLSSVVTVPSSSLGTQTYICNVNHKPSNTKVDKRVEPKSCEVKTDSTDHVKPKETENTKQPSKSCHKPKAIVHTEKVNMMSLTVLGLRMLFAKTVAVNFLLTAKLFFL

SEQ ID NO: 13741 - protein, 918 aa, Artificial Sequence
  Synthetic Polypeptide
MALPVTALLLPLALLLHAARPEVQLVESGGGLVQPGGSLRLSCAASGFSFSDFWMSWVRQAPGKGLEWVATISQAGSEKDYVDSVKGRFTISRDNAKKSLYLQMNSLRAEDTAVYYCASGVYSFDYRGQGTLVTVSSGTGGGGSGGGGSGGGGSEFDEIQLVQSGAEVKKPGESLRISCKGSGFNIEDYYIHWVRQMPGKGLEWMGRIDPENDETKYGPIFQGHVTISADTSINTVYLQWSSLKASDTAMYYCAFRGGVYWGQGTTVTVSSLEGQPKANPTVTLFPPSSEELQANKATLVCLISDFYPGAVTVAWKADGSPVKAGVETTKPSKQSNNKYAASSYLSLTPEQWKSHRSYSCQVTHEGSTVEKTVAPTECSPIKTDVITMDPKDNCSKDANDTLLLQLTNTSAYYMYLLLLLKSVVYFAIITCCLLRRTAFCCNGEKSRAKRSGSGATNFSLLKQAGDVEENPGPTSMDWIWRILFLVGAATGAHSGPQLQLQESGPGLVKPSETLSLTCTVSGDSISSGDYYWGWIRQPPGKGLEWIGHIYYSGVTYYNPSLKSRVTISVDTSRNQFSLKLSSVTAADTAVYYCTREDSSNWRSRGQGTLVTVSSGSGGGGSGGGGSGGGGSFEDVVMTQSPDSLAVSLGERATINCKSSQSLLDSDGKTYLNWLQQKPGQPPKRLISLVSKLDSGVPDRFSGSGSGTDFTLTISSLQAEDVAVYYCWQGTHFPGTFGGGTKVEIKTRASTKGPSVFPLAPSSKSTSGGTAALGCLVKDYFPEPVTVSWNSGALTSGVHTFPAVLQSSGLYSLSSVVTVPSSSLGTQTYICNVNHKPSNTKVDKRVEPKSCEVKTDSTDHVKPKETENTKQPSKSCHKPKAIVHTEKVNMMSLTVLGLRMLFAKTVAVNFLLTAKLFFL

SEQ ID NO: 13742 - protein, 925 aa, Artificial Sequence
  Synthetic Polypeptide
MALPVTALLLPLALLLHAARPEVQLVESGGGLVQPGGSLRLSCAASGFSFSDFWMSWVRQAPGKGLEWVATISQAGSEKDYVDSVKGRFTISRDNAKKSLYLQMNSLRAEDTAVYYCASGVYSFDYRGQGTLVTVSSGTGGGGSGGGGSGGGGSEFDELVMTQSPSSLTVTAGEKVTMSCKSSQSLLNSGNQKNYLTWYQQKPGQPPKLLIYWASTRESGVPDRFTGSGSGTDFTLTISSVQAEDLAVYYCQNDYSYPLTFGAGTKLEIKLEGQPKANPTVTLFPPSSEELQANKATLVCLISDFYPGAVTVAWKADGSPVKAGVETTKPSKQSNNKYAASSYLSLTPEQWKSHRSYSCQVTHEGSTVEKTVAPTECSPIKTDVITMDPKDNCSKDANDTLLLQLTNTSAYYMYLLLLLKSVVYFAIITCCLLRRTAFCCNGEKSRAKRSGSGATNFSLLKQAGDVEENPGPTSMDWIWRILFLVGAATGAHSGPQLQLQESGPGLVKPSETLSLTCTVSGDSISSGDYYWGWIRQPPGKGLEWIGHIYYSGVTYYNPSLKSRVTISVDTSRNQFSLKLSSVTAADTAVYYCTREDSSNWRSRGQGTLVTVSSGSGGGGSGGGGSGGGGSFEEVQLLEQSGAELVRPGTSVKISCKASGYAFTNYWLGWVKQRPGHGLEWIGDIFPGSGNIHYNEKFKGKATLTADKSSSTAYMQLSSLTFEDSAVYFCARLRNWDEPMDYWGQGTTVTVSSTRASTKGPSVFPLAPSSKSTSGGTAALGCLVKDYFPEPVTVSWNSGALTSGVHTFPAVLQSSGLYSLSSVVTVPSSSLGTQTYICNVNHKPSNTKVDKRVEPKSCEVKTDSTDHVKPKETENTKQPSKSCHKPKAIVHTEKVNMMSLTVLGLRMLFAKTVAVNFLLTAKLFFL

SEQ ID NO: 13743 - protein, 926 aa, Artificial Sequence
  Synthetic Polypeptide
MALPVTALLLPLALLLHAARPEVQLVESGGGLVQPGGSLRLSCAASGFSFSDFWMSWVRQAPGKGLEWVATISQAGSEKDYVDSVKGRFTISRDNAKKSLYLQMNSLRAEDTAVYYCASGVYSFDYRGQGTLVTVSSGTGGGGSGGGGSGGGGSEFDELQMTQSPSSLSASVGDRVTITCRASQSISSYLNWYQQKPGQPPKLLIYWASTRESGVPDRFSGSESGTNYTLTISSLQPEDFATYFCQQSDSLPITFGQGTRLDIQLEGQPKANPTVTLFPPSSEELQANKATLVCLISDFYPGAVTVAWKADGSPVKAGVETTKPSKQSNNKYAASSYLSLTPEQWKSHRSYSCQVTHEGSTVEKTVAPTECSPIKTDVITMDPKDNCSKDANDTLLLQLTNTSAYYMYLLLLLKSVVYFAIITCCLLRRTAFCCNGEKSRAKRSGSGATNFSLLKQAGDVEENPGPTSMDWIWRILFLVGAATGAHSGPQLQLQESGPGLVKPSETLSLTCTVSGDSISSGDYYWGWIRQPPGKGLEWIGHIYYSGVTYYNPSLKSRVTISVDTSRNQFSLKLSSVTAADTAVYYCTREDSSNWRSRGQGTLVTVSSGSGGGGSGGGGSGGGGSFEEVQLLESGGGVVQPGRSLRLSCAASGFTFSSYGMHWVRQAPGKGLEWVAVISYDGSNKYYADSVKGRFTISRDNSKNTLYLQMNSLRAEDTAVYYCAKDMGWGSGWRPYYYYGMDVWGQGTTVTVSSTRASTKGPSVFPLAPSSKSTSGGTAALGCLVKDYFPEPVTVSWNSGALTSGVHTFPAVLQSSGLYSLSSVVTVPSSSLGTQTYICNVNHKPSNTKVDKRVEPKSCEVKTDSTDHVKPKETENTKQPSKSCHKPKAIVHTEKVNMMSLTVLGLRMLFAKTVAVNFLLTAKLFFL

SEQ ID NO: 13744 - protein, 923 aa, Artificial Sequence
  Synthetic Polypeptide
MALPVTALLLPLALLLHAARPEVQLVESGGGLVQPGGSLRLSCAASGFSFSDFWMSWVRQAPGKGLEWVATISQAGSEKDYVDSVKGRFTISRDNAKKSLYLQMNSLRAEDTAVYYCASGVYSFDYRGQGTLVTVSSGTGGGGSGGGGSGGGGSEFDDIQMTQSPSSLSASVGDRVTITCRASQSISSYLNWYQQKPGKAPKLLIYAASSLQSGVPSRFSGSGSGTDFTLTISSLQPEDLATYYCQQSYSTPFTFGPGTKVDIKLEGQPKANPTVTLFPPSSEELQANKATLVCLISDFYPGAVTVAWKADGSPVKAGVETTKPSKQSNNKYAASSYLSLTPEQWKSHRSYSCQVTHEGSTVEKTVAPTECSPIKTDVITMDPKDNCSKDANDTLLLQLTNTSAYYMYLLLLLKSVVYFAIITCCLLRRTAFCCNGEKSRAKRSGSGATNFSLLKQAGDVEENPGPTSMDWIWRILFLVGAATGAHSGPQLQLQESGPGLVKPSETLSLTCTVSGDSISSGDYYWGWIRQPPGKGLEWIGHIYYSGVTYYNPSLKSRVTISVDTSRNQFSLKLSSVTAADTAVYYCTREDSSNWRSRGQGTLVTVSSGSGGGGSGGGGSGGGGSFEVHEVQLVQSGAEVKKPGSSVKVSCKASGGTFSSYAISWVRQAPGQGLEWMGGIIPIFGTANYAQKFQGRVTITADKSTSTAYMELSSLRSEDTAVYYCATFALFGFREQAFDIWGQGTTVTVSSTRASTKGPSVFPLAPSSKSTSGGTAALGCLVKDYFPEPVTVSWNSGALTSGVHTFPAVLQSSGLYSLSSVVTVPSSSLGTQTYICNVNHKPSNTKVDKRVEPKSCEVKTDSTDHVKPKETENTKQPSKSCHKPKAIVHTEKVNMMSLTVLGLRMLFAKTVAVNFLLTAKLFFL

SEQ ID NO: 13745 - protein, 921 aa, Artificial Sequence
  Synthetic Polypeptide
MALPVTALLLPLALLLHAARPEVQLVESGGGLVQPGGSLRLSCAASGFSFSDFWMSWVRQAPGKGLEWVATISQAGSEKDYVDSVKGRFTISRDNAKKSLYLQMNSLRAEDTAVYYCASGVYSFDYRGQGTLVTVSSGTGGGGSGGGGSGGGGSEFDIVLTQSPLSLAVSLGQPAIISCKASQSVSFAGTSLMHWYHQKPGQQPRLLIYRASNLEAGVPDRFSGSGSKTDFTLTISPVEAEDAATYYCQQSREYPYTFGGGTKLEIKRLEGQPKANPTVTLFPPSSEELQANKATLVCLISDFYPGAVTVAWKADGSPVKAGVETTKPSKQSNNKYAASSYLSLTPEQWKSHRSYSCQVTHEGSTVEKTVAPTECSPIKTDVITMDPKDNCSKDANDTLLLQLTNTSAYYMYLLLLLKSVVYFAIITCCLLRRTAFCCNGEKSRAKRSGSGATNFSLLKQAGDVEENPGPTSMDWIWRILFLVGAATGAHSGPQLQLQESGPGLVKPSETLSLTCTVSGDSISSGDYYWGWIRQPPGKGLEWIGHIYYSGVTYYNPSLKSRVTISVDTSRNQFSLKLSSVTAADTAVYYCTREDSSNWRSRGQGTLVTVSSGSGGGGSGGGGSGGGGSFEQVQLVQSGAEVVKPGASVKISCKASGYTFTGYFMNWVKQSPGQSLEWIGRIHPYDGDTFYNQKFQGKATLTVDKSSNTAHMELLSLTSEDFAVYYCTRYDGSRAMDYWGQGTTVTVSSTRASTKGPSVFPLAPSSKSTSGGTAALGCLVKDYFPEPVTVSWNSGALTSGVHTFPAVLQSSGLYSLSSVVTVPSSSLGTQTYICNVNHKPSNTKVDKRVEPKSCEVKTDSTDHVKPKETENTKQPSKSCHKPKAIVHTEKVNMMSLTVLGLRMLFAKTVAVNFLLTAKLFFL

SEQ ID NO: 13746 - protein, 918 aa, Artificial Sequence
  Synthetic Polypeptide
MALPVTALLLPLALLLHAARPEVQLVESGGGLVQPGGSLRLSCAASGFSFSDFWMSWVRQAPGKGLEWVATISQAGSEKDYVDSVKGRFTISRDNAKKSLYLQMNSLRAEDTAVYYCASGVYSFDYRGQGTLVTVSSGTGGGGSGGGGSGGGGSEFDDVVMTQTPLSLPVTPGEPASISCRSSQSLVHRNGNTYLHWYLQKPGQSPKLLIHKVSNRFSGVPDRFSGSGSGTDFTLKISRVEAEDLGVYFCSQSTHVPPLTFGAGTKLELKLEGQPKANPTVTLFPPSSEELQANKATLVCLISDFYPGAVTVAWKADGSPVKAGVETTKPSKQSNNKYAASSYLSLTPEQWKSHRSYSCQVTHEGSTVEKTVAPTECSPIKTDVITMDPKDNCSKDANDTLLLQLTNTSAYYMYLLLLLKSVVYFAIITCCLLRRTAFCCNGEKSRAKRSGSGATNFSLLKQAGDVEENPGPTSMDWIWRILFLVGAATGAHSGPQLQLQESGPGLVKPSETLSLTCTVSGDSISSGDYYWGWIRQPPGKGLEWIGHIYYSGVTYYNPSLKSRVTISVDTSRNQFSLKLSSVTAADTAVYYCTREDSSNWRSRGQGTLVTVSSGSGGGGSGGGGSGGGGSFEEVQLVQSGAEVEKPGASVKISCKASGSSFTGYNMNWVRQNIGKSLEWIGAIDPYYGGTSYNQKFKGRATLTVDKSTSTAYMHLKSLRSEDTAVYYCVSGMEYWGQGTSVTVSSTRASTKGPSVFPLAPSSKSTSGGTAALGCLVKDYFPEPVTVSWNSGALTSGVHTFPAVLQSSGLYSLSSVVTVPSSSLGTQTYICNVNHKPSNTKVDKRVEPKSCEVKTDSTDHVKPKETENTKQPSKSCHKPKAIVHTEKVNMMSLTVLGLRMLFAKTVAVNFLLTAKLFFL

SEQ ID NO: 13747 - protein, 916 aa, Artificial Sequence
  Synthetic Polypeptide
MALPVTALLLPLALLLHAARPEVQLVESGGGLVQPGGSLRLSCAASGFSFSDFWMSWVRQAPGKGLEWVATISQAGSEKDYVDSVKGRFTISRDNAKKSLYLQMNSLRAEDTAVYYCASGVYSFDYRGQGTLVTVSSGTGGGGSGGGGSGGGGSEFDEIVMTQTPATLSVSAGERVTITCKASQSVSNDVTWYQQKPGQAPRLLIYSASNRYSGVPARFSGSGYGTEFTFTISSVQSEDFAVYFCQQDYSSFGQGTKLEIKRLEGQPKANPTVTLFPPSSEELQANKATLVCLISDFYPGAVTVAWKADGSPVKAGVETTKPSKQSNNKYAASSYLSLTPEQWKSHRSYSCQVTHEGSTVEKTVAPTECSPIKTDVITMDPKDNCSKDANDTLLLQLTNTSAYYMYLLLLLKSVVYFAIITCCLLRRTAFCCNGEKSRAKRSGSGATNFSLLKQAGDVEENPGPTSMDWIWRILFLVGAATGAHSGPQLQLQESGPGLVKPSETLSLTCTVSGDSISSGDYYWGWIRQPPGKGLEWIGHIYYSGVTYYNPSLKSRVTISVDTSRNQFSLKLSSVTAADTAVYYCTREDSSNWRSRGQGTLVTVSSGSGGGGSGGGGSGGGGSFEQVQLVESGPGVVQPGRSLRISCAVSGFSVTNYGVHWVRQPPGKGLEWLGVIWAGGITNYNSAFMSRLTISKDNSKNTVYLQMNSLRAEDTAMYYCASRGGHYGYALDYWGQGTLVTVSSTRASTKGPSVFPLAPSSKSTSGGTAALGCLVKDYFPEPVTVSWNSGALTSGVHTFPAVLQSSGLYSLSSVVTVPSSSLGTQTYICNVNHKPSNTKVDKRVEPKSCEVKTDSTDHVKPKETENTKQPSKSCHKPKAIVHTEKVNMMSLTVLGLRMLFAKTVAVNFLLTAKLFFL

SEQ ID NO: 13748 - protein, 918 aa, Artificial Sequence
  Synthetic Polypeptide
MALPVTALLLPLALLLHAARPEVQLVESGGGLVQPGGSLRLSCAASGFSFSDFWMSWVRQAPGKGLEWVATISQAGSEKDYVDSVKGRFTISRDNAKKSLYLQMNSLRAEDTAVYYCASGVYSFDYRGQGTLVTVSSGTGGGGSGGGGSGGGGSEFDIQMTQTASSLPASLGDRVTISCSASQDISNYLNWYQQKPDGTVKLLIFYSSNLHSGVPSRFSGGGSGTDYSLTISNLEPEDIATYFCHQYSKLPWTFGGGTKLEIKRLEGQPKANPTVTLFPPSSEELQANKATLVCLISDFYPGAVTVAWKADGSPVKAGVETTKPSKQSNNKYAASSYLSLTPEQWKSHRSYSCQVTHEGSTVEKTVAPTECSPIKTDVITMDPKDNCSKDANDTLLLQLTNTSAYYMYLLLLLKSVVYFAIITCCLLRRTAFCCNGEKSRAKRSGSGATNFSLLKQAGDVEENPGPTSMDWIWRILFLVGAATGAHSGPQLQLQESGPGLVKPSETLSLTCTVSGDSISSGDYYWGWIRQPPGKGLEWIGHIYYSGVTYYNPSLKSRVTISVDTSRNQFSLKLSSVTAADTAVYYCTREDSSNWRSRGQGTLVTVSSGSGGGGSGGGGSGGGGSFEEVTLVESGGDFVKPGGSLKVSCAASGFAFSHYAMSWVRQTPAKRLEWVAYISSGGSGTYYSDSVKGRFTISRDNAKNTLYLQMRSLRSEDSAMYFCTRVKLGTYYFDSWGQGTTLTVSSTRASTKGPSVFPLAPSSKSTSGGTAALGCLVKDYFPEPVTVSWNSGALTSGVHTFPAVLQSSGLYSLSSVVTVPSSSLGTQTYICNVNHKPSNTKVDKRVEPKSCEVKTDSTDHVKPKETENTKQPSKSCHKPKAIVHTEKVNMMSLTVLGLRMLFAKTVAVNFLLTAKLFFL

SEQ ID NO: 13749 - protein, 920 aa, Artificial Sequence
  Synthetic Polypeptide
MALPVTALLLPLALLLHAARPEVQLVESGGGLVQPGGSLRLSCAASGFSFSDFWMSWVRQAPGKGLEWVATISQAGSEKDYVDSVKGRFTISRDNAKKSLYLQMNSLRAEDTAVYYCASGVYSFDYRGQGTLVTVSSGTGGGGSGGGGSGGGGSEFQFVLTQSPSASAALGASAKLTCTLSSAHKTYTIDWYQQQKGKAPRYLIQVKSDGTYTKATGVPDRFSGSSSGADRYLIIPSVQADDEADYYCGTDYTGGYVFGGGTQLTVTLEGQPKANPTVTLFPPSSEELQANKATLVCLISDFYPGAVTVAWKADGSPVKAGVETTKPSKQSNNKYAASSYLSLTPEQWKSHRSYSCQVTHEGSTVEKTVAPTECSPIKTDVITMDPKDNCSKDANDTLLLQLTNTSAYYMYLLLLLKSVVYFAIITCCLLRRTAFCCNGEKSRAKRSGSGATNFSLLKQAGDVEENPGPTSMDWIWRILFLVGAATGAHSGPQLQLQESGPGLVKPSETLSLTCTVSGDSISSGDYYWGWIRQPPGKGLEWIGHIYYSGVTYYNPSLKSRVTISVDTSRNQFSLKLSSVTAADTAVYYCTREDSSNWRSRGQGTLVTVSSGSGGGGSGGGGSGGGGSFEEQLKESGGGLFKPTDTLTLTCTVSGFSLSYYGVNWVRQAPGNGLEWIGTIGGSGDTYYASWAKSRSTIIRNTNENTVTLKMTSLTAADTATYFCVRYANIGYEYFNVWGPGTLVTVSSTRASTKGPSVFPLAPSSKSTSGGTAALGCLVKDYFPEPVTVSWNSGALTSGVHTFPAVLQSSGLYSLSSVVTVPSSSLGTQTYICNVNHKPSNTKVDKRVEPKSCEVKTDSTDHVKPKETENTKQPSKSCHKPKAIVHTEKVNMMSLTVLGLRMLFAKTVAVNFLLTAKLFFL

SEQ ID NO: 13750 - protein, 925 aa, Artificial Sequence
  Synthetic Polypeptide
MALPVTALLLPLALLLHAARPEVQLVESGGGLVQPGGSLRLSCAASGFSFSDFWMSWVRQAPGKGLEWVATISQAGSEKDYVDSVKGRFTISRDNAKKSLYLQMNSLRAEDTAVYYCASGVYSFDYRGQGTLVTVSSGTGGGGSGGGGSGGGGSEFQFVLTQSPSVSAALGASAKLTCTLSSAHKTYTIDWYQQQQGEAPRYLMQVKSDGSYTKGTGVPDRFSGSSSGADRYLIIPSVQADDEAGYVCGADDNGGYVFGGGTQLTVTLEGQPKANPTVTLFPPSSEELQANKATLVCLISDFYPGAVTVAWKADGSPVKAGVETTKPSKQSNNKYAASSYLSLTPEQWKSHRSYSCQVTHEGSTVEKTVAPTECSPIKTDVITMDPKDNCSKDANDTLLLQLTNTSAYYMYLLLLLKSVVYFAIITCCLLRRTAFCCNGEKSRAKRSGSGATNFSLLKQAGDVEENPGPTSMDWIWRILFLVGAATGAHSGPQLQLQESGPGLVKPSETLSLTCTVSGDSISSGDYYWGWIRQPPGKGLEWIGHIYYSGVTYYNPSLKSRVTISVDTSRNQFSLKLSSVTAADTAVYYCTREDSSNWRSRGQGTLVTVSSGSGGGGSGGGGSGGGGSFEQSVKESEGGLFKPTDTLTLTCTVSGFSLSRHALTWVRQAPGNGLEWIGAIDNAGTTYYASWAKSRSTITRNTDLHTVTLKMTSLTASDTATYFCARVFYDINSGYYLDGMDLWGPGTLVTVSSTRASTKGPSVFPLAPSSKSTSGGTAALGCLVKDYFPEPVTVSWNSGALTSGVHTFPAVLQSSGLYSLSSVVTVPSSSLGTQTYICNVNHKPSNTKVDKRVEPKSCEVKTDSTDHVKPKETENTKQPSKSCHKPKAIVHTEKVNMMSLTVLGLRMLFAKTVAVNFLLTAKLFFL

SEQ ID NO: 13751 - protein, 919 aa, Artificial Sequence
  Synthetic Polypeptide
MALPVTALLLPLALLLHAARPEVQLVESGGGLVQPGGSLRLSCAASGFSFSDFWMSWVRQAPGKGLEWVATISQAGSEKDYVDSVKGRFTISRDNAKKSLYLQMNSLRAEDTAVYYCASGVYSFDYRGQGTLVTVSSGTGGGGSGGGGSGGGGSEFDIQMTQSPSSLSASVGDRVTITCRASQGISSWLAWYQQKPEKAPKSLIYAASSLQSGVPSRFSGSGSGTDFTLTISSLQPEDFATYYCQQYNSYPPTFGGGTKVEIKLEGQPKANPTVTLFPPSSEELQANKATLVCLISDFYPGAVTVAWKADGSPVKAGVETTKPSKQSNNKYAASSYLSLTPEQWKSHRSYSCQVTHEGSTVEKTVAPTECSPIKTDVITMDPKDNCSKDANDTLLLQLTNTSAYYMYLLLLLKSVVYFAIITCCLLRRTAFCCNGEKSRAKRSGSGATNFSLLKQAGDVEENPGPTSMDWIWRILFLVGAATGAHSGPQLQLQESGPGLVKPSETLSLTCTVSGDSISSGDYYWGWIRQPPGKGLEWIGHIYYSGVTYYNPSLKSRVTISVDTSRNQFSLKLSSVTAADTAVYYCTREDSSNWRSRGQGTLVTVSSGSGGGGSGGGGSGGGGSFEEVQLVESGGGLVQPGESLRLSCVASGFTFSRYKMNWVRQAPGKGLEWVSYISRSGRDIYYADSVKGRFTISRDNAKNSLYLQMNSLRDEDTAVYYCAGTVTTYYYFGMDVWGHGTTVTVSSTRASTKGPSVFPLAPSSKSTSGGTAALGCLVKDYFPEPVTVSWNSGALTSGVHTFPAVLQSSGLYSLSSVVTVPSSSLGTQTYICNVNHKPSNTKVDKRVEPKSCEVKTDSTDHVKPKETENTKQPSKSCHKPKAIVHTEKVNMMSLTVLGLRMLFAKTVAVNFLLTAKLFFL

SEQ ID NO: 13752 - protein, 920 aa, Artificial Sequence
  Synthetic Polypeptide
MALPVTALLLPLALLLHAARPEVQLVESGGGLVQPGGSLRLSCAASGFSFSDFWMSWVRQAPGKGLEWVATISQAGSEKDYVDSVKGRFTISRDNAKKSLYLQMNSLRAEDTAVYYCASGVYSFDYRGQGTLVTVSSGTGGGGSGGGGSGGGGSEFDIQMTQSPSSLSASVGDRVTITCRASQGISSWLAWYQQKPEKAPKSLIYAASSLQSGVPSRFSGSGSGTDFTLTISSLQPEDFATYYCQQYNSYPPTFGGGTKVEIKLEGQPKANPTVTLFPPSSEELQANKATLVCLISDFYPGAVTVAWKADGSPVKAGVETTKPSKQSNNKYAASSYLSLTPEQWKSHRSYSCQVTHEGSTVEKTVAPTECSPIKTDVITMDPKDNCSKDANDTLLLQLTNTSAYYMYLLLLLKSVVYFAIITCCLLRRTAFCCNGEKSRAKRSGSGATNFSLLKQAGDVEENPGPTSMDWIWRILFLVGAATGAHSGPQLQLQESGPGLVKPSETLSLTCTVSGDSISSGDYYWGWIRQPPGKGLEWIGHIYYSGVTYYNPSLKSRVTISVDTSRNQFSLKLSSVTAADTAVYYCTREDSSNWRSRGQGTLVTVSSGSGGGGSGGGGSGGGGSFEEVQLVESGGGSVQPGESLRLSCVASGFTFSRYKMNWVRQAPGKGLEWVSYISRSGRDIYYADSVKGRFTISRDNAKNSLYLQMNSLRDEDTAVYYCAGTVTTYYYDFGMDVWGQGTTVTVSSTRASTKGPSVFPLAPSSKSTSGGTAALGCLVKDYFPEPVTVSWNSGALTSGVHTFPAVLQSSGLYSLSSVVTVPSSSLGTQTYICNVNHKPSNTKVDKRVEPKSCEVKTDSTDHVKPKETENTKQPSKSCHKPKAIVHTEKVNMMSLTVLGLRMLFAKTVAVNFLLTAKLFFL

SEQ ID NO: 13753 - protein, 918 aa, Artificial Sequence
  Synthetic Polypeptide
MALPVTALLLPLALLLHAARPEVQLVESGGGLVQPGGSLRLSCAASGFSFSDFWMSWVRQAPGKGLEWVATISQAGSEKDYVDSVKGRFTISRDNAKKSLYLQMNSLRAEDTAVYYCASGVYSFDYRGQGTLVTVSSGTGGGGSGGGGSGGGGSEFQSVLTQPPSASGTPGQRVTISCSGSRSNVGGNYVFWYQQVPGATPKLLIYRSNQRPSGVPDRFAGSKSGSSASLAISGLRSEDEADYYCATWDDSLSGFVFGTGTKVTVLGLEGQPKANPTVTLFPPSSEELQANKATLVCLISDFYPGAVTVAWKADGSPVKAGVETTKPSKQSNNKYAASSYLSLTPEQWKSHRSYSCQVTHEGSTVEKTVAPTECSPIKTDVITMDPKDNCSKDANDTLLLQLTNTSAYYMYLLLLLKSVVYFAIITCCLLRRTAFCCNGEKSRAKRSGSGATNFSLLKQAGDVEENPGPTSMDWIWRILFLVGAATGAHSGPQLQLQESGPGLVKPSETLSLTCTVSGDSISSGDYYWGWIRQPPGKGLEWIGHIYYSGVTYYNPSLKSRVTISVDTSRNQFSLKLSSVTAADTAVYYCTREDSSNWRSRGQGTLVTVSSGSGGGGSGGGGSGGGGSFEVQLVESGGGLVKPGGSLRLSCAASGFTFSDYYMSWIRQAPGKGLEWVSYISSSGSTIYYADSVKGRFTISRDNAKNSLYLQMNSLRAEDTAVYYCARGYGKAYDQWGQGTLVTVSSTRASTKGPSVFPLAPSSKSTSGGTAALGCLVKDYFPEPVTVSWNSGALTSGVHTFPAVLQSSGLYSLSSVVTVPSSSLGTQTYICNVNHKPSNTKVDKRVEPKSCEVKTDSTDHVKPKETENTKQPSKSCHKPKAIVHTEKVNMMSLTVLGLRMLFAKTVAVNFLLTAKLFFL

SEQ ID NO: 13754 - protein, 917 aa, Artificial Sequence
  Synthetic Polypeptide
MALPVTALLLPLALLLHAARPEVQLVESGGGLVQPGGSLRLSCAASGFSFSDFWMSWVRQAPGKGLEWVATISQAGSEKDYVDSVKGRFTISRDNAKKSLYLQMNSLRAEDTAVYYCASGVYSFDYRGQGTLVTVSSGTGGGGSGGGGSGGGGSEFQSVVTQPPSMSAAPGQQVTISCSGGNSNIERNYVSWYLQLPGTAPKLVIFDNDRRPSGIPDRFSGSKSGTSATLGITGLQTGDEADYYCGTWDSSLRGWVFGGGTKLTVLGLEGQPKANPTVTLFPPSSEELQANKATLVCLISDFYPGAVTVAWKADGSPVKAGVETTKPSKQSNNKYAASSYLSLTPEQWKSHRSYSCQVTHEGSTVEKTVAPTECSPIKTDVITMDPKDNCSKDANDTLLLQLTNTSAYYMYLLLLLKSVVYFAIITCCLLRRTAFCCNGEKSRAKRSGSGATNFSLLKQAGDVEENPGPTSMDWIWRILFLVGAATGAHSGPQLQLQESGPGLVKPSETLSLTCTVSGDSISSGDYYWGWIRQPPGKGLEWIGHIYYSGVTYYNPSLKSRVTISVDTSRNQFSLKLSSVTAADTAVYYCTREDSSNWRSRGQGTLVTVSSGSGGGGSGGGGSGGGGSFEVQLVESGGGLIQPGGSLRLSCAASGFTFSNYAMNWVRQAPGKGLEWVSTINGRGSSTIYADSVKGRFTISRDNSKNTLYLQMNSLRAEDTATYYCARYISRGLGDSWGQGTLVTVTRASTKGPSVFPLAPSSKSTSGGTAALGCLVKDYFPEPVTVSWNSGALTSGVHTFPAVLQSSGLYSLSSVVTVPSSSLGTQTYICNVNHKPSNTKVDKRVEPKSCEVKTDSTDHVKPKETENTKQPSKSCHKPKAIVHTEKVNMMSLTVLGLRMLFAKTVAVNFLLTAKLFFL

SEQ ID NO: 13755 - protein, 918 aa, Artificial Sequence
  Synthetic Polypeptide
MALPVTALLLPLALLLHAARPEVQLVESGGGLVQPGGSLRLSCAASGFSFSDFWMSWVRQAPGKGLEWVATISQAGSEKDYVDSVKGRFTISRDNAKKSLYLQMNSLRAEDTAVYYCASGVYSFDYRGQGTLVTVSSGTGGGGSGGGGSGGGGSEFDVVMTQTPLSLPVSLGDQASISCRSSQSLVHSNGNTYLHWYLQKPGQSPKLLIYKVSNRFSGVPDRFSGSGSGTDFTLKISRVEAEDLGVYFCSQNTPVPPKFGSGTKLEIKLEGQPKANPTVTLFPPSSEELQANKATLVCLISDFYPGAVTVAWKADGSPVKAGVETTKPSKQSNNKYAASSYLSLTPEQWKSHRSYSCQVTHEGSTVEKTVAPTECSPIKTDVITMDPKDNCSKDANDTLLLQLTNTSAYYMYLLLLLKSVVYFAIITCCLLRRTAFCCNGEKSRAKRSGSGATNFSLLKQAGDVEENPGPTSMDWIWRILFLVGAATGAHSGPQLQLQESGPGLVKPSETLSLTCTVSGDSISSGDYYWGWIRQPPGKGLEWIGHIYYSGVTYYNPSLKSRVTISVDTSRNQFSLKLSSVTAADTAVYYCTREDSSNWRSRGQGTLVTVSSGSGGGGSGGGGSGGGGSFEQVQLQQSGAELVRPGASVKLSCKASGYTFNDYEMHWVKQTPVHGLKWIGALEPKTGDTAYSQKFKGKATLTADKSSSTAYMELRSLTSEDSAVYYCTSCYYYTYSGQGTLVTVSATRASTKGPSVFPLAPSSKSTSGGTAALGCLVKDYFPEPVTVSWNSGALTSGVHTFPAVLQSSGLYSLSSVVTVPSSSLGTQTYICNVNHKPSNTKVDKRVEPKSCEVKTDSTDHVKPKETENTKQPSKSCHKPKAIVHTEKVNMMSLTVLGLRMLFAKTVAVNFLLTAKLFFL

SEQ ID NO: 13756 - protein, 917 aa, Artificial Sequence
  Synthetic Polypeptide
MALPVTALLLPLALLLHAARPEVQLVESGGGLVQPGGSLRLSCAASGFSFSDFWMSWVRQAPGKGLEWVATISQAGSEKDYVDSVKGRFTISRDNAKKSLYLQMNSLRAEDTAVYYCASGVYSFDYRGQGTLVTVSSGTGGGGSGGGGSGGGGSEFDIQLTQSPSSLSASVGDRVTITCRASQGIRNDLGWYQQKPGKAPKRLIYAASSLQNGVPSRFSGSGSGTEFTLTISSLQPEDFATYYCLQHNTYPAFGQGTKVEIKRLEGQPKANPTVTLFPPSSEELQANKATLVCLISDFYPGAVTVAWKADGSPVKAGVETTKPSKQSNNKYAASSYLSLTPEQWKSHRSYSCQVTHEGSTVEKTVAPTECSPIKTDVITMDPKDNCSKDANDTLLLQLTNTSAYYMYLLLLLKSVVYFAIITCCLLRRTAFCCNGEKSRAKRSGSGATNFSLLKQAGDVEENPGPTSMDWIWRILFLVGAATGAHSGPQLQLQESGPGLVKPSETLSLTCTVSGDSISSGDYYWGWIRQPPGKGLEWIGHIYYSGVTYYNPSLKSRVTISVDTSRNQFSLKLSSVTAADTAVYYCTREDSSNWRSRGQGTLVTVSSGSGGGGSGGGGSGGGGSFEQVQLQESGPGLVKPSQTLSLTCTVSGGSISSFNYYWSWIRHHPGKGLEWIGYIYYSGSTYSNPSLKSRVTISVDTSKNQFSLTLSSVTAADTAVYYCARGYNWNYFDYWGQGTLVTVSSTRASTKGPSVFPLAPSSKSTSGGTAALGCLVKDYFPEPVTVSWNSGALTSGVHTFPAVLQSSGLYSLSSVVTVPSSSLGTQTYICNVNHKPSNTKVDKRVEPKSCEVKTDSTDHVKPKETENTKQPSKSCHKPKAIVHTEKVNMMSLTVLGLRMLFAKTVAVNFLLTAKLFFL

SEQ ID NO: 13757 - protein, 919 aa, Artificial Sequence
  Synthetic Polypeptide
MALPVTALLLPLALLLHAARPEVQLVESGGGLVQPGGSLRLSCAASGFSFSDFWMSWVRQAPGKGLEWVATISQAGSEKDYVDSVKGRFTISRDNAKKSLYLQMNSLRAEDTAVYYCASGVYSFDYRGQGTLVTVSSGTGGGGSGGGGSGGGGSEFDDIVLTQSPASLAVSLGQSVTISCRASESVEYYGTSLMQWYQQKPGQPPKLLIYATSNVESGVPARFSGSGSGTDFSLNIHPVEEDDIAMYFCQQSRKLPSTFGGGTKLEIKLEGQPKANPTVTLFPPSSEELQANKATLVCLISDFYPGAVTVAWKADGSPVKAGVETTKPSKQSNNKYAASSYLSLTPEQWKSHRSYSCQVTHEGSTVEKTVAPTECSPIKTDVITMDPKDNCSKDANDTLLLQLTNTSAYYMYLLLLLKSVVYFAIITCCLLRRTAFCCNGEKSRAKRSGSGATNFSLLKQAGDVEENPGPTSMDWIWRILFLVGAATGAHSGPQLQLQESGPGLVKPSETLSLTCTVSGDSISSGDYYWGWIRQPPGKGLEWIGHIYYSGVTYYNPSLKSRVTISVDTSRNQFSLKLSSVTAADTAVYYCTREDSSNWRSRGQGTLVTVSSGSGGGGSGGGGSGGGGSFEDVRLQESGPGQVKPSQTVSLTCSVTGYSITNGNHWWNWIRQVSGSKLEWIGYISSSGSTDSNPSLKSRISITRDTSKNQLFLQLNSVTTEDIATYYCARGYYFDYWGQGTTLTVSSTRASTKGPSVFPLAPSSKSTSGGTAALGCLVKDYFPEPVTVSWNSGALTSGVHTFPAVLQSSGLYSLSSVVTVPSSSLGTQTYICNVNHKPSNTKVDKRVEPKSCEVKTDSTDHVKPKETENTKQPSKSCHKPKAIVHTEKVNMMSLTVLGLRMLFAKTVAVNFLLTAKLFFL

SEQ ID NO: 13758 - protein, 918 aa, Artificial Sequence
  Synthetic Polypeptide
MALPVTALLLPLALLLHAARPEVQLVESGGGLVQPGGSLRLSCAASGFSFSDFWMSWVRQAPGKGLEWVATISQAGSEKDYVDSVKGRFTISRDNAKKSLYLQMNSLRAEDTAVYYCASGVYSFDYRGQGTLVTVSSGTGGGGSGGGGSGGGGSEFDIQMTQSPSSLSASVGDRVTITCRASQDVNTAVAWYQQKPGKAPKLLIYSASFLESGVPSRFSGSRSGTDFTLTISSLQPEDFATYYCQQHYTTPPTFGQTKVEIKRLEGQPKANPTVTLFPPSSEELQANKATLVCLISDFYPGAVTVAWKADGSPVKAGVETTKPSKQSNNKYAASSYLSLTPEQWKSHRSYSCQVTHEGSTVEKTVAPTECSPIKTDVITMDPKDNCSKDANDTLLLQLTNTSAYYMYLLLLLKSVVYFAIITCCLLRRTAFCCNGEKSRAKRSGSGATNFSLLKQAGDVEENPGPTSMDWIWRILFLVGAATGAHSGPQLQLQESGPGLVKPSETLSLTCTVSGDSISSGDYYWGWIRQPPGKGLEWIGHIYYSGVTYYNPSLKSRVTISVDTSRNQFSLKLSSVTAADTAVYYCTREDSSNWRSRGQGTLVTVSSGSGGGGSGGGGSGGGGSFEEVQLVESGGGLVQPGGSLRLSCAASGFNIKDTYIHWVRQAPGKGLEWVARIYPTNGYTRYADSVKGRFTISADTSKNTAYLQMNSLRAEDTAVYYCSRWGGDGFYAMDVWGQGTLVTVSSTRASTKGPSVFPLAPSSKSTSGGTAALGCLVKDYFPEPVTVSWNSGALTSGVHTFPAVLQSSGLYSLSSVVTVPSSSLGTQTYICNVNHKPSNTKVDKRVEPKSCEVKTDSTDHVKPKETENTKQPSKSCHKPKAIVHTEKVNMMSLTVLGLRMLFAKTVAVNFLLTAKLFFL

SEQ ID NO: 13759 - protein, 917 aa, Artificial Sequence
  Synthetic Polypeptide
MALPVTALLLPLALLLHAARPEVQLVESGGGLVQPGGSLRLSCAASGFSFSDFWMSWVRQAPGKGLEWVATISQAGSEKDYVDSVKGRFTISRDNAKKSLYLQMNSLRAEDTAVYYCASGVYSFDYRGQGTLVTVSSGTGGGGSGGGGSGGGGSEFDQSVLTQPPSVSVAPGKTARIPCEGNYIGSSNVHWYQQKPGQAPVLVIHFDSDRPSGIPDRFSGSNSGNMATLTISRVEAGDEADYYCQVWENHGWVFGGGTKLTVLSLEGQPKANPTVTLFPPSSEELQANKATLVCLISDFYPGAVTVAWKADGSPVKAGVETTKPSKQSNNKYAASSYLSLTPEQWKSHRSYSCQVTHEGSTVEKTVAPTECSPIKTDVITMDPKDNCSKDANDTLLLQLTNTSAYYMYLLLLLKSVVYFAIITCCLLRRTAFCCNGEKSRAKRSGSGATNFSLLKQAGDVEENPGPTSMDWIWRILFLVGAATGAHSGPQLQLQESGPGLVKPSETLSLTCTVSGDSISSGDYYWGWIRQPPGKGLEWIGHIYYSGVTYYNPSLKSRVTISVDTSRNQFSLKLSSVTAADTAVYYCTREDSSNWRSRGQGTLVTVSSGSGGGGSGGGGSGGGGSFEEVQLVETGGGLVQPGESLRLSCAASGFTFSDYEMNWVRQAPGKGLEWVSYISSSGSTIYYADSVKGRFTIYRDNAKNSLYLQMNSLRAEDTALYYCARAWGVGPPDYWGQGTLVTVSSTRASTKGPSVFPLAPSSKSTSGGTAALGCLVKDYFPEPVTVSWNSGALTSGVHTFPAVLQSSGLYSLSSVVTVPSSSLGTQTYICNVNHKPSNTKVDKRVEPKSCEVKTDSTDHVKPKETENTKQPSKSCHKPKAIVHTEKVNMMSLTVLGLRMLFAKTVAVNFLLTAKLFFL

SEQ ID NO: 13760 - protein, 925 aa, Artificial Sequence
  Synthetic Polypeptide
MALPVTALLLPLALLLHAARPEVQLVESGGGLVQPGGSLRLSCAASGFSFSDFWMSWVRQAPGKGLEWVATISQAGSEKDYVDSVKGRFTISRDNAKKSLYLQMNSLRAEDTAVYYCASGVYSFDYRGQGTLVTVSSGTGGGGSGGGGSGGGGSEFDIQMTQSPSSLSASVGDTVTITCQANGYLNWYQQRRGKAPKLLIYDGSKLERGVPSRFSGRRWGQEYNLTINNLQPEDIATYFCQVYEFVVPGTRLDLKRTVAAPLEGQPKANPTVTLFPPSSEELQANKATLVCLISDFYPGAVTVAWKADGSPVKAGVETTKPSKQSNNKYAASSYLSLTPEQWKSHRSYSCQVTHEGSTVEKTVAPTECSPIKTDVITMDPKDNCSKDANDTLLLQLTNTSAYYMYLLLLLKSVVYFAIITCCLLRRTAFCCNGEKSRAKRSGSGATNFSLLKQAGDVEENPGPTSMDWIWRILFLVGAATGAHSGPQLQLQESGPGLVKPSETLSLTCTVSGDSISSGDYYWGWIRQPPGKGLEWIGHIYYSGVTYYNPSLKSRVTISVDTSRNQFSLKLSSVTAADTAVYYCTREDSSNWRSRGQGTLVTVSSGSGGGGSGGGGSGGGGSFEQVQLLQSGAAVTKPGASVRVSCEASGYNIRDYFIHWWRQAPGQGLQWVGWINPKTGQPNNPRQFQGRVSLTRHASWDFDTFSFYMDLKALRSDDTAVYFCARQRSDYWDFDVWGSGTQVTVSSASTKGPTRASTKGPSVFPLAPSSKSTSGGTAALGCLVKDYFPEPVTVSWNSGALTSGVHTFPAVLQSSGLYSLSSVVTVPSSSLGTQTYICNVNHKPSNTKVDKRVEPKSCEVKTDSTDHVKPKETENTKQPSKSCHKPKAIVHTEKVNMMSLTVLGLRMLFAKTVAVNFLLTAKLFFL

SEQ ID NO: 13761 - protein, 931 aa, Artificial Sequence
  Synthetic Polypeptide
MALPVTALLLPLALLLHAARPEVQLVESGGGLVQPGGSLRLSCAASGFSFSDFWMSWVRQAPGKGLEWVATISQAGSEKDYVDSVKGRFTISRDNAKKSLYLQMNSLRAEDTAVYYCASGVYSFDYRGQGTLVTVSSGTGGGGSGGGGSGGGGSEFQSALTQPPSASGSPGQSITISCTGTSNNFVSWYQQHAGKAPKLVIYDVNKRPSGVPDRFSGSKSGNTASLTVSGLQTDDEAVYYCGSLVGNWDVIFGGGTKLTVLLEGQPKANPTVTLFPPSSEELQANKATLVCLISDFYPGAVTVAWKADGSPVKAGVETTKPSKQSNNKYAASSYLSLTPEQWKSHRSYSCQVTHEGSTVEKTVAPTECSPIKTDVITMDPKDNCSKDANDTLLLQLTNTSAYYMYLLLLLKSVVYFAIITCCLLRRTAFCCNGEKSRAKRSGSGATNFSLLKQAGDVEENPGPTSMDWIWRILFLVGAATGAHSGPQLQLQESGPGLVKPSETLSLTCTVSGDSISSGDYYWGWIRQPPGKGLEWIGHIYYSGVTYYNPSLKSRVTISVDTSRNQFSLKLSSVTAADTAVYYCTREDSSNWRSRGQGTLVTVSSGSGGGGSGGGGSGGGGSFEQPQLQESGPTLVEASETLSLTCAVSGDSTAACNSFWGWVRQPPGKGLEWVGSLSHCASYWNRGWTYHNPSLKSRLTLALDTPKNLVFLKLNSVTAADTATYYCARFGGEVLRYTDWPKPAWVDLWGRGTLVTVSSTRASTKGPSVFPLAPSSKSTSGGTAALGCLVKDYFPEPVTVSWNSGALTSGVHTFPAVLQSSGLYSLSSVVTVPSSSLGTQTYICNVNHKPSNTKVDKRVEPKSCEVKTDSTDHVKPKETENTKQPSKSCHKPKAIVHTEKVNMMSLTVLGLRMLFAKTVAVNFLLTAKLFFL

SEQ ID NO: 13762 - protein, 916 aa, Artificial Sequence
  Synthetic Polypeptide
MALPVTALLLPLALLLHAARPEVQLVESGGGLVQPGGSLRLSCAASGFSFSDFWMSWVRQAPGKGLEWVATISQAGSEKDYVDSVKGRFTISRDNAKKSLYLQMNSLRAEDTAVYYCASGVYSFDYRGQGTLVTVSSGTGGGGSGGGGSGGGGSEFEIVLTQSPGTLSLSPGETAIISCRTSQYGSLAWYQQRPGQAPRLVIYSGSTRAAGIPDRFSGSRWGPDYNLTISNLESGDFGVYYCQQYEFFGQGTKVQVDIKRLEGQPKANPTVTLFPPSSEELQANKATLVCLISDFYPGAVTVAWKADGSPVKAGVETTKPSKQSNNKYAASSYLSLTPEQWKSHRSYSCQVTHEGSTVEKTVAPTECSPIKTDVITMDPKDNCSKDANDTLLLQLTNTSAYYMYLLLLLKSVVYFAIITCCLLRRTAFCCNGEKSRAKRSGSGATNFSLLKQAGDVEENPGPTSMDWIWRILFLVGAATGAHSGPQLQLQESGPGLVKPSETLSLTCTVSGDSISSGDYYWGWIRQPPGKGLEWIGHIYYSGVTYYNPSLKSRVTISVDTSRNQFSLKLSSVTAADTAVYYCTREDSSNWRSRGQGTLVTVSSGSGGGGSGGGGSGGGGSFEQVQLVQSGGQMKKPGESMRISCRASGYEFIDCTLNWIRLAPGKRPEWMGWLKPRGGAVNYARPLQGRVTMTRDVYSDTAFLELRSLTVDDTAVYFCTRGKNCDYNWDFEHWGRGTPVIVSSTRASTKGPSVFPLAPSSKSTSGGTAALGCLVKDYFPEPVTVSWNSGALTSGVHTFPAVLQSSGLYSLSSVVTVPSSSLGTQTYICNVNHKPSNTKVDKRVEPKSCEVKTDSTDHVKPKETENTKQPSKSCHKPKAIVHTEKVNMMSLTVLGLRMLFAKTVAVNFLLTAKLFFL

SEQ ID NO: 13763 - protein, 926 aa, Artificial Sequence
  Synthetic Polypeptide
MALPVTALLLPLALLLHAARPEVQLVESGGGLVQPGGSLRLSCAASGFSFSDFWMSWVRQAPGKGLEWVATISQAGSEKDYVDSVKGRFTISRDNAKKSLYLQMNSLRAEDTAVYYCASGVYSFDYRGQGTLVTVSSGTGGGGSGGGGSGGGGSEFELVLTQSPGTLSLSAGERATLSCRASQSVSSGSLAWYQQKPGQAPRLLIYGASTRATGIPDRFSGSGSGTDFTLTIGRLEPEDLAVYYCQQYGTSPYTFGQGTKLEILEGQPKANPTVTLFPPSSEELQANKATLVCLISDFYPGAVTVAWKADGSPVKAGVETTKPSKQSNNKYAASSYLSLTPEQWKSHRSYSCQVTHEGSTVEKTVAPTECSPIKTDVITMDPKDNCSKDANDTLLLQLTNTSAYYMYLLLLLKSVVYFAIITCCLLRRTAFCCNGEKSRAKRSGSGATNFSLLKQAGDVEENPGPTSMDWIWRILFLVGAATGAHSGPQLQLQESGPGLVKPSETLSLTCTVSGDSISSGDYYWGWIRQPPGKGLEWIGHIYYSGVTYYNPSLKSRVTISVDTSRNQFSLKLSSVTAADTAVYYCTREDSSNWRSRGQGTLVTVSSGSGGGGSGGGGSGGGGSFELEQSGAEVKKPGSSVQVSCKASGGTFSMYGFNWVRQAPGHGLEWMGGIIPIFGTSNYAQKFRGRVTFTADQATSTAYMELTNLRSDDTAVYYCARDFGPDWEDGDSYDGSGRGFFDFWGQGTLVTVSSTRASTKGPSVFPLAPSSKSTSGGTAALGCLVKDYFPEPVTVSWNSGALTSGVHTFPAVLQSSGLYSLSSVVTVPSSSLGTQTYICNVNHKPSNTKVDKRVEPKSCEVKTDSTDHVKPKETENTKQPSKSCHKPKAIVHTEKVNMMSLTVLGLRMLFAKTVAVNFLLTAKLFFL

SEQ ID NO: 13764 - protein, 906 aa, Artificial Sequence
  Synthetic Polypeptide
MALPVTALLLPLALLLHAARPEVQLVESGGGLVQPGGSLRLSCAASGFSFSDFWMSWVRQAPGKGLEWVATISQAGSEKDYVDSVKGRFTISRDNAKKSLYLQMNSLRAEDTAVYYCASGVYSFDYRGQGTLVTVSSGTGGGGSGGGGSGGGGSEFDIQMTQSPSSLSASVGDRVTITCQASQDINNYLNWYQQKPGKAPKLLIYDASNLQTGVPSRFSGSGSGTDFTFTIEDIATYYCQQYTFGPGTKVDIKLEGQPKANPTVTLFPPSSEELQANKATLVCLISDFYPGAVTVAWKADGSPVKAGVETTKPSKQSNNKYAASSYLSLTPEQWKSHRSYSCQVTHEGSTVEKTVAPTECSPIKTDVITMDPKDNCSKDANDTLLLQLTNTSAYYMYLLLLLKSVVYFAIITCCLLRRTAFCCNGEKSRAKRSGSGATNFSLLKQAGDVEENPGPTSMDWIWRILFLVGAATGAHSGPQLQLQESGPGLVKPSETLSLTCTVSGDSISSGDYYWGWIRQPPGKGLEWIGHIYYSGVTYYNPSLKSRVTISVDTSRNQFSLKLSSVTAADTAVYYCTREDSSNWRSRGQGTLVTVSSGSGGGGSGGGGSGGGGSFEEVQLLESGGGLVQPGGSLRLSCAASGFTFSWYSMTWVRQAPGKGLEWVSSIVPWGDFTQYADSVKGRFTISRDNSKNTLYLQMNSLRAEDTAVYYCAKGPGWGSFDLWGRGTLVTVSSTRASTKGPSVFPLAPSSKSTSGGTAALGCLVKDYFPEPVTVSWNSGALTSGVHTFPAVLQSSGLYSLSSVVTVPSSSLGTQTYICNVNHKPSNTKVDKRVEPKSCEVKTDSTDHVKPKETENTKQPSKSCHKPKAIVHTEKVNMMSLTVLGLRMLFAKTVAVNFLLTAKLFFL

SEQ ID NO: 13765 - protein, 916 aa, Artificial Sequence
  Synthetic Polypeptide
MALPVTALLLPLALLLHAARPEVQLVESGGGLVQPGGSLRLSCAASGFSFSDFWMSWVRQAPGKGLEWVATISQAGSEKDYVDSVKGRFTISRDNAKKSLYLQMNSLRAEDTAVYYCASGVYSFDYRGQGTLVTVSSGTGGGGSGGGGSGGGGSEFDIQMTQSPSSLSASVGDRVTITCTASLSVSSTYLHWYQQKPGSSPKLWIYSTSNLASGVPSRFSGSGSGTSYTLTISSLQPEDFATYYCHQYHRSPLTFGGGTKVEIKRLEGQPKANPTVTLFPPSSEELQANKATLVCLISDFYPGAVTVAWKADGSPVKAGVETTKPSKQSNNKYAASSYLSLTPEQWKSHRSYSCQVTHEGSTVEKTVAPTECSPIKTDVITMDPKDNCSKDANDTLLLQLTNTSAYYMYLLLLLKSVVYFAIITCCLLRRTAFCCNGEKSRAKRSGSGATNFSLLKQAGDVEENPGPTSMDWIWRILFLVGAATGAHSGPQLQLQESGPGLVKPSETLSLTCTVSGDSISSGDYYWGWIRQPPGKGLEWIGHIYYSGVTYYNPSLKSRVTISVDTSRNQFSLKLSSVTAADTAVYYCTREDSSNWRSRGQGTLVTVSSGSGGGGSGGGGSGGGGSFEEVQLVESGGGLVQPGGSLRLSCAASGFSLTKYGVHWVRQAPGKGLEWVGVKWAGGSTDYNSALMSRFTISKDNAKNSLYLQMNSLRAEDTAVYYCARDHRDAMDYWGQGTLVTVSSTRASTKGPSVFPLAPSSKSTSGGTAALGCLVKDYFPEPVTVSWNSGALTSGVHTFPAVLQSSGLYSLSSVVTVPSSSLGTQTYICNVNHKPSNTKVDKRVEPKSCEVKTDSTDHVKPKETENTKQPSKSCHKPKAIVHTEKVNMMSLTVLGLRMLFAKTVAVNFLLTAKLFFL

SEQ ID NO: 13766 - protein, 920 aa, Artificial Sequence
  Synthetic Polypeptide
MALPVTALLLPLALLLHAARPEVQLVESGGGLVQPGGSLRLSCAASGFSFSDFWMSWVRQAPGKGLEWVATISQAGSEKDYVDSVKGRFTISRDNAKKSLYLQMNSLRAEDTAVYYCASGVYSFDYRGQGTLVTVSSGTGGGGSGGGGSGGGGSEFDIQMTQSPSSLSASVGDRVTITCKASQDVGTAVAWYQQKPGKAPKLLIYSASYRSTGVPSRFSGSGSGTDFTLTISSLQPEDFATYYCQHHYSAPWTFGGGTKVEIKLEGQPKANPTVTLFPPSSEELQANKATLVCLISDFYPGAVTVAWKADGSPVKAGVETTKPSKQSNNKYAASSYLSLTPEQWKSHRSYSCQVTHEGSTVEKTVAPTECSPIKTDVITMDPKDNCSKDANDTLLLQLTNTSAYYMYLLLLLKSVVYFAIITCCLLRRTAFCCNGEKSRAKRSGSGATNFSLLKQAGDVEENPGPTSMDWIWRILFLVGAATGAHSGPQLQLQESGPGLVKPSETLSLTCTVSGDSISSGDYYWGWIRQPPGKGLEWIGHIYYSGVTYYNPSLKSRVTISVDTSRNQFSLKLSSVTAADTAVYYCTREDSSNWRSRGQGTLVTVSSGSGGGGSGGGGSGGGGSFEEVQLVESGGGLVQPGGSLRLSCAASGFTFSRNGMSWVRQAPGKGLEWVATVSSGGSYIYYADSVKGRFTISRDNAKNSLYLQMNSLRAEDTAVYYCARQGTTALATRFFDVWGQGTLVTVSSTRASTKGPSVFPLAPSSKSTSGGTAALGCLVKDYFPEPVTVSWNSGALTSGVHTFPAVLQSSGLYSLSSVVTVPSSSLGTQTYICNVNHKPSNTKVDKRVEPKSCEVKTDSTDHVKPKETENTKQPSKSCHKPKAIVHTEKVNMMSLTVLGLRMLFAKTVAVNFLLTAKLFFL

SEQ ID NO: 13767 - protein, 916 aa, Artificial Sequence
  Synthetic Polypeptide
MALPVTALLLPLALLLHAARPEVQLVESGGGLVQPGGSLRLSCAASGFSFSDFWMSWVRQAPGKGLEWVATISQAGSEKDYVDSVKGRFTISRDNAKKSLYLQMNSLRAEDTAVYYCASGVYSFDYRGQGTLVTVSSGTGGGGSGGGGSGGGGSEFDIQMTQSPPSLSASVGGKVTITCKASQDIDRYMAWYQDKPGKGPKLLIHDTSTLQPGIPSRFSGSGSGRDYSFSISNLEPEDIATYYCLQYDNLWTFGGGTKLEIKRLEGQPKANPTVTLFPPSSEELQANKATLVCLISDFYPGAVTVAWKADGSPVKAGVETTKPSKQSNNKYAASSYLSLTPEQWKSHRSYSCQVTHEGSTVEKTVAPTECSPIKTDVITMDPKDNCSKDANDTLLLQLTNTSAYYMYLLLLLKSVVYFAIITCCLLRRTAFCCNGEKSRAKRSGSGATNFSLLKQAGDVEENPGPTSMDWIWRILFLVGAATGAHSGPQLQLQESGPGLVKPSETLSLTCTVSGDSISSGDYYWGWIRQPPGKGLEWIGHIYYSGVTYYNPSLKSRVTISVDTSRNQFSLKLSSVTAADTAVYYCTREDSSNWRSRGQGTLVTVSSGSGGGGSGGGGSGGGGSFEQVQLVQSGAELVKPGASVKMSCKASGYIFTNYNIHWVKKSPGQGLEWIGAIYPGNGDAPYSQKFQDRATLTADTSSSTTYMELSSLTSEDSAVYYCVRANWDVAFAYWGQGTLVSVSSTRASTKGPSVFPLAPSSKSTSGGTAALGCLVKDYFPEPVTVSWNSGALTSGVHTFPAVLQSSGLYSLSSVVTVPSSSLGTQTYICNVNHKPSNTKVDKRVEPKSCEVKTDSTDHVKPKETENTKQPSKSCHKPKAIVHTEKVNMMSLTVLGLRMLFAKTVAVNFLLTAKLFFL

SEQ ID NO: 13768 - protein, 917 aa, Artificial Sequence
  Synthetic Polypeptide
MALPVTALLLPLALLLHAARPEVQLVESGGGLVQPGGSLRLSCAASGFSFSDFWMSWVRQAPGKGLEWVATISQAGSEKDYVDSVKGRFTISRDNAKKSLYLQMNSLRAEDTAVYYCASGVYSFDYRGQGTLVTVSSGTGGGGSGGGGSGGGGSEFDIQMTQSPASLSASVGETVTITCRVSGNIHNYLAWYQQKQGKSPQLLVYNAKTLADGVPSRFSGSGSGTQYSLKINSLQPEDFGSYYCQHFWSNPYTFGGGTKLEIKLEGQPKANPTVTLFPPSSEELQANKATLVCLISDFYPGAVTVAWKADGSPVKAGVETTKPSKQSNNKYAASSYLSLTPEQWKSHRSYSCQVTHEGSTVEKTVAPTECSPIKTDVITMDPKDNCSKDANDTLLLQLTNTSAYYMYLLLLLKSVVYFAIITCCLLRRTAFCCNGEKSRAKRSGSGATNFSLLKQAGDVEENPGPTSMDWIWRILFLVGAATGAHSGPQLQLQESGPGLVKPSETLSLTCTVSGDSISSGDYYWGWIRQPPGKGLEWIGHIYYSGVTYYNPSLKSRVTISVDTSRNQFSLKLSSVTAADTAVYYCTREDSSNWRSRGQGTLVTVSSGSGGGGSGGGGSGGGGSFEQVQLQQSGASVKVSCKASELVRPGTGYAFTNYLIEWVKQRPGQGLEWIGVINPGSGGTNYNEKFKGKATLTADKSSSTAYMQLSSLTSDDSAVYFCARYRSYDWYFDVWGAGTTVTVSSTRASTKGPSVFPLAPSSKSTSGGTAALGCLVKDYFPEPVTVSWNSGALTSGVHTFPAVLQSSGLYSLSSVVTVPSSSLGTQTYICNVNHKPSNTKVDKRVEPKSCEVKTDSTDHVKPKETENTKQPSKSCHKPKAIVHTEKVNMMSLTVLGLRMLFAKTVAVNFLLTAKLFFL

SEQ ID NO: 13769 - protein, 916 aa, Artificial Sequence
  Synthetic Polypeptide
MALPVTALLLPLALLLHAARPEVQLVESGGGLVQPGGSLRLSCAASGFSFSDFWMSWVRQAPGKGLEWVATISQAGSEKDYVDSVKGRFTISRDNAKKSLYLQMNSLRAEDTAVYYCASGVYSFDYRGQGTLVTVSSGTGGGGSGGGGSGGGGSEFDIQMTQSFSSLSASVGDRVTITCRASQDISNYLNWYQQKPGKAPKLLIYYTSRLHSGVPSRFSGSGSGTDYTLTISSLQPEDFATYFCQQGNTLPWTFGGGTKLEIKRLEGQPKANPTVTLFPPSSEELQANKATLVCLISDFYPGAVTVAWKADGSPVKAGVETTKPSKQSNNKYAASSYLSLTPEQWKSHRSYSCQVTHEGSTVEKTVAPTECSPIKTDVITMDPKDNCSKDANDTLLLQLTNTSAYYMYLLLLLKSVVYFAIITCCLLRRTAFCCNGEKSRAKRSGSGATNFSLLKQAGDVEENPGPTSMDWIWRILFLVGAATGAHSGPQLQLQESGPGLVKPSETLSLTCTVSGDSISSGDYYWGWIRQPPGKGLEWIGHIYYSGVTYYNPSLKSRVTISVDTSRNQFSLKLSSVTAADTAVYYCTREDSSNWRSRGQGTLVTVSSGSGGGGSGGGGSGGGGSFEEVQLVQSGGGLVQSGGSLRLSCRASGYTFTRYWMLWVRQRPGKGLEWVAEINPRNDRTNYNEKFKTRFTISVDRSKNTLYLQMDSLRAEDTAVYFCALGGGYAMDYWGQGTLVTVSSTRASTKGPSVFPLAPSSKSTSGGTAALGCLVKDYFPEPVTVSWNSGALTSGVHTFPAVLQSSGLYSLSSVVTVPSSSLGTQTYICNVNHKPSNTKVDKRVEPKSCEVKTDSTDHVKPKETENTKQPSKSCHKPKAIVHTEKVNMMSLTVLGLRMLFAKTVAVNFLLTAKLFFL

SEQ ID NO: 13770 - protein, 917 aa, Artificial Sequence
  Synthetic Polypeptide
MALPVTALLLPLALLLHAARPEVQLVESGGGLVQPGGSLRLSCAASGFSFSDFWMSWVRQAPGKGLEWVATISQAGSEKDYVDSVKGRFTISRDNAKKSLYLQMNSLRAEDTAVYYCASGVYSFDYRGQGTLVTVSSGTGGGGSGGGGSGGGGSEFDIQMTQSPASLSASVGETVTIICRASVNIYSYLAWYQQKQGKSPQLLVYNAKILAEGVPSRFSGSGSGTQFSLKINSLQPEDFGSYYCQHHYGTFTFGSGTKLEIKRLEGQPKANPTVTLFPPSSEELQANKATLVCLISDFYPGAVTVAWKADGSPVKAGVETTKPSKQSNNKYAASSYLSLTPEQWKSHRSYSCQVTHEGSTVEKTVAPTECSPIKTDVITMDPKDNCSKDANDTLLLQLTNTSAYYMYLLLLLKSVVYFAIITCCLLRRTAFCCNGEKSRAKRSGSGATNFSLLKQAGDVEENPGPTSMDWIWRILFLVGAATGAHSGPQLQLQESGPGLVKPSETLSLTCTVSGDSISSGDYYWGWIRQPPGKGLEWIGHIYYSGVTYYNPSLKSRVTISVDTSRNQFSLKLSSVTAADTAVYYCTREDSSNWRSRGQGTLVTVSSGSGGGGSGGGGSGGGGSFEQVQLKESGPGLVAPSQSLSITCTISGFSLTSYGVHWVRQPPGKGLEWLVVIWSDGSTTYNSALKSRLSISKDNSKSQVFLKMNSLQTDDTAIYYCASHYGSTLAFASWGHGTLVTVSAATRASTKGPSVFPLAPSSKSTSGGTAALGCLVKDYFPEPVTVSWNSGALTSGVHTFPAVLQSSGLYSLSSVVTVPSSSLGTQTYICNVNHKPSNTKVDKRVEPKSCEVKTDSTDHVKPKETENTKQPSKSCHKPKAIVHTEKVNMMSLTVLGLRMLFAKTVAVNFLLTAKLFFL

SEQ ID NO: 13771 - protein, 925 aa, Artificial Sequence
  Synthetic Polypeptide
MALPVTALLLPLALLLHAARPEVQLVESGGGLVQPGGSLRLSCAASGFSFSDFWMSWVRQAPGKGLEWVATISQAGSEKDYVDSVKGRFTISRDNAKKSLYLQMNSLRAEDTAVYYCASGVYSFDYRGQGTLVTVSSGTGGGGSGGGGSGGGGSEFDIVMTQSHKFMSTSVGDRVSVTCKASQNVGNNVAWYQQKPGQSPKVLIYSASYRYSGVPDRFTGSGSGTDFTLTISNVQSEDLAEYFCQQYNTYPFTFGSGTKLEIKLEGQPKANPTVTLFPPSSEELQANKATLVCLISDFYPGAVTVAWKADGSPVKAGVETTKPSKQSNNKYAASSYLSLTPEQWKSHRSYSCQVTHEGSTVEKTVAPTECSPIKTDVITMDPKDNCSKDANDTLLLQLTNTSAYYMYLLLLLKSVVYFAIITCCLLRRTAFCCNGEKSRAKRSGSGATNFSLLKQAGDVEENPGPTSMDWIWRILFLVGAATGAHSGPQLQLQESGPGLVKPSETLSLTCTVSGDSISSGDYYWGWIRQPPGKGLEWIGHIYYSGVTYYNPSLKSRVTISVDTSRNQFSLKLSSVTAADTAVYYCTREDSSNWRSRGQGTLVTVSSGSGGGGSGGGGSGGGGSFEEVQLEESGGGLVQPGGSMKLSCVASGFTFSNYWMNWVRQSPEKGLEWVAEIRFKSHNYATHFAESVKGRFTISRDDSKSSVYLQMNNLRAEDTGIYYCTRRIGNSDYDWWYFDVWGAGTSVTVSSASTRASTKGPSVFPLAPSSKSTSGGTAALGCLVKDYFPEPVTVSWNSGALTSGVHTFPAVLQSSGLYSLSSVVTVPSSSLGTQTYICNVNHKPSNTKVDKRVEPKSCEVKTDSTDHVKPKETENTKQPSKSCHKPKAIVHTEKVNMMSLTVLGLRMLFAKTVAVNFLLTAKLFFL

SEQ ID NO: 13772 - protein, 918 aa, Artificial Sequence
  Synthetic Polypeptide
MALPVTALLLPLALLLHAARPEVQLVESGGGLVQPGGSLRLSCAASGFSFSDFWMSWVRQAPGKGLEWVATISQAGSEKDYVDSVKGRFTISRDNAKKSLYLQMNSLRAEDTAVYYCASGVYSFDYRGQGTLVTVSSGTGGGGSGGGGSGGGGSEFDQIVLTQSPAIMSASPGEKVTISCSASSSVSYMYWYQQKPGSSPKPWIYRTSNLASGVPARFSGSGSGTSYSLTISNMEAEDAAAYYCQQYHSYPTTFGGGTKLEVKLEGQPKANPTVTLFPPSSEELQANKATLVCLISDFYPGAVTVAWKADGSPVKAGVETTKPSKQSNNKYAASSYLSLTPEQWKSHRSYSCQVTHEGSTVEKTVAPTECSPIKTDVITMDPKDNCSKDANDTLLLQLTNTSAYYMYLLLLLKSVVYFAIITCCLLRRTAFCCNGEKSRAKRSGSGATNFSLLKQAGDVEENPGPTSMDWIWRILFLVGAATGAHSGPQLQLQESGPGLVKPSETLSLTCTVSGDSISSGDYYWGWIRQPPGKGLEWIGHIYYSGVTYYNPSLKSRVTISVDTSRNQFSLKLSSVTAADTAVYYCTREDSSNWRSRGQGTLVTVSSGSGGGGSGGGGSGGGGSFEEVQLVESGGGLVQPKGSLKLSCAASGFSFNTYAMNWVRQAPGKGLEWIAHIRSKSNNFATYYADSVKDRFSISRDASENILFLQMNNLKTEDTAMYYCVRQGGDFPMDYWGQGTSVTVSSTRASTKGPSVFPLAPSSKSTSGGTAALGCLVKDYFPEPVTVSWNSGALTSGVHTFPAVLQSSGLYSLSSVVTVPSSSLGTQTYICNVNHKPSNTKVDKRVEPKSCEVKTDSTDHVKPKETENTKQPSKSCHKPKAIVHTEKVNMMSLTVLGLRMLFAKTVAVNFLLTAKLFFL

SEQ ID NO: 13773 - protein, 917 aa, Artificial Sequence
  Synthetic Polypeptide
MALPVTALLLPLALLLHAARPEVQLVESGGGLVQPGGSLRLSCAASGFSFSDFWMSWVRQAPGKGLEWVATISQAGSEKDYVDSVKGRFTISRDNAKKSLYLQMNSLRAEDTAVYYCASGVYSFDYRGQGTLVTVSSGTGGGGSGGGGSGGGGSEFDDIQMTQSSSSFSVSLGDRVTITCMASEDIYIRLAWYQQKPGNAPRLLISAATSLETGVPSRFSGSGSGKDYTLSITSLQTEDVGTYYCQQYWSSPWTFGGGTKLEINLEGQPKANPTVTLFPPSSEELQANKATLVCLISDFYPGAVTVAWKADGSPVKAGVETTKPSKQSNNKYAASSYLSLTPEQWKSHRSYSCQVTHEGSTVEKTVAPTECSPIKTDVITMDPKDNCSKDANDTLLLQLTNTSAYYMYLLLLLKSVVYFAIITCCLLRRTAFCCNGEKSRAKRSGSGATNFSLLKQAGDVEENPGPTSMDWIWRILFLVGAATGAHSGPQLQLQESGPGLVKPSETLSLTCTVSGDSISSGDYYWGWIRQPPGKGLEWIGHIYYSGVTYYNPSLKSRVTISVDTSRNQFSLKLSSVTAADTAVYYCTREDSSNWRSRGQGTLVTVSSGSGGGGSGGGGSGGGGSFEDVQLQESGPGLVKPSQSLSLTCTVTGYSITSDYTWNWIRQFPGNKLEWMGYITYSGSTSYNPSLKSRNSITRDTSKNQFFLQLNSVTTEDTATYYCARLGRRYTMDYWGQGTSVTVSSTRASTKGPSVFPLAPSSKSTSGGTAALGCLVKDYFPEPVTVSWNSGALTSGVHTFPAVLQSSGLYSLSSVVTVPSSSLGTQTYICNVNHKPSNTKVDKRVEPKSCEVKTDSTDHVKPKETENTKQPSKSCHKPKAIVHTEKVNMMSLTVLGLRMLFAKTVAVNFLLTAKLFFL

SEQ ID NO: 13774 - protein, 920 aa, Artificial Sequence
  Synthetic Polypeptide
MALPVTALLLPLALLLHAARPEVQLVESGGGLVQPGGSLRLSCAASGFSFSDFWMSWVRQAPGKGLEWVATISQAGSEKDYVDSVKGRFTISRDNAKKSLYLQMNSLRAEDTAVYYCASGVYSFDYRGQGTLVTVSSGTGGGGSGGGGSGGGGSEFDDIQMTQSPSSLSASVGDRVTITCRASQSISSYLNWYQQKPGKAPKLLIYDASNLETGVPSRFSGSGSGTDFTFTISSLQPEDIATYYCQQYDNLPLTFGGGTKVDIKRLEGQPKANPTVTLFPPSSEELQANKATLVCLISDFYPGAVTVAWKADGSPVKAGVETTKPSKQSNNKYAASSYLSLTPEQWKSHRSYSCQVTHEGSTVEKTVAPTECSPIKTDVITMDPKDNCSKDANDTLLLQLTNTSAYYMYLLLLLKSVVYFAIITCCLLRRTAFCCNGEKSRAKRSGSGATNFSLLKQAGDVEENPGPTSMDWIWRILFLVGAATGAHSGPQLQLQESGPGLVKPSETLSLTCTVSGDSISSGDYYWGWIRQPPGKGLEWIGHIYYSGVTYYNPSLKSRVTISVDTSRNQFSLKLSSVTAADTAVYYCTREDSSNWRSRGQGTLVTVSSGSGGGGSGGGGSGGGGSFEQVQLVESGGGVVQPGRSLRLSCAASGFTFSSYAMHWVRQAPGKGLEWVAVISYDGSNKYYADSVKGRFTISRDNSKNTLYLQMNSLRAEDTAVYYCARAHNSSSWSFDYWGQGTLVTVSSTRASTKGPSVFPLAPSSKSTSGGTAALGCLVKDYFPEPVTVSWNSGALTSGVHTFPAVLQSSGLYSLSSVVTVPSSSLGTQTYICNVNHKPSNTKVDKRVEPKSCEVKTDSTDHVKPKETENTKQPSKSCHKPKAIVHTEKVNMMSLTVLGLRMLFAKTVAVNFLLTAKLFFL

SEQ ID NO: 13775 - protein, 929 aa, Artificial Sequence
  Synthetic Polypeptide
MALPVTALLLPLALLLHAARPEVQLVESGGGLVQPGGSLRLSCAASGFSFSDFWMSWVRQAPGKGLEWVATISQAGSEKDYVDSVKGRFTISRDNAKKSLYLQMNSLRAEDTAVYYCASGVYSFDYRGQGTLVTVSSGTGGGGSGGGGSGGGGSEFDDVVMTQSPLSLPVSLGDQASISCRSSQRLVHSNGNTYLHWYLQKPGQSPKLLIYRVSNRFPGVPDRFSGSGSGTDFTLKISRVEAEDLGIYFCSQSTHVPYTFGGGTKLEIKRLEGQPKANPTVTLFPPSSEELQANKATLVCLISDFYPGAVTVAWKADGSPVKAGVETTKPSKQSNNKYAASSYLSLTPEQWKSHRSYSCQVTHEGSTVEKTVAPTECSPIKTDVITMDPKDNCSKDANDTLLLQLTNTSAYYMYLLLLLKSVVYFAIITCCLLRRTAFCCNGEKSRAKRSGSGATNFSLLKQAGDVEENPGPTSMDWIWRILFLVGAATGAHSGPQLQLQESGPGLVKPSETLSLTCTVSGDSISSGDYYWGWIRQPPGKGLEWIGHIYYSGVTYYNPSLKSRVTISVDTSRNQFSLKLSSVTAADTAVYYCTREDSSNWRSRGQGTLVTVSSGSGGGGSGGGGSGGGGSFEEVRLQQSGPDLIKPGASVKMSCKASGYTFTGYVMHWVKQRPGQGLEWIGFINPYNDDIQSNERFRGKATLTSDKSSTTAYMELSSLTSEDSAVYYCARGAGYNFDGAYRFFDFWGQGTTLTVSSTRASTKGPSVFPLAPSSKSTSGGTAALGCLVKDYFPEPVTVSWNSGALTSGVHTFPAVLQSSGLYSLSSVVTVPSSSLGTQTYICNVNHKPSNTKVDKRVEPKSCEVKTDSTDHVKPKETENTKQPSKSCHKPKAIVHTEKVNMMSLTVLGLRMLFAKTVAVNFLLTAKLFFL

SEQ ID NO: 13776 - protein, 920 aa, Artificial Sequence
  Synthetic Polypeptide
MALPVTALLLPLALLLHAARPEVQLVESGGGLVQPGGSLRLSCAASGFSFSDFWMSWVRQAPGKGLEWVATISQAGSEKDYVDSVKGRFTISRDNAKKSLYLQMNSLRAEDTAVYYCASGVYSFDYRGQGTLVTVSSGTGGGGSGGGGSGGGGSEFDSYELTQPPSVSVSPGQTATISCSGDQLGGKYGHWYQKKPGQSPVLVLYQDRKRPAGIPERFSGSSSGNTITLTISGTQAVDEADYYCQAWDTNLGGVFGGGTKVTVLGQLEGQPKANPTVTLFPPSSEELQANKATLVCLISDFYPGAVTVAWKADGSPVKAGVETTKPSKQSNNKYAASSYLSLTPEQWKSHRSYSCQVTHEGSTVEKTVAPTECSPIKTDVITMDPKDNCSKDANDTLLLQLTNTSAYYMYLLLLLKSVVYFAIITCCLLRRTAFCCNGEKSRAKRSGSGATNFSLLKQAGDVEENPGPTSMDWIWRILFLVGAATGAHSGPQLQLQESGPGLVKPSETLSLTCTVSGDSISSGDYYWGWIRQPPGKGLEWIGHIYYSGVTYYNPSLKSRVTISVDTSRNQFSLKLSSVTAADTAVYYCTREDSSNWRSRGQGTLVTVSSGSGGGGSGGGGSGGGGSFEQVQLVESGAEVKKPGASVKVSCKASGYTFTGYYMHWVRQAPGQGLEWMGRINPNSGGTNYAQKFQGRVTMTRDTSISTAYMELSRLRSDDTAVYYCASPRGRGSAFDIWGQGTLVTVSSTRASTKGPSVFPLAPSSKSTSGGTAALGCLVKDYFPEPVTVSWNSGALTSGVHTFPAVLQSSGLYSLSSVVTVPSSSLGTQTYICNVNHKPSNTKVDKRVEPKSCEVKTDSTDHVKPKETENTKQPSKSCHKPKAIVHTEKVNMMSLTVLGLRMLFAKTVAVNFLLTAKLFFL

SEQ ID NO: 13777 - protein, 923 aa, Artificial Sequence
  Synthetic Polypeptide
MALPVTALLLPLALLLHAARPEVQLVESGGGLVQPGGSLRLSCAASGFSFSDFWMSWVRQAPGKGLEWVATISQAGSEKDYVDSVKGRFTISRDNAKKSLYLQMNSLRAEDTAVYYCASGVYSFDYRGQGTLVTVSSGTGGGGSGGGGSGGGGSEFDNFMLTQPHSVSESPGKTVTISCTRSSGSIASKYVQWYQQRPGSSPTTVIYEDNQRPSGVPDRFSGSIDTSSNSASLTISGLRTEDEADYYCHSYDSNNHSVFGGGTKVTVLGQLEGQPKANPTVTLFPPSSEELQANKATLVCLISDFYPGAVTVAWKADGSPVKAGVETTKPSKQSNNKYAASSYLSLTPEQWKSHRSYSCQVTHEGSTVEKTVAPTECSPIKTDVITMDPKDNCSKDANDTLLLQLTNTSAYYMYLLLLLKSVVYFAIITCCLLRRTAFCCNGEKSRAKRSGSGATNFSLLKQAGDVEENPGPTSMDWIWRILFLVGAATGAHSGPQLQLQESGPGLVKPSETLSLTCTVSGDSISSGDYYWGWIRQPPGKGLEWIGHIYYSGVTYYNPSLKSRVTISVDTSRNQFSLKLSSVTAADTAVYYCTREDSSNWRSRGQGTLVTVSSGSGGGGSGGGGSGGGGSFEEVQLVESGGGVVQPGGSLRLSCAASGFTFSSYAMSWVRQAPGKGLEWVSAISGSGGSTYYADSVKGRFSISRDNSKNTLYLQMNSLRAEDTAVYYCARTRSSGAFDIWGQGTLVTVSSTRASTKGPSVFPLAPSSKSTSGGTAALGCLVKDYFPEPVTVSWNSGALTSGVHTFPAVLQSSGLYSLSSVVTVPSSSLGTQTYICNVNHKPSNTKVDKRVEPKSCEVKTDSTDHVKPKETENTKQPSKSCHKPKAIVHTEKVNMMSLTVLGLRMLFAKTVAVNFLLTAKLFFL

SEQ ID NO: 13778 - protein, 918 aa, Artificial Sequence
  Synthetic Polypeptide
MALPVTALLLPLALLLHAARPEVQLVESGGGLVQPGGSLRLSCAASGFSFSDFWMSWVRQAPGKGLEWVATISQAGSEKDYVDSVKGRFTISRDNAKKSLYLQMNSLRAEDTAVYYCASGVYSFDYRGQGTLVTVSSGTGGGGSGGGGSGGGGSEFDIQMNQSPSSLSASLGDTITITCHASQNINVWLSWYQQKPGNIPKLLIYKASNLHTGVPSRFSGSGSGTGFTITISSLQPEDIATYYCQQGQSYPWTFGGGTKLEIKRLEGQPKANPTVTLFPPSSEELQANKATLVCLISDFYPGAVTVAWKADGSPVKAGVETTKPSKQSNNKYAASSYLSLTPEQWKSHRSYSCQVTHEGSTVEKTVAPTECSPIKTDVITMDPKDNCSKDANDTLLLQLTNTSAYYMYLLLLLKSVVYFAIITCCLLRRTAFCCNGEKSRAKRSGSGATNFSLLKQAGDVEENPGPTSMDWIWRILFLVGAATGAHSGPQLQLQESGPGLVKPSETLSLTCTVSGDSISSGDYYWGWIRQPPGKGLEWIGHIYYSGVTYYNPSLKSRVTISVDTSRNQFSLKLSSVTAADTAVYYCTREDSSNWRSRGQGTLVTVSSGSGGGGSGGGGSGGGGSFEEVQLQQSGPELVKPGASVKISCKASGYSFTGYFMNWVKQSHGKSLEYIGRFNPYNGETLYNQKFKGKATLTVDKSSSTVHMELLSVTSEDSAVYYCGRSGNDDAMDYWGQGTSVTVSSATRASTKGPSVFPLAPSSKSTSGGTAALGCLVKDYFPEPVTVSWNSGALTSGVHTFPAVLQSSGLYSLSSVVTVPSSSLGTQTYICNVNHKPSNTKVDKRVEPKSCEVKTDSTDHVKPKETENTKQPSKSCHKPKAIVHTEKVNMMSLTVLGLRMLFAKTVAVNFLLTAKLFFL

SEQ ID NO: 13779 - protein, 919 aa, Artificial Sequence
  Synthetic Polypeptide
MALPVTALLLPLALLLHAARPEVQLVESGGGLVQPGGSLRLSCAASGFSFSDFWMSWVRQAPGKGLEWVATISQAGSEKDYVDSVKGRFTISRDNAKKSLYLQMNSLRAEDTAVYYCASGVYSFDYRGQGTLVTVSSGTGGGGSGGGGSGGGGSEFEIVLTQSPATLSLSPGERATLSCRASQSVRSYLAWYQQKPGQAPRLLIYDASNRATGIPARFSGSGSGTDFTLTISSLEPEDFAVYYCQQRSNWPPTFGQGTKVEIKLEGQPKANPTVTLFPPSSEELQANKATLVCLISDFYPGAVTVAWKADGSPVKAGVETTKPSKQSNNKYAASSYLSLTPEQWKSHRSYSCQVTHEGSTVEKTVAPTECSPIKTDVITMDPKDNCSKDANDTLLLQLTNTSAYYMYLLLLLKSVVYFAIITCCLLRRTAFCCNGEKSRAKRSGSGATNFSLLKQAGDVEENPGPTSMDWIWRILFLVGAATGAHSGPQLQLQESGPGLVKPSETLSLTCTVSGDSISSGDYYWGWIRQPPGKGLEWIGHIYYSGVTYYNPSLKSRVTISVDTSRNQFSLKLSSVTAADTAVYYCTREDSSNWRSRGQGTLVTVSSGSGGGGSGGGGSGGGGSFEQLQVQESGPGLVKPSETLSLTCTVSGGSISNSYFSWGWIRQPPGKGLEWIGSFYYGEKTYYNPSLKSRATISIDTSKSQFSLKLSSVTAADTAVYYCPRGPTMIRGVIDSWGQGTLVTVSSTRASTKGPSVFPLAPSSKSTSGGTAALGCLVKDYFPEPVTVSWNSGALTSGVHTFPAVLQSSGLYSLSSVVTVPSSSLGTQTYICNVNHKPSNTKVDKRVEPKSCEVKTDSTDHVKPKETENTKQPSKSCHKPKAIVHTEKVNMMSLTVLGLRMLFAKTVAVNFLLTAKLFFL

SEQ ID NO: 13780 - protein, 928 aa, Artificial Sequence
  Synthetic Polypeptide
MALPVTALLLPLALLLHAARPEVQLVESGGGLVQPGGSLRLSCAASGFSFSDFWMSWVRQAPGKGLEWVATISQAGSEKDYVDSVKGRFTISRDNAKKSLYLQMNSLRAEDTAVYYCASGVYSFDYRGQGTLVTVSSGTGGGGSGGGGSGGGGSEFDIVMTQTPLSLPVTPGEPASISCRSSRSLLDSDDGNTYLDWYLQKPGQSPQLLIYTLSYRASGVPDRFSGSGSGTDFTLKISRVEAEDVGVYYCMQRVEFPITFGQGTRLEIKRLEGQPKANPTVTLFPPSSEELQANKATLVCLISDFYPGAVTVAWKADGSPVKAGVETTKPSKQSNNKYAASSYLSLTPEQWKSHRSYSCQVTHEGSTVEKTVAPTECSPIKTDVITMDPKDNCSKDANDTLLLQLTNTSAYYMYLLLLLKSVVYFAIITCCLLRRTAFCCNGEKSRAKRSGSGATNFSLLKQAGDVEENPGPTSMDWIWRILFLVGAATGAHSGPQLQLQESGPGLVKPSETLSLTCTVSGDSISSGDYYWGWIRQPPGKGLEWIGHIYYSGVTYYNPSLKSRVTISVDTSRNQFSLKLSSVTAADTAVYYCTREDSSNWRSRGQGTLVTVSSGSGGGGSGGGGSGGGGSFEQVQLVESGGGVVQPGRSLRLSCAASGFIFSRYGMHWVRQAPGKGLKWVAVIWYDGSNKLYADSVKGRFTISRDNSKNTLYLQMNSLRAEDTAVYYCARDYYDNSRHHWGFDYWGQGTLVTVSSTRASTKGPSVFPLAPSSKSTSGGTAALGCLVKDYFPEPVTVSWNSGALTSGVHTFPAVLQSSGLYSLSSVVTVPSSSLGTQTYICNVNHKPSNTKVDKRVEPKSCEVKTDSTDHVKPKETENTKQPSKSCHKPKAIVHTEKVNMMSLTVLGLRMLFAKTVAVNFLLTAKLFFL

SEQ ID NO: 13781 - protein, 918 aa, Artificial Sequence
  Synthetic Polypeptide
MALPVTALLLPLALLLHAARPEVQLVESGGGLVQPGGSLRLSCAASGFSFSDFWMSWVRQAPGKGLEWVATISQAGSEKDYVDSVKGRFTISRDNAKKSLYLQMNSLRAEDTAVYYCASGVYSFDYRGQGTLVTVSSGTGGGGSGGGGSGGGGSEFEIQMTQSPSSMSASLGDTITITCQATQDIFKNLNWYQQKPGKPPSLLIYYATELAEGVPSRFSGSGSGSDYSLTISNLESEDFAAYYCLQFFEFPFTFGSGTKLEMKLEGQPKANPTVTLFPPSSEELQANKATLVCLISDFYPGAVTVAWKADGSPVKAGVETTKPSKQSNNKYAASSYLSLTPEQWKSHRSYSCQVTHEGSTVEKTVAPTECSPIKTDVITMDPKDNCSKDANDTLLLQLTNTSAYYMYLLLLLKSVVYFAIITCCLLRRTAFCCNGEKSRAKRSGSGATNFSLLKQAGDVEENPGPTSMDWIWRILFLVGAATGAHSGPQLQLQESGPGLVKPSETLSLTCTVSGDSISSGDYYWGWIRQPPGKGLEWIGHIYYSGVTYYNPSLKSRVTISVDTSRNQFSLKLSSVTAADTAVYYCTREDSSNWRSRGQGTLVTVSSGSGGGGSGGGGSGGGGSFEQVQLQQSGAELVRPGTSVKVSCKASGYVFTNYWIEWIKQRPGQGLEWIGVMNPGSGETTYNEKFKGKATLTADKSSSTAYMQLSSLTSVDSAVYFCARDHDRDYYAMDYWGQGTSVTVSSTRASTKGPSVFPLAPSSKSTSGGTAALGCLVKDYFPEPVTVSWNSGALTSGVHTFPAVLQSSGLYSLSSVVTVPSSSLGTQTYICNVNHKPSNTKVDKRVEPKSCEVKTDSTDHVKPKETENTKQPSKSCHKPKAIVHTEKVNMMSLTVLGLRMLFAKTVAVNFLLTAKLFFL

SEQ ID NO: 13782 - protein, 915 aa, Artificial Sequence
  Synthetic Polypeptide
MALPVTALLLPLALLLHAARPEVQLVESGGGLVQPGGSLRLSCAASGFSFSDFWMSWVRQAPGKGLEWVATISQAGSEKDYVDSVKGRFTISRDNAKKSLYLQMNSLRAEDTAVYYCASGVYSFDYRGQGTLVTVSSGTGGGGSGGGGSGGGGSEFDILLTQSPAILSVSPGERVSFSCRASQNIGTSIHWYQQRTNGSPRLLIKYASESVSGIPSRFSGSGSGTDFTLSINSVESEDIADYYCQHTNSWPTTFGGGTKLEIKRLEGQPKANPTVTLFPPSSEELQANKATLVCLISDFYPGAVTVAWKADGSPVKAGVETTKPSKQSNNKYAASSYLSLTPEQWKSHRSYSCQVTHEGSTVEKTVAPTECSPIKTDVITMDPKDNCSKDANDTLLLQLTNTSAYYMYLLLLLKSVVYFAIITCCLLRRTAFCCNGEKSRAKRSGSGATNFSLLKQAGDVEENPGPTSMDWIWRILFLVGAATGAHSGPQLQLQESGPGLVKPSETLSLTCTVSGDSISSGDYYWGWIRQPPGKGLEWIGHIYYSGVTYYNPSLKSRVTISVDTSRNQFSLKLSSVTAADTAVYYCTREDSSNWRSRGQGTLVTVSSGSGGGGSGGGGSGGGGSFEQVQLQQSDAELVKPGASVKISCKASGYTFTDHAIHWVKQKPEQGLEWIGYFSPGNGDIKYNEKFKGKATLTADKSSSTAYMQLNSLTSEDSAVYFCKRSYGNYDYWGQGTTLTVSSTRASTKGPSVFPLAPSSKSTSGGTAALGCLVKDYFPEPVTVSWNSGALTSGVHTFPAVLQSSGLYSLSSVVTVPSSSLGTQTYICNVNHKPSNTKVDKRVEPKSCEVKTDSTDHVKPKETENTKQPSKSCHKPKAIVHTEKVNMMSLTVLGLRMLFAKTVAVNFLLTAKLFFL

SEQ ID NO: 13783 - protein, 920 aa, Artificial Sequence
  Synthetic Polypeptide
MALPVTALLLPLALLLHAARPEVQLVESGGGLVQPGGSLRLSCAASGFSFSDFWMSWVRQAPGKGLEWVATISQAGSEKDYVDSVKGRFTISRDNAKKSLYLQMNSLRAEDTAVYYCASGVYSFDYRGQGTLVTVSSGTGGGGSGGGGSGGGGSEFDIVMTQSPDSLAVSLGERATINCKSSQSLLNSGDQKNYLTWYQQKPGQPPKLLIYWASTRESGVPDRFSGSGSGTDFTLTISSLQAEDVAVYYCQNDYSYPLTFGQGTKVEIKLEGQPKANPTVTLFPPSSEELQANKATLVCLISDFYPGAVTVAWKADGSPVKAGVETTKPSKQSNNKYAASSYLSLTPEQWKSHRSYSCQVTHEGSTVEKTVAPTECSPIKTDVITMDPKDNCSKDANDTLLLQLTNTSAYYMYLLLLLKSVVYFAIITCCLLRRTAFCCNGEKSRAKRSGSGATNFSLLKQAGDVEENPGPTSMDWIWRILFLVGAATGAHSGPQLQLQESGPGLVKPSETLSLTCTVSGDSISSGDYYWGWIRQPPGKGLEWIGHIYYSGVTYYNPSLKSRVTISVDTSRNQFSLKLSSVTAADTAVYYCTREDSSNWRSRGQGTLVTVSSGSGGGGSGGGGSGGGGSFEQVQLVQSGAEVKKTGSSVKVSCKASGYTFTDHAIHVWRQAPGQALEWMGHFSPGNTDIKYNDKFKGRVTLTVDRSMSTAYMELSSLRSEDTAMYYCKTSTFFFDYWGQGTMVTVSSTRASTKGPSVFPLAPSSKSTSGGTAALGCLVKDYFPEPVTVSWNSGALTSGVHTFPAVLQSSGLYSLSSVVTVPSSSLGTQTYICNVNHKPSNTKVDKRVEPKSCEVKTDSTDHVKPKETENTKQPSKSCHKPKAIVHTEKVNMMSLTVLGLRMLFAKTVAVNFLLTAKLFFL

SEQ ID NO: 13784 - protein, 919 aa, Artificial Sequence
  Synthetic Polypeptide
MALPVTALLLPLALLLHAARPEVQLVESGGGLVQPGGSLRLSCAASGFSFSDFWMSWVRQAPGKGLEWVATISQAGSEKDYVDSVKGRFTISRDNAKKSLYLQMNSLRAEDTAVYYCASGVYSFDYRGQGTLVTVSSGTGGGGSGGGGSGGGGSEFDIQMTQSPSSLSASVGDRVTITCKASQDVSIAVAWYQQKPGKAPKVLIYSASYRYTGVPDRFSGSGSGTDFTFTISSLQPEDIAVYYCQQHYITPLTFGGGTKVEIKLEGQPKANPTVTLFPPSSEELQANKATLVCLISDFYPGAVTVAWKADGSPVKAGVETTKPSKQSNNKYAASSYLSLTPEQWKSHRSYSCQVTHEGSTVEKTVAPTECSPIKTDVITMDPKDNCSKDANDTLLLQLTNTSAYYMYLLLLLKSVVYFAIITCCLLRRTAFCCNGEKSRAKRSGSGATNFSLLKQAGDVEENPGPTSMDWIWRILFLVGAATGAHSGPQLQLQESGPGLVKPSETLSLTCTVSGDSISSGDYYWGWIRQPPGKGLEWIGHIYYSGVTYYNPSLKSRVTISVDTSRNQFSLKLSSVTAADTAVYYCTREDSSNWRSRGQGTLVTVSSGSGGGGSGGGGSGGGGSFEQIQLVQSGHEVKKPGASVKVSCKASGYTFTNYGMNWVRQAPGQGLEWMGWINTKTGEPTYAEEFKGRFVFSLETSASTAYLQISSLKAEDTAMYFCGRGGYGSSYWYFDVWGQGTTVTVSSTRASTKGPSVFPLAPSSKSTSGGTAALGCLVKDYFPEPVTVSWNSGALTSGVHTFPAVLQSSGLYSLSSVVTVPSSSLGTQTYICNVNHKPSNTKVDKRVEPKSCEVKTDSTDHVKPKETENTKQPSKSCHKPKAIVHTEKVNMMSLTVLGLRMLFAKTVAVNFLLTAKLFFL

SEQ ID NO: 13785 - protein, 921 aa, Artificial Sequence
  Synthetic Polypeptide
MALPVTALLLPLALLLHAARPEVQLVESGGGLVQPGGSLRLSCAASGFSFSDFWMSWVRQAPGKGLEWVATISQAGSEKDYVDSVKGRFTISRDNAKKSLYLQMNSLRAEDTAVYYCASGVYSFDYRGQGTLVTVSSGTGGGGSGGGGSGGGGSEFDIVMTQSPDSLAVSLGERATINCRASKSVSTSGYSYMHWYQQKPGQPPKLLIYLASNLESGVPDRFSGSGSGTDFTLTISSLQAEDVAVYYCQHSRELPYTFGQGTKLEIKLEGQPKANPTVTLFPPSSEELQANKATLVCLISDFYPGAVTVAWKADGSPVKAGVETTKPSKQSNNKYAASSYLSLTPEQWKSHRSYSCQVTHEGSTVEKTVAPTECSPIKTDVITMDPKDNCSKDANDTLLLQLTNTSAYYMYLLLLLKSVVYFAIITCCLLRRTAFCCNGEKSRAKRSGSGATNFSLLKQAGDVEENPGPTSMDWIWRILFLVGAATGAHSGPQLQLQESGPGLVKPSETLSLTCTVSGDSISSGDYYWGWIRQPPGKGLEWIGHIYYSGVTYYNPSLKSRVTISVDTSRNQFSLKLSSVTAADTAVYYCTREDSSNWRSRGQGTLVTVSSGSGGGGSGGGGSGGGGSFEQVQLQESGPGLVKPSETLSLTCTVSGGSISSYGVHWIRQPPGKGLEWIGVIWTSGVTDYNSALMGRVTISVDTSKNQFSLKLSSVTAADTAVYYCARDGDYDRYTMDYWGQGTLVTVSSTRASTKGPSVFPLAPSSKSTSGGTAALGCLVKDYFPEPVTVSWNSGALTSGVHTFPAVLQSSGLYSLSSVVTVPSSSLGTQTYICNVNHKPSNTKVDKRVEPKSCEVKTDSTDHVKPKETENTKQPSKSCHKPKAIVHTEKVNMMSLTVLGLRMLFAKTVAVNFLLTAKLFFL

SEQ ID NO: 13786 - protein, 921 aa, Artificial Sequence
  Synthetic Polypeptide
MALPVTALLLPLALLLHAARPEVQLVESGGGLVQPGGSLRLSCAASGFSFSDFWMSWVRQAPGKGLEWVATISQAGSEKDYVDSVKGRFTISRDNAKKSLYLQMNSLRAEDTAVYYCASGVYSFDYRGQGTLVTVSSGTGGGGSGGGGSGGGGSEFDIQMTQSPSSLSASVGDRVTITCRASQSIGTSLHWYQQKPGKAPKLLIKFASRLQSGVPSRFSGSGSGTDFTLTISSLQPEDFATYYCQQSPGFPPTFGQGTKLEIKRLEGQPKANPTVTLFPPSSEELQANKATLVCLISDFYPGAVTVAWKADGSPVKAGVETTKPSKQSNNKYAASSYLSLTPEQWKSHRSYSCQVTHEGSTVEKTVAPTECSPIKTDVITMDPKDNCSKDANDTLLLQLTNTSAYYMYLLLLLKSVVYFAIITCCLLRRTAFCCNGEKSRAKRSGSGATNFSLLKQAGDVEENPGPTSMDWIWRILFLVGAATGAHSGPQLQLQESGPGLVKPSETLSLTCTVSGDSISSGDYYWGWIRQPPGKGLEWIGHIYYSGVTYYNPSLKSRVTISVDTSRNQFSLKLSSVTAADTAVYYCTREDSSNWRSRGQGTLVTVSSGSGGGGSGGGGSGGGGSFEQVQLVESGGGLVKPGGSLRLSCAASGFSITTSGYYWTWIRQFPGKGLEWMGYIGYNSKTYYNPALKSRITISRDNAKNSLYLQMNSLRAEDTAVYYCARSLYGGYKDAFDSWGQGTLVTVSSTRASTKGPSVFPLAPSSKSTSGGTAALGCLVKDYFPEPVTVSWNSGALTSGVHTFPAVLQSSGLYSLSSVVTVPSSSLGTQTYICNVNHKPSNTKVDKRVEPKSCEVKTDSTDHVKPKETENTKQPSKSCHKPKAIVHTEKVNMMSLTVLGLRMLFAKTVAVNFLLTAKLFFL

SEQ ID NO: 13787 - protein, 926 aa, Artificial Sequence
  Synthetic Polypeptide
MALPVTALLLPLALLLHAARPEVQLVESGGGLVQPGGSLRLSCAASGFSFSDFWMSWVRQAPGKGLEWVATISQAGSEKDYVDSVKGRFTISRDNAKKSLYLQMNSLRAEDTAVYYCASGVYSFDYRGQGTLVTVSSGTGGGGSGGGGSGGGGSEFDEIVLTQSPLSLPVTPGEPASISCRSSQSLLHSIGYNYLDWYLQKPGQSPQLLIYLGSNRASGVPDRFSGSGSGTDFTLKISRVEAEDVGVYYCMQALQTPLTFGGGTKVEIKRLEGQPKANPTVTLFPPSSEELQANKATLVCLISDFYPGAVTVAWKADGSPVKAGVETTKPSKQSNNKYAASSYLSLTPEQWKSHRSYSCQVTHEGSTVEKTVAPTECSPIKTDVITMDPKDNCSKDANDTLLLQLTNTSAYYMYLLLLLKSVVYFAIITCCLLRRTAFCCNGEKSRAKRSGSGATNFSLLKQAGDVEENPGPTSMDWIWRILFLVGAATGAHSGPQLQLQESGPGLVKPSETLSLTCTVSGDSISSGDYYWGWIRQPPGKGLEWIGHIYYSGVTYYNPSLKSRVTISVDTSRNQFSLKLSSVTAADTAVYYCTREDSSNWRSRGQGTLVTVSSGSGGGGSGGGGSGGGGSFEEVQLVESGGGVVQPGRSLRLSCAASGFTFRSYGMHWVRQAPGKGLEWVAVISYDGSNKYYTDSVNGRFTISRDNSKNTLYLQMNSLRAEDTAVYYCARGGGYYETSGPDYWGQGTLVTVSSTRASTKGPSVFPLAPSSKSTSGGTAALGCLVKDYFPEPVTVSWNSGALTSGVHTFPAVLQSSGLYSLSSVVTVPSSSLGTQTYICNVNHKPSNTKVDKRVEPKSCEVKTDSTDHVKPKETENTKQPSKSCHKPKAIVHTEKVNMMSLTVLGLRMLFAKTVAVNFLLTAKLFFL

SEQ ID NO: 13788 - protein, 924 aa, Artificial Sequence
  Synthetic Polypeptide
MALPVTALLLPLALLLHAARPEVQLVESGGGLVQPGGSLRLSCAASGFSFSDFWMSWVRQAPGKGLEWVATISQAGSEKDYVDSVKGRFTISRDNAKKSLYLQMNSLRAEDTAVYYCASGVYSFDYRGQGTLVTVSSGTGGGGSGGGGSGGGGSEFDDVVMTQSPLSLPVTPGEPASISCRSSQSLLHSIGYNYLHWFLQKPGQSPQLLIYLGSNRASGVPDRFSGSGSGTDFTLKISRVEAEDVGVYYCMQALQTPPTFGQGTRLEIKRLEGQPKANPTVTLFPPSSEELQANKATLVCLISDFYPGAVTVAWKADGSPVKAGVETTKPSKQSNNKYAASSYLSLTPEQWKSHRSYSCQVTHEGSTVEKTVAPTECSPIKTDVITMDPKDNCSKDANDTLLLQLTNTSAYYMYLLLLLKSVVYFAIITCCLLRRTAFCCNGEKSRAKRSGSGATNFSLLKQAGDVEENPGPTSMDWIWRILFLVGAATGAHSGPQLQLQESGPGLVKPSETLSLTCTVSGDSISSGDYYWGWIRQPPGKGLEWIGHIYYSGVTYYNPSLKSRVTISVDTSRNQFSLKLSSVTAADTAVYYCTREDSSNWRSRGQGTLVTVSSGSGGGGSGGGGSGGGGSFEQLQLQESGPGLVKPSGTLSLTCAVSGGSISSSNWWSWVRQPPGKGLEWIGEIYHSGSTNYNPSLKSRVTISVDKSKNQFSLKLSSVTAADTAVYYCVGSPYGDYVLDYWGQGTLVTVSSTRASTKGPSVFPLAPSSKSTSGGTAALGCLVKDYFPEPVTVSWNSGALTSGVHTFPAVLQSSGLYSLSSVVTVPSSSLGTQTYICNVNHKPSNTKVDKRVEPKSCEVKTDSTDHVKPKETENTKQPSKSCHKPKAIVHTEKVNMMSLTVLGLRMLFAKTVAVNFLLTAKLFFL

SEQ ID NO: 13789 - protein, 922 aa, Artificial Sequence
  Synthetic Polypeptide
MALPVTALLLPLALLLHAARPEVQLVESGGGLVQPGGSLRLSCAASGFSFSDFWMSWVRQAPGKGLEWVATISQAGSEKDYVDSVKGRFTISRDNAKKSLYLQMNSLRAEDTAVYYCASGVYSFDYRGQGTLVTVSSGTGGGGSGGGGSGGGGSEFDEIVLTQSPGTLSLSLGERATLSCRASQSISSSFLAWYQQKPGQAPKLLIYAASTRATGIPDRFSGSGSGTDFTLTISRLEPEDFAVYYCQQYGRSLSFGGGTKVEVKLEGQPKANPTVTLFPPSSEELQANKATLVCLISDFYPGAVTVAWKADGSPVKAGVETTKPSKQSNNKYAASSYLSLTPEQWKSHRSYSCQVTHEGSTVEKTVAPTECSPIKTDVITMDPKDNCSKDANDTLLLQLTNTSAYYMYLLLLLKSVVYFAIITCCLLRRTAFCCNGEKSRAKRSGSGATNFSLLKQAGDVEENPGPTSMDWIWRILFLVGAATGAHSGPQLQLQESGPGLVKPSETLSLTCTVSGDSISSGDYYWGWIRQPPGKGLEWIGHIYYSGVTYYNPSLKSRVTISVDTSRNQFSLKLSSVTAADTAVYYCTREDSSNWRSRGQGTLVTVSSGSGGGGSGGGGSGGGGSFEQVQLQQSGPGLVKPSQTLSLTCAISGDSVSGNSATWNWIRQSPSRGLEWLGRTYYRSKWNHDYAESVKSRITINPDTSKNQFSLQLNSVTPEDTAVYYCARGDSSSWYAFDYWGQGTLVTVSSTRASTKGPSVFPLAPSSKSTSGGTAALGCLVKDYFPEPVTVSWNSGALTSGVHTFPAVLQSSGLYSLSSVVTVPSSSLGTQTYICNVNHKPSNTKVDKRVEPKSCEVKTDSTDHVKPKETENTKQPSKSCHKPKAIVHTEKVNMMSLTVLGLRMLFAKTVAVNFLLTAKLFFL

SEQ ID NO: 13790 - protein, 921 aa, Artificial Sequence
  Synthetic Polypeptide
MALPVTALLLPLALLLHAARPEVQLVESGGGLVQPGGSLRLSCAASGFSFSDFWMSWVRQAPGKGLEWVATISQAGSEKDYVDSVKGRFTISRDNAKKSLYLQMNSLRAEDTAVYYCASGVYSFDYRGQGTLVTVSSGTGGGGSGGGGSGGGGSEFDQSVVTQPPSVSVAPGKTARITCGRNNIGSKSVHWYQQKPGQAPVLVVYDDSDRPSGIPERFSGSNSGNTATLTISRVEAGDEADYYCQVWDSSSDHVVFGGGTKLTVLGLEGQPKANPTVTLFPPSSEELQANKATLVCLISDFYPGAVTVAWKADGSPVKAGVETTKPSKQSNNKYAASSYLSLTPEQWKSHRSYSCQVTHEGSTVEKTVAPTECSPIKTDVITMDPKDNCSKDANDTLLLQLTNTSAYYMYLLLLLKSVVYFAIITCCLLRRTAFCCNGEKSRAKRSGSGATNFSLLKQAGDVEENPGPTSMDWIWRILFLVGAATGAHSGPQLQLQESGPGLVKPSETLSLTCTVSGDSISSGDYYWGWIRQPPGKGLEWIGHIYYSGVTYYNPSLKSRVTISVDTSRNQFSLKLSSVTAADTAVYYCTREDSSNWRSRGQGTLVTVSSGSGGGGSGGGGSGGGGSFEVQLVQSGGGVMRPGGSLRLSCAASGFTFDDYGMSWVRQAPGKGLEWVSGINWNGGSTGYADSVRGRFTISRDNAKNSLYLQMNSLRAEDTALYYCARERGYGYHDPHDYWGQGTLVTVSSTRASTKGPSVFPLAPSSKSTSGGTAALGCLVKDYFPEPVTVSWNSGALTSGVHTFPAVLQSSGLYSLSSVVTVPSSSLGTQTYICNVNHKPSNTKVDKRVEPKSCEVKTDSTDHVKPKETENTKQPSKSCHKPKAIVHTEKVNMMSLTVLGLRMLFAKTVAVNFLLTAKLFFL

SEQ ID NO: 13791 - protein, 934 aa, Artificial Sequence
  Synthetic Polypeptide
MALPVTALLLPLALLLHAARPEVQLVESGGGLVQPGGSLRLSCAASGFSFSDFWMSWVRQAPGKGLEWVATISQAGSEKDYVDSVKGRFTISRDNAKKSLYLQMNSLRAEDTAVYYCASGVYSFDYRGQGTLVTVSSGTGGGGSGGGGSGGGGSEFEQKLISEEDLEFQAVVTQPPSASGTPGQRVTISCSGSSSNIGSNTVNWYQQVPGTAPKLLIYSNNQRPSGVPDRFSGSKSGTSASLAISGLQSEDEADYYCAAWDDSLNGWVFGGGTKLTVLLEGQPKANPTVTLFPPSSEELQANKATLVCLISDFYPGAVTVAWKADGSPVKAGVETTKPSKQSNNKYAASSYLSLTPEQWKSHRSYSCQVTHEGSTVEKTVAPTECSPIKTDVITMDPKDNCSKDANDTLLLQLTNTSAYYMYLLLLLKSVVYFAIITCCLLRRTAFCCNGEKSRAKRSGSGATNFSLLKQAGDVEENPGPTSMDWIWRILFLVGAATGAHSGPQLQLQESGPGLVKPSETLSLTCTVSGDSISSGDYYWGWIRQPPGKGLEWIGHIYYSGVTYYNPSLKSRVTISVDTSRNQFSLKLSSVTAADTAVYYCTREDSSNWRSRGQGTLVTVSSGSGGGGSGGGGSGGGGSFEQMQLVQSGAEVKEPGESLRISCKGSGYSFTNFWISWVRQMPGKGLEWMGRVDPGYSYSTYSPSFQGHVTISADKSTSTAYLQWNSLKASDTAMYYCARVQYSGYYDWFDPWGQGTLVTVSSTRASTKGPSVFPLAPSSKSTSGGTAALGCLVKDYFPEPVTVSWNSGALTSGVHTFPAVLQSSGLYSLSSVVTVPSSSLGTQTYICNVNHKPSNTKVDKRVEPKSCEVKTDSTDHVKPKETENTKQPSKSCHKPKAIVHTEKVNMMSLTVLGLRMLFAKTVAVNFLLTAKLFFL

SEQ ID NO: 13792 - protein, 928 aa, Artificial Sequence
  Synthetic Polypeptide
MALPVTALLLPLALLLHAARPEVQLVESGGGLVQPGGSLRLSCAASGFSFSDFWMSWVRQAPGKGLEWVATISQAGSEKDYVDSVKGRFTISRDNAKKSLYLQMNSLRAEDTAVYYCASGVYSFDYRGQGTLVTVSSGTGGGGSGGGGSGGGGSEFEQKLISEEDLEFDIQMTQSPSTLSASVGDRVTITCRASQNINKWLAWYQQRPGKAPQLLIYKASSLESGVPSRFSGSGSGTEYTLTISSLQPDDFATYYCQQYNSYATFGQGTKVEIKRLEGQPKANPTVTLFPPSSEELQANKATLVCLISDFYPGAVTVAWKADGSPVKAGVETTKPSKQSNNKYAASSYLSLTPEQWKSHRSYSCQVTHEGSTVEKTVAPTECSPIKTDVITMDPKDNCSKDANDTLLLQLTNTSAYYMYLLLLLKSVVYFAIITCCLLRRTAFCCNGEKSRAKRSGSGATNFSLLKQAGDVEENPGPTSMDWIWRILFLVGAATGAHSGPQLQLQESGPGLVKPSETLSLTCTVSGDSISSGDYYWGWIRQPPGKGLEWIGHIYYSGVTYYNPSLKSRVTISVDTSRNQFSLKLSSVTAADTAVYYCTREDSSNWRSRGQGTLVTVSSGSGGGGSGGGGSGGGGSFEQVQLVQSGAEVKKPGESLKISCKGSGYNFSNKWIGWVRQLPGRGLEWIAIIYPGYSDITYSPSFQGRVTISADTSINTAYLHWHSLKASDTAMYYCVRHTALAGFDYWGLGTLVTVSSTRASTKGPSVFPLAPSSKSTSGGTAALGCLVKDYFPEPVTVSWNSGALTSGVHTFPAVLQSSGLYSLSSVVTVPSSSLGTQTYICNVNHKPSNTKVDKRVEPKSCEVKTDSTDHVKPKETENTKQPSKSCHKPKAIVHTEKVNMMSLTVLGLRMLFAKTVAVNFLLTAKLFFL

SEQ ID NO: 13793 - protein, 919 aa, Artificial Sequence
  Synthetic Polypeptide
MALPVTALLLPLALLLHAARPEVQLVESGGGLVQPGGSLRLSCAASGFSFSDFWMSWVRQAPGKGLEWVATISQAGSEKDYVDSVKGRFTISRDNAKKSLYLQMNSLRAEDTAVYYCASGVYSFDYRGQGTLVTVSSGTGGGGSGGGGSGGGGSEFIVLTQSPASLAVSLGQRATISCRASESVDNYGNTFMHWYQQKPGQPPKLLIYRASNLESGIPARFSGSGSRTDFTLTINPVEADDVATYYCQQSNEDPPTFGAGTKLELKLEGQPKANPTVTLFPPSSEELQANKATLVCLISDFYPGAVTVAWKADGSPVKAGVETTKPSKQSNNKYAASSYLSLTPEQWKSHRSYSCQVTHEGSTVEKTVAPTECSPIKTDVITMDPKDNCSKDANDTLLLQLTNTSAYYMYLLLLLKSVVYFAIITCCLLRRTAFCCNGEKSRAKRSGSGATNFSLLKQAGDVEENPGPTSMDWIWRILFLVGAATGAHSGPQLQLQESGPGLVKPSETLSLTCTVSGDSISSGDYYWGWIRQPPGKGLEWIGHIYYSGVTYYNPSLKSRVTISVDTSRNQFSLKLSSVTAADTAVYYCTREDSSNWRSRGQGTLVTVSSGSGGGGSGGGGSGGGGSFEQIQLVQSGPELKKPGETVKISCKASGYIFTNYGMNWVKQAPGKSFKWMGWINTYTGESTYSADFKGRFAFSLETSASTAYLHINDLKNEDTATYFCARSGGYDPMDYWGQGTSVTVSSTRASTKGPSVFPLAPSSKSTSGGTAALGCLVKDYFPEPVTVSWNSGALTSGVHTFPAVLQSSGLYSLSSVVTVPSSSLGTQTYICNVNHKPSNTKVDKRVEPKSCEVKTDSTDHVKPKETENTKQPSKSCHKPKAIVHTEKVNMMSLTVLGLRMLFAKTVAVNFLLTAKLFFL

SEQ ID NO: 13794 - protein, 918 aa, Artificial Sequence
  Synthetic Polypeptide
MALPVTALLLPLALLLHAARPEVQLVESGGGLVQPGGSLRLSCAASGFSFSDFWMSWVRQAPGKGLEWVATISQAGSEKDYVDSVKGRFTISRDNAKKSLYLQMNSLRAEDTAVYYCASGVYSFDYRGQGTLVTVSSGTGGGGSGGGGSGGGGSEFEIVLTQSPGTLSLSPGERATLSCRASQSVSNTYLAWYHQRPGQAPRLLIYGASSRATGIPDRFSGSGSGTDFALTISSLEPEDFAVYYCQQYSNSWTFGQGTKVEIKRLEGQPKANPTVTLFPPSSEELQANKATLVCLISDFYPGAVTVAWKADGSPVKAGVETTKPSKQSNNKYAASSYLSLTPEQWKSHRSYSCQVTHEGSTVEKTVAPTECSPIKTDVITMDPKDNCSKDANDTLLLQLTNTSAYYMYLLLLLKSVVYFAIITCCLLRRTAFCCNGEKSRAKRSGSGATNFSLLKQAGDVEENPGPTSMDWIWRILFLVGAATGAHSGPQLQLQESGPGLVKPSETLSLTCTVSGDSISSGDYYWGWIRQPPGKGLEWIGHIYYSGVTYYNPSLKSRVTISVDTSRNQFSLKLSSVTAADTAVYYCTREDSSNWRSRGQGTLVTVSSGSGGGGSGGGGSGGGGSFEQVQLVESGGGVVQPGRSLRLSCAASGFTFSSYDMHWVRQAPGKGLEWVAVISYDGTNEYYADSVKGRFTISRDTSKNTLYLQMNSLRAEDTAVYYCARERYFDWSFDYWGQGTLVSVSSTRASTKGPSVFPLAPSSKSTSGGTAALGCLVKDYFPEPVTVSWNSGALTSGVHTFPAVLQSSGLYSLSSVVTVPSSSLGTQTYICNVNHKPSNTKVDKRVEPKSCEVKTDSTDHVKPKETENTKQPSKSCHKPKAIVHTEKVNMMSLTVLGLRMLFAKTVAVNFLLTAKLFFL

SEQ ID NO: 13795 - protein, 917 aa, Artificial Sequence
  Synthetic Polypeptide
MALPVTALLLPLALLLHAARPEVQLVESGGGLVQPGGSLRLSCAASGFSFSDFWMSWVRQAPGKGLEWVATISQAGSEKDYVDSVKGRFTISRDNAKKSLYLQMNSLRAEDTAVYYCASGVYSFDYRGQGTLVTVSSGTGGGGSGGGGSGGGGSEFELTQDPAVSVALGQTVRITCQGDSLRSNYANWYQQKPGQAPVLVIYGQNNRPSGIPDRFSGSSSGNTASLTITGAQAADEADYYCDSRVSTGNHVVFGGGTKLTVLGQLEGQPKANPTVTLFPPSSEELQANKATLVCLISDFYPGAVTVAWKADGSPVKAGVETTKPSKQSNNKYAASSYLSLTPEQWKSHRSYSCQVTHEGSTVEKTVAPTECSPIKTDVITMDPKDNCSKDANDTLLLQLTNTSAYYMYLLLLLKSVVYFAIITCCLLRRTAFCCNGEKSRAKRSGSGATNFSLLKQAGDVEENPGPTSMDWIWRILFLVGAATGAHSGPQLQLQESGPGLVKPSETLSLTCTVSGDSISSGDYYWGWIRQPPGKGLEWIGHIYYSGVTYYNPSLKSRVTISVDTSRNQFSLKLSSVTAADTAVYYCTREDSSNWRSRGQGTLVTVSSGSGGGGSGGGGSGGGGSFEEVQLVQSGAEVKKPGASVKVSCKASGYTFTSYAMHWVRQAPGQRLEWMGWINAGNGNTKYSQKFQGRVTITRDTSASTAYMELSSLRSEDTAVYYCARDISYGSFDYWGQGTLVTVSSTRASTKGPSVFPLAPSSKSTSGGTAALGCLVKDYFPEPVTVSWNSGALTSGVHTFPAVLQSSGLYSLSSVVTVPSSSLGTQTYICNVNHKPSNTKVDKRVEPKSCEVKTDSTDHVKPKETENTKQPSKSCHKPKAIVHTEKVNMMSLTVLGLRMLFAKTVAVNFLLTAKLFFL

SEQ ID NO: 13796 - protein, 919 aa, Artificial Sequence
  Synthetic Polypeptide
MALPVTALLLPLALLLHAARPEVQLVESGGGLVQPGGSLRLSCAASGFSFSDFWMSWVRQAPGKGLEWVATISQAGSEKDYVDSVKGRFTISRDNAKKSLYLQMNSLRAEDTAVYYCASGVYSFDYRGQGTLVTVSSGTGGGGSGGGGSGGGGSEFDIVLTQTPATLSVTPGDSVSLSCRASQSISNNLHWYQQKSHESPRLLIKNASQSISGIPSKFSGSGSGTDFTLRINSVETEDFGMYFCQQSNSWPYTFGSGTKLEIKLEGQPKANPTVTLFPPSSEELQANKATLVCLISDFYPGAVTVAWKADGSPVKAGVETTKPSKQSNNKYAASSYLSLTPEQWKSHRSYSCQVTHEGSTVEKTVAPTECSPIKTDVITMDPKDNCSKDANDTLLLQLTNTSAYYMYLLLLLKSVVYFAIITCCLLRRTAFCCNGEKSRAKRSGSGATNFSLLKQAGDVEENPGPTSMDWIWRILFLVGAATGAHSGPQLQLQESGPGLVKPSETLSLTCTVSGDSISSGDYYWGWIRQPPGKGLEWIGHIYYSGVTYYNPSLKSRVTISVDTSRNQFSLKLSSVTAADTAVYYCTREDSSNWRSRGQGTLVTVSSGSGGGGSGGGGSGGGGSFEQVKLQQSGPELVKPGASVKISCKASGYSFTGYYMHWVKQSHGNILDWIGYIYPYNGVSSYNQKFKGKATLTVDKSSSTAYMELRSLTSEDSAVYYCARERGLYQLRAMDYWGQGTSVTVSSTRASTKGPSVFPLAPSSKSTSGGTAALGCLVKDYFPEPVTVSWNSGALTSGVHTFPAVLQSSGLYSLSSVVTVPSSSLGTQTYICNVNHKPSNTKVDKRVEPKSCEVKTDSTDHVKPKETENTKQPSKSCHKPKAIVHTEKVNMMSLTVLGLRMLFAKTVAVNFLLTAKLFFL

SEQ ID NO: 13797 - protein, 910 aa, Artificial Sequence
  Synthetic Polypeptide
MALPVTALLLPLALLLHAARPEVQLVESGGGLVQPGGSLRLSCAASGFSFSDFWMSWVRQAPGKGLEWVATISQAGSEKDYVDSVKGRFTISRDNAKKSLYLQMNSLRAEDTAVYYCASGVYSFDYRGQGTLVTVSSGTGGGGSGGGGSGGGGSEFDIVMTQTPAIMSASPGQKVTITCSASSSVNYMHWYQQKLGSSPKLWIYDTSKLAPGVPARFSGSGSGTSYSLTISSMEAEDAASYFCHQWSSYPYTFGSGTKLEIKLEGQPKANPTVTLFPPSSEELQANKATLVCLISDFYPGAVTVAWKADGSPVKAGVETTKPSKQSNNKYAASSYLSLTPEQWKSHRSYSCQVTHEGSTVEKTVAPTECSPIKTDVITMDPKDNCSKDANDTLLLQLTNTSAYYMYLLLLLKSVVYFAIITCCLLRRTAFCCNGEKSRAKRSGSGATNFSLLKQAGDVEENPGPTSMDWIWRILFLVGAATGAHSGPQLQLQESGPGLVKPSETLSLTCTVSGDSISSGDYYWGWIRQPPGKGLEWIGHIYYSGVTYYNPSLKSRVTISVDTSRNQFSLKLSSVTAADTAVYYCTREDSSNWRSRGQGTLVTVSSGSGGGGSGGGGSGGGGSFEEVQLQESGPDLVKPSQSLSLTCTVTGYSITSGYGWHWIRQFPGNKLEWMGYIHYSGSTTYNPSLKSRISISRDTSKNQFFLQLNSVTTEDTATYYCARSLRYWGQGTTLTVSSTRASTKGPSVFPLAPSSKSTSGGTAALGCLVKDYFPEPVTVSWNSGALTSGVHTFPAVLQSSGLYSLSSVVTVPSSSLGTQTYICNVNHKPSNTKVDKRVEPKSCEVKTDSTDHVKPKETENTKQPSKSCHKPKAIVHTEKVNMMSLTVLGLRMLFAKTVAVNFLLTAKLFFL

SEQ ID NO: 13798 - protein, 913 aa, Artificial Sequence
  Synthetic Polypeptide
MALPVTALLLPLALLLHAARPEVQLVESGGGLVQPGGSLRLSCAASGFSFSDFWMSWVRQAPGKGLEWVATISQAGSEKDYVDSVKGRFTISRDNAKKSLYLQMNSLRAEDTAVYYCASGVYSFDYRGQGTLVTVSSGTGGGGSGGGGSGGGGSEFDIQMTQSPSSLSASVGDRVTITCSATSSISYMHWYQQKPGKAPKGWIYDTSKLAHGVPSRFSGSGSGTDFTLTISSLQPEDFATYYCHQRRSYPFTFGQGTKVEIKLEGQPKANPTVTLFPPSSEELQANKATLVCLISDFYPGAVTVAWKADGSPVKAGVETTKPSKQSNNKYAASSYLSLTPEQWKSHRSYSCQVTHEGSTVEKTVAPTECSPIKTDVITMDPKDNCSKDANDTLLLQLTNTSAYYMYLLLLLKSVVYFAIITCCLLRRTAFCCNGEKSRAKRSGSGATNFSLLKQAGDVEENPGPTSMDWIWRILFLVGAATGAHSGPQLQLQESGPGLVKPSETLSLTCTVSGDSISSGDYYWGWIRQPPGKGLEWIGHIYYSGVTYYNPSLKSRVTISVDTSRNQFSLKLSSVTAADTAVYYCTREDSSNWRSRGQGTLVTVSSGSGGGGSGGGGSGGGGSFEEVQLVQSGAEVKKPGASVKVSCKASGYTFTNFWIHWVRQAPGQGLEWIGEIDPSDSYTNYNQKFKGRVTITRDTSTSTAYLELSSLRSEDTAVYYCAREITTVDYWGQGTLVTVSSTRASTKGPSVFPLAPSSKSTSGGTAALGCLVKDYFPEPVTVSWNSGALTSGVHTFPAVLQSSGLYSLSSVVTVPSSSLGTQTYICNVNHKPSNTKVDKRVEPKSCEVKTDSTDHVKPKETENTKQPSKSCHKPKAIVHTEKVNMMSLTVLGLRMLFAKTVAVNFLLTAKLFFL

SEQ ID NO: 13799 - protein, 920 aa, Artificial Sequence
  Synthetic Polypeptide
MALPVTALLLPLALLLHAARPEVQLVESGGGLVQPGGSLRLSCAASGFSFSDFWMSWVRQAPGKGLEWVATISQAGSEKDYVDSVKGRFTISRDNAKKSLYLQMNSLRAEDTAVYYCASGVYSFDYRGQGTLVTVSSGTGGGGSGGGGSGGGGSEFDIQMTQSPSSLSASVGDRVTITCKASQGFNKYVAWYQQKPGKAPKLLIYYTSTLQPGVPSRFSGSGSGRDYTLTISSLQPEDFATYYCLQYGNLLYAFGQGTKVEIKRLEGQPKANPTVTLFPPSSEELQANKATLVCLISDFYPGAVTVAWKADGSPVKAGVETTKPSKQSNNKYAASSYLSLTPEQWKSHRSYSCQVTHEGSTVEKTVAPTECSPIKTDVITMDPKDNCSKDANDTLLLQLTNTSAYYMYLLLLLKSVVYFAIITCCLLRRTAFCCNGEKSRAKRSGSGATNFSLLKQAGDVEENPGPTSMDWIWRILFLVGAATGAHSGPQLQLQESGPGLVKPSETLSLTCTVSGDSISSGDYYWGWIRQPPGKGLEWIGHIYYSGVTYYNPSLKSRVTISVDTSRNQFSLKLSSVTAADTAVYYCTREDSSNWRSRGQGTLVTVSSGSGGGGSGGGGSGGGGSFEEVQLVQSGAEVKKPGASVKVSCKASGYTFTSYWIGWVRQAPGQGLEWIGDIYPGGGYTNYNEKFKGRVTITRDTSTSTAYLELSSLRSEDTAVYYCARLDGSSYRGAMDSWGQGTLVTVSSTRASTKGPSVFPLAPSSKSTSGGTAALGCLVKDYFPEPVTVSWNSGALTSGVHTFPAVLQSSGLYSLSSVVTVPSSSLGTQTYICNVNHKPSNTKVDKRVEPKSCEVKTDSTDHVKPKETENTKQPSKSCHKPKAIVHTEKVNMMSLTVLGLRMLFAKTVAVNFLLTAKLFFL

SEQ ID NO: 13800 - protein, 916 aa, Artificial Sequence
  Synthetic Polypeptide
MALPVTALLLPLALLLHAARPEVQLVESGGGLVQPGGSLRLSCAASGFSFSDFWMSWVRQAPGKGLEWVATISQAGSEKDYVDSVKGRFTISRDNAKKSLYLQMNSLRAEDTAVYYCASGVYSFDYRGQGTLVTVSSGTGGGGSGGGGSGGGGSEFDIQMTQSPSSLSASVGDRVTITCRASQDIRYYLNWYQQKPGKAPKLLIYVASSLQSGVPSRFSGSGSGTEFTLTVSSLQPEDFATYYCLQVYSTPRTFGQGTKVEIKLEGQPKANPTVTLFPPSSEELQANKATLVCLISDFYPGAVTVAWKADGSPVKAGVETTKPSKQSNNKYAASSYLSLTPEQWKSHRSYSCQVTHEGSTVEKTVAPTECSPIKTDVITMDPKDNCSKDANDTLLLQLTNTSAYYMYLLLLLKSVVYFAIITCCLLRRTAFCCNGEKSRAKRSGSGATNFSLLKQAGDVEENPGPTSMDWIWRILFLVGAATGAHSGPQLQLQESGPGLVKPSETLSLTCTVSGDSISSGDYYWGWIRQPPGKGLEWIGHIYYSGVTYYNPSLKSRVTISVDTSRNQFSLKLSSVTAADTAVYYCTREDSSNWRSRGQGTLVTVSSGSGGGGSGGGGSGGGGSFEEVQLVESGGGLAKPGGSLRLSCAASGFRFTFNNYYMDWVRQAPGQGLEWVSRISSSGDPTWYADSVKGRFTISRENAKNTLFLQMNSLRAEDTAVYYCASLTTGSDSWGQGVLVTVSSTRASTKGPSVFPLAPSSKSTSGGTAALGCLVKDYFPEPVTVSWNSGALTSGVHTFPAVLQSSGLYSLSSVVTVPSSSLGTQTYICNVNHKPSNTKVDKRVEPKSCEVKTDSTDHVKPKETENTKQPSKSCHKPKAIVHTEKVNMMSLTVLGLRMLFAKTVAVNFLLTAKLFFL

SEQ ID NO: 13801 - protein, 917 aa, Artificial Sequence
  Synthetic Polypeptide
MALPVTALLLPLALLLHAARPEVQLVESGGGLVQPGGSLRLSCAASGFSFSDFWMSWVRQAPGKGLEWVATISQAGSEKDYVDSVKGRFTISRDNAKKSLYLQMNSLRAEDTAVYYCASGVYSFDYRGQGTLVTVSSGTGGGGSGGGGSGGGGSEFEIVMTQSPATLSVSPGERATLSCRASQSVSRNLAWYQQKPGQAPRLLIYGASTRATGIPARFSGSGSGTEFTLTIGSLQSEDFAVYYCQQYKTWPRTFGQGTNVEIKLEGQPKANPTVTLFPPSSEELQANKATLVCLISDFYPGAVTVAWKADGSPVKAGVETTKPSKQSNNKYAASSYLSLTPEQWKSHRSYSCQVTHEGSTVEKTVAPTECSPIKTDVITMDPKDNCSKDANDTLLLQLTNTSAYYMYLLLLLKSVVYFAIITCCLLRRTAFCCNGEKSRAKRSGSGATNFSLLKQAGDVEENPGPTSMDWIWRILFLVGAATGAHSGPQLQLQESGPGLVKPSETLSLTCTVSGDSISSGDYYWGWIRQPPGKGLEWIGHIYYSGVTYYNPSLKSRVTISVDTSRNQFSLKLSSVTAADTAVYYCTREDSSNWRSRGQGTLVTVSSGSGGGGSGGGGSGGGGSFEQVQLQQWGAGLLKPSETLSLTCAVFGGSFSGYYWSWIRQPPGKGLEWIGEINHRGNTNDNPSLKSRVTISVDTSKNQFALKLSSVTAADTAVYYCARERGYTYGNFDHWGQGTLVTVSSTRASTKGPSVFPLAPSSKSTSGGTAALGCLVKDYFPEPVTVSWNSGALTSGVHTFPAVLQSSGLYSLSSVVTVPSSSLGTQTYICNVNHKPSNTKVDKRVEPKSCEVKTDSTDHVKPKETENTKQPSKSCHKPKAIVHTEKVNMMSLTVLGLRMLFAKTVAVNFLLTAKLFFL

SEQ ID NO: 13802 - protein, 918 aa, Artificial Sequence
  Synthetic Polypeptide
MALPVTALLLPLALLLHAARPEVQLVESGGGLVQPGGSLRLSCAASGFSFSDFWMSWVRQAPGKGLEWVATISQAGSEKDYVDSVKGRFTISRDNAKKSLYLQMNSLRAEDTAVYYCASGVYSFDYRGQGTLVTVSSGTGGGGSGGGGSGGGGSEFEIVMTPSSATLSVSPGERATLSCRASQSVSRNLAWYQQKPGQAPRLLIYGASTRATGIPARFSGSGSGTEFTLTISSLQSEDFAVYYCHQYSNWMCSFGQGTKLEIKLEGQPKANPTVTLFPPSSEELQANKATLVCLISDFYPGAVTVAWKADGSPVKAGVETTKPSKQSNNKYAASSYLSLTPEQWKSHRSYSCQVTHEGSTVEKTVAPTECSPIKTDVITMDPKDNCSKDANDTLLLQLTNTSAYYMYLLLLLKSVVYFAIITCCLLRRTAFCCNGEKSRAKRSGSGATNFSLLKQAGDVEENPGPTSMDWIWRILFLVGAATGAHSGPQLQLQESGPGLVKPSETLSLTCTVSGDSISSGDYYWGWIRQPPGKGLEWIGHIYYSGVTYYNPSLKSRVTISVDTSRNQFSLKLSSVTAADTAVYYCTREDSSNWRSRGQGTLVTVSSGSGGGGSGGGGSGGGGSFEEVQLLESGGGLVQPGGSLRLSCAASGFTFSRYAMNWVRQAPGKGLEWVSGISGSGGRTYYADSVKGRFTISRDNSKNTLYLQMNSLRAEDTAVYYCAKDRDFWSGPFDYWGQGTLVTVSSTRASTKGPSVFPLAPSSKSTSGGTAALGCLVKDYFPEPVTVSWNSGALTSGVHTFPAVLQSSGLYSLSSVVTVPSSSLGTQTYICNVNHKPSNTKVDKRVEPKSCEVKTDSTDHVKPKETENTKQPSKSCHKPKAIVHTEKVNMMSLTVLGLRMLFAKTVAVNFLLTAKLFFL

SEQ ID NO: 13803 - protein, 923 aa, Artificial Sequence
  Synthetic Polypeptide
MALPVTALLLPLALLLHAARPEVQLVESGGGLVQPGGSLRLSCAASGFSFSDFWMSWVRQAPGKGLEWVATISQAGSEKDYVDSVKGRFTISRDNAKKSLYLQMNSLRAEDTAVYYCASGVYSFDYRGQGTLVTVSSGTGGGGSGGGGSGGGGSEFDIQMTQSPSSLSASVGDRVTITCKASKNIRSYLAWYQQKPGKAPKLLIYSGSTLHSGVPSRFSGSGSGTDFTLTISSLQPEDFATYYCQQHHEYPLTFGQGTKVEIKRLEGQPKANPTVTLFPPSSEELQANKATLVCLISDFYPGAVTVAWKADGSPVKAGVETTKPSKQSNNKYAASSYLSLTPEQWKSHRSYSCQVTHEGSTVEKTVAPTECSPIKTDVITMDPKDNCSKDANDTLLLQLTNTSAYYMYLLLLLKSVVYFAIITCCLLRRTAFCCNGEKSRAKRSGSGATNFSLLKQAGDVEENPGPTSMDWIWRILFLVGAATGAHSGPQLQLQESGPGLVKPSETLSLTCTVSGDSISSGDYYWGWIRQPPGKGLEWIGHIYYSGVTYYNPSLKSRVTISVDTSRNQFSLKLSSVTAADTAVYYCTREDSSNWRSRGQGTLVTVSSGSGGGGSGGGGSGGGGSFEQVQLQESGPGLVKPSETLSLTCTVSGYTITSGYDWSWIRQPPGKGLEWIGYINYGGSTNYKPSLGSRVTISVDTSKNQFSLKLSSVTAADTAVYYCARYNEYKSYIYDWYFDFWGQGTLVTVSSTRASTKGPSVFPLAPSSKSTSGGTAALGCLVKDYFPEPVTVSWNSGALTSGVHTFPAVLQSSGLYSLSSVVTVPSSSLGTQTYICNVNHKPSNTKVDKRVEPKSCEVKTDSTDHVKPKETENTKQPSKSCHKPKAIVHTEKVNMMSLTVLGLRMLFAKTVAVNFLLTAKLFFL

SEQ ID NO: 13804 - protein, 925 aa, Artificial Sequence
  Synthetic Polypeptide
MALPVTALLLPLALLLHAARPEVQLVESGGGLVQPGGSLRLSCAASGFSFSDFWMSWVRQAPGKGLEWVATISQAGSEKDYVDSVKGRFTISRDNAKKSLYLQMNSLRAEDTAVYYCASGVYSFDYRGQGTLVTVSSGTGGGGSGGGGSGGGGSEFQSVVTQPPSVSAAPGQKVTISCSGSSSNIGNNYVSWYQQLPGTAPKLLIYDNNKRPSGIPDRFSGSKSGTSATLGITGLQTGDEADYYCGTWDGSLYTMLFGGGTKLTVLLEGQPKANPTVTLFPPSSEELQANKATLVCLISDFYPGAVTVAWKADGSPVKAGVETTKPSKQSNNKYAASSYLSLTPEQWKSHRSYSCQVTHEGSTVEKTVAPTECSPIKTDVITMDPKDNCSKDANDTLLLQLTNTSAYYMYLLLLLKSVVYFAIITCCLLRRTAFCCNGEKSRAKRSGSGATNFSLLKQAGDVEENPGPTSMDWIWRILFLVGAATGAHSGPQLQLQESGPGLVKPSETLSLTCTVSGDSISSGDYYWGWIRQPPGKGLEWIGHIYYSGVTYYNPSLKSRVTISVDTSRNQFSLKLSSVTAADTAVYYCTREDSSNWRSRGQGTLVTVSSGSGGGGSGGGGSGGGGSFEEVQLVESGGGLVKPGGSLRLSCAASGFTFSNAWMSWVRQAPGKGLEWVGFIRSKAYGGTTEYAASVKGRFTISRDDSKSIAYLQMNNLKTEDTAVYYCARDGLYSSSWYDSDYWGQGTLVTVSSTRASTKGPSVFPLAPSSKSTSGGTAALGCLVKDYFPEPVTVSWNSGALTSGVHTFPAVLQSSGLYSLSSVVTVPSSSLGTQTYICNVNHKPSNTKVDKRVEPKSCEVKTDSTDHVKPKETENTKQPSKSCHKPKAIVHTEKVNMMSLTVLGLRMLFAKTVAVNFLLTAKLFFL

SEQ ID NO: 13805 - protein, 930 aa, Artificial Sequence
  Synthetic Polypeptide
MALPVTALLLPLALLLHAARPEVQLVESGGGLVQPGGSLRLSCAASGFSFSDFWMSWVRQAPGKGLEWVATISQAGSEKDYVDSVKGRFTISRDNAKKSLYLQMNSLRAEDTAVYYCASGVYSFDYRGQGTLVTVSSGTGGGGSGGGGSGGGGSEFQSVLTQPPSVSGAPGQRVTISCTGSSSNIGAGYDVHWYQQLPGTAPKLLIFGNSNRPSGVPDRFSGFKSGTSASLAITGLQAEDEADYFCQSYDSSLSGSGVFGTGTKVTVLGLEGQPKANPTVTLFPPSSEELQANKATLVCLISDFYPGAVTVAWKADGSPVKAGVETTKPSKQSNNKYAASSYLSLTPEQWKSHRSYSCQVTHEGSTVEKTVAPTECSPIKTDVITMDPKDNCSKDANDTLLLQLTNTSAYYMYLLLLLKSVVYFAIITCCLLRRTAFCCNGEKSRAKRSGSGATNFSLLKQAGDVEENPGPTSMDWIWRILFLVGAATGAHSGPQLQLQESGPGLVKPSETLSLTCTVSGDSISSGDYYWGWIRQPPGKGLEWIGHIYYSGVTYYNPSLKSRVTISVDTSRNQFSLKLSSVTAADTAVYYCTREDSSNWRSRGQGTLVTVSSGSGGGGSGGGGSGGGGSFEQMQLVQSGGGLVQPGRSLRLSCAASGFTFDDYAMHWVRQAPGKGLEWVSGISWNSGSIGYADSVKGRFTISRDNAKNSLYLQMNSLRAEDTALYYCAKDIHSGSYYGLLYYAMDVWGQGTTVTVSSTRASTKGPSVFPLAPSSKSTSGGTAALGCLVKDYFPEPVTVSWNSGALTSGVHTFPAVLQSSGLYSLSSVVTVPSSSLGTQTYICNVNHKPSNTKVDKRVEPKSCEVKTDSTDHVKPKETENTKQPSKSCHKPKAIVHTEKVNMMSLTVLGLRMLFAKTVAVNFLLTAKLFFL

SEQ ID NO: 13806 - protein, 930 aa, Artificial Sequence
  Synthetic Polypeptide
MALPVTALLLPLALLLHAARPEVQLVESGGGLVQPGGSLRLSCAASGFSFSDFWMSWVRQAPGKGLEWVATISQAGSEKDYVDSVKGRFTISRDNAKKSLYLQMNSLRAEDTAVYYCASGVYSFDYRGQGTLVTVSSGTGGGGSGGGGSGGGGSEFLPVLTQPPSASGTPGQRVTISCSGRSSNIGSNSVNWYRQLPGAAPKLLIYSNNQRPPGVPVRFSGSKSGTSASLAISGLQSEDEATYYCATWDDNLNVHYVFGTGTKVTVLGSRLEGQPKANPTVTLFPPSSEELQANKATLVCLISDFYPGAVTVAWKADGSPVKAGVETTKPSKQSNNKYAASSYLSLTPEQWKSHRSYSCQVTHEGSTVEKTVAPTECSPIKTDVITMDPKDNCSKDANDTLLLQLTNTSAYYMYLLLLLKSVVYFAIITCCLLRRTAFCCNGEKSRAKRSGSGATNFSLLKQAGDVEENPGPTSMDWIWRILFLVGAATGAHSGPQLQLQESGPGLVKPSETLSLTCTVSGDSISSGDYYWGWIRQPPGKGLEWIGHIYYSGVTYYNPSLKSRVTISVDTSRNQFSLKLSSVTAADTAVYYCTREDSSNWRSRGQGTLVTVSSGSGGGGSGGGGSGGGGSFELEMAQVQLVQSGAEVKKPGSSVKVSCKASGGTFSSYAISWVRQAPGQGLEWMGRIIPILGIANYAQKFQGRVTITADKSTSTAYMELSSLRSEDTAVYYCARGGYYSHDMWSEDWGQGTLVTVSSTRASTKGPSVFPLAPSSKSTSGGTAALGCLVKDYFPEPVTVSWNSGALTSGVHTFPAVLQSSGLYSLSSVVTVPSSSLGTQTYICNVNHKPSNTKVDKRVEPKSCEVKTDSTDHVKPKETENTKQPSKSCHKPKAIVHTEKVNMMSLTVLGLRMLFAKTVAVNFLLTAKLFFL

SEQ ID NO: 13807 - protein, 924 aa, Artificial Sequence
  Synthetic Polypeptide
MALPVTALLLPLALLLHAARPEVQLVESGGGLVQPGGSLRLSCAASGFSFSDFWMSWVRQAPGKGLEWVATISQAGSEKDYVDSVKGRFTISRDNAKKSLYLQMNSLRAEDTAVYYCASGVYSFDYRGQGTLVTVSSGTGGGGSGGGGSGGGGSEFDFVMTQSPDSLAVSLGERVTMSCKSSQSLLNSGNQKNYLTWYQQKPGQPPKLLIYWASTRESGVPDRFSGSGSGTDFTLTISSLQAEDVAVYYCQNDYSYPYTFGQGTKLEIKLEGQPKANPTVTLFPPSSEELQANKATLVCLISDFYPGAVTVAWKADGSPVKAGVETTKPSKQSNNKYAASSYLSLTPEQWKSHRSYSCQVTHEGSTVEKTVAPTECSPIKTDVITMDPKDNCSKDANDTLLLQLTNTSAYYMYLLLLLKSVVYFAIITCCLLRRTAFCCNGEKSRAKRSGSGATNFSLLKQAGDVEENPGPTSMDWIWRILFLVGAATGAHSGPQLQLQESGPGLVKPSETLSLTCTVSGDSISSGDYYWGWIRQPPGKGLEWIGHIYYSGVTYYNPSLKSRVTISVDTSRNQFSLKLSSVTAADTAVYYCTREDSSNWRSRGQGTLVTVSSGSGGGGSGGGGSGGGGSFEEVQLVQSGAELKKPGASVKVSCKASGYTFTDYYMKWVRQAPGQGLEWIGDIIPSNGATFYNQKFKGRVTITVDKSTSTAYMELSSLRSEDTAVYYCARSHLLRASWFAYWGQGTLVTVSSTRASTKGPSVFPLAPSSKSTSGGTAALGCLVKDYFPEPVTVSWNSGALTSGVHTFPAVLQSSGLYSLSSVVTVPSSSLGTQTYICNVNHKPSNTKVDKRVEPKSCEVKTDSTDHVKPKETENTKQPSKSCHKPKAIVHTEKVNMMSLTVLGLRMLFAKTVAVNFLLTAKLFFL

SEQ ID NO: 13808 - protein, 924 aa, Artificial Sequence
  Synthetic Polypeptide
MALPVTALLLPLALLLHAARPEVQLVESGGGLVQPGGSLRLSCAASGFSFSDFWMSWVRQAPGKGLEWVATISQAGSEKDYVDSVKGRFTISRDNAKKSLYLQMNSLRAEDTAVYYCASGVYSFDYRGQGTLVTVSSGTGGGGSGGGGSGGGGSEFDFVMTQSPDSLAVSLGERVTMSCKSSQSLLNSGNQKNYLTWYQQKPGQPPKLLIYWASTRESGVPDRFSGSGSGTDFTLTISSLQAEDVAVYYCQNDYSYPYTFGQGTKLEIKLEGQPKANPTVTLFPPSSEELQANKATLVCLISDFYPGAVTVAWKADGSPVKAGVETTKPSKQSNNKYAASSYLSLTPEQWKSHRSYSCQVTHEGSTVEKTVAPTECSPIKTDVITMDPKDNCSKDANDTLLLQLTNTSAYYMYLLLLLKSVVYFAIITCCLLRRTAFCCNGEKSRAKRSGSGATNFSLLKQAGDVEENPGPTSMDWIWRILFLVGAATGAHSGPQLQLQESGPGLVKPSETLSLTCTVSGDSISSGDYYWGWIRQPPGKGLEWIGHIYYSGVTYYNPSLKSRVTISVDTSRNQFSLKLSSVTAADTAVYYCTREDSSNWRSRGQGTLVTVSSGSGGGGSGGGGSGGGGSFEQVQLVQSGAELKKPGASVKVSCKASGYTFTDYYMKWVRQAPGQGLEWIGDIIPSNGATFYNQKFKGRVTITVDKSTSTAYMELSSLRSEDTAVYYCARSHLLRASWFAYWGQGTLVTVSSTRASTKGPSVFPLAPSSKSTSGGTAALGCLVKDYFPEPVTVSWNSGALTSGVHTFPAVLQSSGLYSLSSVVTVPSSSLGTQTYICNVNHKPSNTKVDKRVEPKSCEVKTDSTDHVKPKETENTKQPSKSCHKPKAIVHTEKVNMMSLTVLGLRMLFAKTVAVNFLLTAKLFFL

SEQ ID NO: 13809 - protein, 914 aa, Artificial Sequence
  Synthetic Polypeptide
MALPVTALLLPLALLLHAARPEVQLVESGGGLVQPGGSLRLSCAASGFSFSDFWMSWVRQAPGKGLEWVATISQAGSEKDYVDSVKGRFTISRDNAKKSLYLQMNSLRAEDTAVYYCASGVYSFDYRGQGTLVTVSSGTGGGGSGGGGSGGGGSEFDVQITQSPSYLAASPGETITINCRASKSISKDLAWYQEKPGKTNKLLIYSGSTLQSGIPSRFSGSGSGTDFTLTISSLEPEDFAMYYCQQHNKYPYTFGGGTKLEIKRLEGQPKANPTVTLFPPSSEELQANKATLVCLISDFYPGAVTVAWKADGSPVKAGVETTKPSKQSNNKYAASSYLSLTPEQWKSHRSYSCQVTHEGSTVEKTVAPTECSPIKTDVITMDPKDNCSKDANDTLLLQLTNTSAYYMYLLLLLKSVVYFAIITCCLLRRTAFCCNGEKSRAKRSGSGATNFSLLKQAGDVEENPGPTSMDWIWRILFLVGAATGAHSGPQLQLQESGPGLVKPSETLSLTCTVSGDSISSGDYYWGWIRQPPGKGLEWIGHIYYSGVTYYNPSLKSRVTISVDTSRNQFSLKLSSVTAADTAVYYCTREDSSNWRSRGQGTLVTVSSGSGGGGSGGGGSGGGGSFEQVQLQQPGAELVRPGASVKLSCKASGYTFTSYWMNWVKQRPDQGLEWIGRIDPYDSETHYNQKFKDKAILTVDKSSSTAYMQLSSLTSEDSAVYYCARGNWDDYWGQGTTLTVSSTRASTKGPSVFPLAPSSKSTSGGTAALGCLVKDYFPEPVTVSWNSGALTSGVHTFPAVLQSSGLYSLSSVVTVPSSSLGTQTYICNVNHKPSNTKVDKRVEPKSCEVKTDSTDHVKPKETENTKQPSKSCHKPKAIVHTEKVNMMSLTVLGLRMLFAKTVAVNFLLTAKLFFL

SEQ ID NO: 13810 - protein, 916 aa, Artificial Sequence
  Synthetic Polypeptide
MALPVTALLLPLALLLHAARPEVQLVESGGGLVQPGGSLRLSCAASGFSFSDFWMSWVRQAPGKGLEWVATISQAGSEKDYVDSVKGRFTISRDNAKKSLYLQMNSLRAEDTAVYYCASGVYSFDYRGQGTLVTVSSGTGGGGSGGGGSGGGGSEFEIVLTQSPTSMTASPGEQVTITCRASSSINYMHWYQQKPGASPRPWIYETSKLASGVPDRFSGSASGTSYSLTINNMEAEDAATYYCQQWNYPSWTFGGGTKLELKLEGQPKANPTVTLFPPSSEELQANKATLVCLISDFYPGAVTVAWKADGSPVKAGVETTKPSKQSNNKYAASSYLSLTPEQWKSHRSYSCQVTHEGSTVEKTVAPTECSPIKTDVITMDPKDNCSKDANDTLLLQLTNTSAYYMYLLLLLKSVVYFAIITCCLLRRTAFCCNGEKSRAKRSGSGATNFSLLKQAGDVEENPGPTSMDWIWRILFLVGAATGAHSGPQLQLQESGPGLVKPSETLSLTCTVSGDSISSGDYYWGWIRQPPGKGLEWIGHIYYSGVTYYNPSLKSRVTISVDTSRNQFSLKLSSVTAADTAVYYCTREDSSNWRSRGQGTLVTVSSGSGGGGSGGGGSGGGGSFEEVQLVESGGGLVQPGRSLKLSCAASGFTFSDYNMAWVRQAPKKGLEWVATILYDGGRTYYRGSVKGRFTISRDNAKSTLYLRMDSLRSEDTATYYCATHSRGTDYFDYWGQGVMVTVSSTRASTKGPSVFPLAPSSKSTSGGTAALGCLVKDYFPEPVTVSWNSGALTSGVHTFPAVLQSSGLYSLSSVVTVPSSSLGTQTYICNVNHKPSNTKVDKRVEPKSCEVKTDSTDHVKPKETENTKQPSKSCHKPKAIVHTEKVNMMSLTVLGLRMLFAKTVAVNFLLTAKLFFL

SEQ ID NO: 13811 - protein, 925 aa, Artificial Sequence
  Synthetic Polypeptide
MALPVTALLLPLALLLHAARPEVQLVESGGGLVQPGGSLRLSCAASGFSFSDFWMSWVRQAPGKGLEWVATISQAGSEKDYVDSVKGRFTISRDNAKKSLYLQMNSLRAEDTAVYYCASGVYSFDYRGQGTLVTVSSGTGGGGSGGGGSGGGGSEFDIVMTQSPSSLAVSEGETVTINCKSSQSFLSSGDGKNYVAWYQYKPGQSPKLLIYWASTRQSGVPDRFIGSGSGTDFTLTISTVQAEDLAIYYCQQYYDTPLTFGSGTKLEIKLEGQPKANPTVTLFPPSSEELQANKATLVCLISDFYPGAVTVAWKADGSPVKAGVETTKPSKQSNNKYAASSYLSLTPEQWKSHRSYSCQVTHEGSTVEKTVAPTECSPIKTDVITMDPKDNCSKDANDTLLLQLTNTSAYYMYLLLLLKSVVYFAIITCCLLRRTAFCCNGEKSRAKRSGSGATNFSLLKQAGDVEENPGPTSMDWIWRILFLVGAATGAHSGPQLQLQESGPGLVKPSETLSLTCTVSGDSISSGDYYWGWIRQPPGKGLEWIGHIYYSGVTYYNPSLKSRVTISVDTSRNQFSLKLSSVTAADTAVYYCTREDSSNWRSRGQGTLVTVSSGSGGGGSGGGGSGGGGSFEEVKLQESGPSLVQSSQTLSLTCTVSGFSLTSYHIHWVRQTPGKGLEWMGVMWSDGDTSYNSALKSRLSISRDTSQSQVFLKMNSLQTEDTATYYCARGYYSSYLYLWFAYWGQGTLVTVSSTRASTKGPSVFPLAPSSKSTSGGTAALGCLVKDYFPEPVTVSWNSGALTSGVHTFPAVLQSSGLYSLSSVVTVPSSSLGTQTYICNVNHKPSNTKVDKRVEPKSCEVKTDSTDHVKPKETENTKQPSKSCHKPKAIVHTEKVNMMSLTVLGLRMLFAKTVAVNFLLTAKLFFL

SEQ ID NO: 13812 - protein, 929 aa, Artificial Sequence
  Synthetic Polypeptide
MALPVTALLLPLALLLHAARPEVQLVESGGGLVQPGGSLRLSCAASGFSFSDFWMSWVRQAPGKGLEWVATISQAGSEKDYVDSVKGRFTISRDNAKKSLYLQMNSLRAEDTAVYYCASGVYSFDYRGQGTLVTVSSGTGGGGSGGGGSGGGGSEFDVLMTQTPVSLPVSLGGQVSISCRSSQSLVHSDGDTYLHWYLQKPGQSPQLLIYRVSNRFSGVPDRFSGSGSGTDFTLKISRVEPEDLGLYYCLQTTHFPPWTFGGGTKLEMKLEGQPKANPTVTLFPPSSEELQANKATLVCLISDFYPGAVTVAWKADGSPVKAGVETTKPSKQSNNKYAASSYLSLTPEQWKSHRSYSCQVTHEGSTVEKTVAPTECSPIKTDVITMDPKDNCSKDANDTLLLQLTNTSAYYMYLLLLLKSVVYFAIITCCLLRRTAFCCNGEKSRAKRSGSGATNFSLLKQAGDVEENPGPTSMDWIWRILFLVGAATGAHSGPQLQLQESGPGLVKPSETLSLTCTVSGDSISSGDYYWGWIRQPPGKGLEWIGHIYYSGVTYYNPSLKSRVTISVDTSRNQFSLKLSSVTAADTAVYYCTREDSSNWRSRGQGTLVTVSSGSGGGGSGGGGSGGGGSFEQVQLQQSGPELRRPGSSVRLSCKASGYRIKDFLIHWIKNRPEHGLEWIGWIDPEDGETKYAQKFQTKATLTADTSSNTAYMQLSSLTSEDTATYFCARWGDVYYGLMRGHVMDAWGQGTSVTVSSTRASTKGPSVFPLAPSSKSTSGGTAALGCLVKDYFPEPVTVSWNSGALTSGVHTFPAVLQSSGLYSLSSVVTVPSSSLGTQTYICNVNHKPSNTKVDKRVEPKSCEVKTDSTDHVKPKETENTKQPSKSCHKPKAIVHTEKVNMMSLTVLGLRMLFAKTVAVNFLLTAKLFFL

SEQ ID NO: 13813 - protein, 924 aa, Artificial Sequence
  Synthetic Polypeptide
MALPVTALLLPLALLLHAARPEVQLVESGGGLVQPGGSLRLSCAASGFSFSDFWMSWVRQAPGKGLEWVATISQAGSEKDYVDSVKGRFTISRDNAKKSLYLQMNSLRAEDTAVYYCASGVYSFDYRGQGTLVTVSSGTGGGGSGGGGSGGGGSEFDIVMTQSPATLSLSPGERATLSCRSSKSLQNVNGNTYLYWFQQKPGQSPQLLIYRMSNLNSGVPDRFSGSGSGTEFTLTISSLEPEDFAVYYCMQHLEYPITFGAGTKLEIKLEGQPKANPTVTLFPPSSEELQANKATLVCLISDFYPGAVTVAWKADGSPVKAGVETTKPSKQSNNKYAASSYLSLTPEQWKSHRSYSCQVTHEGSTVEKTVAPTECSPIKTDVITMDPKDNCSKDANDTLLLQLTNTSAYYMYLLLLLKSVVYFAIITCCLLRRTAFCCNGEKSRAKRSGSGATNFSLLKQAGDVEENPGPTSMDWIWRILFLVGAATGAHSGPQLQLQESGPGLVKPSETLSLTCTVSGDSISSGDYYWGWIRQPPGKGLEWIGHIYYSGVTYYNPSLKSRVTISVDTSRNQFSLKLSSVTAADTAVYYCTREDSSNWRSRGQGTLVTVSSGSGGGGSGGGGSGGGGSFEEVQLVESGGGLVKPGGSLKLSCAASGYTFTSYVMHWVRQAPGKGLEWIGYINPYNDGTKYNEKFQGRVTISSDKSISTAYMELSSLRSEDTAMYYCARGTYYYGTRVFDYWGQGTLVTVSSTRASTKGPSVFPLAPSSKSTSGGTAALGCLVKDYFPEPVTVSWNSGALTSGVHTFPAVLQSSGLYSLSSVVTVPSSSLGTQTYICNVNHKPSNTKVDKRVEPKSCEVKTDSTDHVKPKETENTKQPSKSCHKPKAIVHTEKVNMMSLTVLGLRMLFAKTVAVNFLLTAKLFFL

SEQ ID NO: 13814 - protein, 920 aa, Artificial Sequence
  Synthetic Polypeptide
MALPVTALLLPLALLLHAARPEVQLVESGGGLVQPGGSLRLSCAASGFSFSDFWMSWVRQAPGKGLEWVATISQAGSEKDYVDSVKGRFTISRDNAKKSLYLQMNSLRAEDTAVYYCASGVYSFDYRGQGTLVTVSSGTGGGGSGGGGSGGGGSEFDIQMTQSPSSLSASVGDRVTITCKASDHINNWLAWYQQKPGQAPKLLIYGATTLETGVPSRFSGSGSGTDYTLTISSLQPEDFATYYCQQSWNTPWTFGQGTKLEIKRLEGQPKANPTVTLFPPSSEELQANKATLVCLISDFYPGAVTVAWKADGSPVKAGVETTKPSKQSNNKYAASSYLSLTPEQWKSHRSYSCQVTHEGSTVEKTVAPTECSPIKTDVITMDPKDNCSKDANDTLLLQLTNTSAYYMYLLLLLKSVVYFAIITCCLLRRTAFCCNGEKSRAKRSGSGATNFSLLKQAGDVEENPGPTSMDWIWRILFLVGAATGAHSGPQLQLQESGPGLVKPSETLSLTCTVSGDSISSGDYYWGWIRQPPGKGLEWIGHIYYSGVTYYNPSLKSRVTISVDTSRNQFSLKLSSVTAADTAVYYCTREDSSNWRSRGQGTLVTVSSGSGGGGSGGGGSGGGGSFEQVQLQQPGAELVKPGASVKMSCKASGYAFSSYWINWMKQKPGQGLEWIGQIYPGDGDTNYNGKFKGRATLTADTSSSTAYMQLSSLTSEDSAVYFCARSITTVVGCAMDYWGQGTSVTVSSTRASTKGPSVFPLAPSSKSTSGGTAALGCLVKDYFPEPVTVSWNSGALTSGVHTFPAVLQSSGLYSLSSVVTVPSSSLGTQTYICNVNHKPSNTKVDKRVEPKSCEVKTDSTDHVKPKETENTKQPSKSCHKPKAIVHTEKVNMMSLTVLGLRMLFAKTVAVNFLLTAKLFFL

SEQ ID NO: 13815 - protein, 922 aa, Artificial Sequence
  Synthetic Polypeptide
MALPVTALLLPLALLLHAARPEVQLVESGGGLVQPGGSLRLSCAASGFSFSDFWMSWVRQAPGKGLEWVATISQAGSEKDYVDSVKGRFTISRDNAKKSLYLQMNSLRAEDTAVYYCASGVYSFDYRGQGTLVTVSSGTGGGGSGGGGSGGGGSEFQIVLSQSPAILSASPGEKVTMTCRASSSVSYMHWYQQKPGSSPKPWIYATSNLASGVPARFSGSGSGTSYSFTISRVEAEDAATYYCQQWTFNPPTFGGGTRLEIKRTVAALEGQPKANPTVTLFPPSSEELQANKATLVCLISDFYPGAVTVAWKADGSPVKAGVETTKPSKQSNNKYAASSYLSLTPEQWKSHRSYSCQVTHEGSTVEKTVAPTECSPIKTDVITMDPKDNCSKDANDTLLLQLTNTSAYYMYLLLLLKSVVYFAIITCCLLRRTAFCCNGEKSRAKRSGSGATNFSLLKQAGDVEENPGPTSMDWIWRILFLVGAATGAHSGPQLQLQESGPGLVKPSETLSLTCTVSGDSISSGDYYWGWIRQPPGKGLEWIGHIYYSGVTYYNPSLKSRVTISVDTSRNQFSLKLSSVTAADTAVYYCTREDSSNWRSRGQGTLVTVSSGSGGGGSGGGGSGGGGSFEQAYLQQSGAELVRPGASVKMSCKASGYTFTSYNMHWVKQTPRQGLEWIGGIYPGNGDTSYNQKFKGKATLTVGKSSSTAYMQLSSLTSEDSAVYFCARYDYNYAMDYWGQGTSVTVSSASTRASTKGPSVFPLAPSSKSTSGGTAALGCLVKDYFPEPVTVSWNSGALTSGVHTFPAVLQSSGLYSLSSVVTVPSSSLGTQTYICNVNHKPSNTKVDKRVEPKSCEVKTDSTDHVKPKETENTKQPSKSCHKPKAIVHTEKVNMMSLTVLGLRMLFAKTVAVNFLLTAKLFFL

SEQ ID NO: 13816 - protein, 920 aa, Artificial Sequence
  Synthetic Polypeptide
MALPVTALLLPLALLLHAARPEVQLVESGGGLVQPGGSLRLSCAASGFSFSDFWMSWVRQAPGKGLEWVATISQAGSEKDYVDSVKGRFTISRDNAKKSLYLQMNSLRAEDTAVYYCASGVYSFDYRGQGTLVTVSSGTGGGGSGGGGSGGGGSEFEIVLTQSPATLSLSPGERATLSCRASQSVSSYLAWYQQKPGQAPRLLIYDASNRATGIPARFSGSGSGTDFTLTISSLEPEDFAVYYCQQRSNWPITFGQGTRLEIKLEGQPKANPTVTLFPPSSEELQANKATLVCLISDFYPGAVTVAWKADGSPVKAGVETTKPSKQSNNKYAASSYLSLTPEQWKSHRSYSCQVTHEGSTVEKTVAPTECSPIKTDVITMDPKDNCSKDANDTLLLQLTNTSAYYMYLLLLLKSVVYFAIITCCLLRRTAFCCNGEKSRAKRSGSGATNFSLLKQAGDVEENPGPTSMDWIWRILFLVGAATGAHSGPQLQLQESGPGLVKPSETLSLTCTVSGDSISSGDYYWGWIRQPPGKGLEWIGHIYYSGVTYYNPSLKSRVTISVDTSRNQFSLKLSSVTAADTAVYYCTREDSSNWRSRGQGTLVTVSSGSGGGGSGGGGSGGGGSFEEVQLVESGGGLVQPDRSLRLSCAASGFTFHDYAMHWVRQAPGKGLEWVSTISWNSGTIGYADSVKGRFTISRDNAKNSLYLQMNSLRAEDTALYYCAKDIQYGNYYYGMDVWGQGTTVTVSSTRASTKGPSVFPLAPSSKSTSGGTAALGCLVKDYFPEPVTVSWNSGALTSGVHTFPAVLQSSGLYSLSSVVTVPSSSLGTQTYICNVNHKPSNTKVDKRVEPKSCEVKTDSTDHVKPKETENTKQPSKSCHKPKAIVHTEKVNMMSLTVLGLRMLFAKTVAVNFLLTAKLFFL

SEQ ID NO: 13817 - protein, 915 aa, Artificial Sequence
  Synthetic Polypeptide
MALPVTALLLPLALLLHAARPEVQLVESGGGLVQPGGSLRLSCAASGFSFSDFWMSWVRQAPGKGLEWVATISQAGSEKDYVDSVKGRFTISRDNAKKSLYLQMNSLRAEDTAVYYCASGVYSFDYRGQGTLVTVSSGTGGGGSGGGGSGGGGSEFDIQMTQSPSSLSASVGDRVTINCKASQDINSYLSWFQQKPGKAPKTLIYRANRLVDGVPSRFSGSGSGQDYTLTISSLQPEDFATYYCLQYDEFPLTFGGGTKVEIKLEGQPKANPTVTLFPPSSEELQANKATLVCLISDFYPGAVTVAWKADGSPVKAGVETTKPSKQSNNKYAASSYLSLTPEQWKSHRSYSCQVTHEGSTVEKTVAPTECSPIKTDVITMDPKDNCSKDANDTLLLQLTNTSAYYMYLLLLLKSVVYFAIITCCLLRRTAFCCNGEKSRAKRSGSGATNFSLLKQAGDVEENPGPTSMDWIWRILFLVGAATGAHSGPQLQLQESGPGLVKPSETLSLTCTVSGDSISSGDYYWGWIRQPPGKGLEWIGHIYYSGVTYYNPSLKSRVTISVDTSRNQFSLKLSSVTAADTAVYYCTREDSSNWRSRGQGTLVTVSSGSGGGGSGGGGSGGGGSFEQVQLVQSGAEVKKPGASVKVSCKASGYTFTNYDINWVRQAPGQGLEWIGWIYPGDGSTKYNEKFKAKATLTADTSTSTAYMELRSLRSDDTAVYYCASGYEDAMDYWGQGTTVTVSSTRASTKGPSVFPLAPSSKSTSGGTAALGCLVKDYFPEPVTVSWNSGALTSGVHTFPAVLQSSGLYSLSSVVTVPSSSLGTQTYICNVNHKPSNTKVDKRVEPKSCEVKTDSTDHVKPKETENTKQPSKSCHKPKAIVHTEKVNMMSLTVLGLRMLFAKTVAVNFLLTAKLFFL

SEQ ID NO: 13818 - protein, 917 aa, Artificial Sequence
  Synthetic Polypeptide
MALPVTALLLPLALLLHAARPEVQLVESGGGLVQPGGSLRLSCAASGFSFSDFWMSWVRQAPGKGLEWVATISQAGSEKDYVDSVKGRFTISRDNAKKSLYLQMNSLRAEDTAVYYCASGVYSFDYRGQGTLVTVSSGTGGGGSGGGGSGGGGSEFDIVMTQTPLSLSVTPGQPASISCKSSQSLLDGDGKTYLNWLLQKPGQSPQRLIYLVSKLDSGVPDRFSGSGSGTDFTLKISRVEAEDVGVYYCWQGTHFPRTFGQGTKLEIKLEGQPKANPTVTLFPPSSEELQANKATLVCLISDFYPGAVTVAWKADGSPVKAGVETTKPSKQSNNKYAASSYLSLTPEQWKSHRSYSCQVTHEGSTVEKTVAPTECSPIKTDVITMDPKDNCSKDANDTLLLQLTNTSAYYMYLLLLLKSVVYFAIITCCLLRRTAFCCNGEKSRAKRSGSGATNFSLLKQAGDVEENPGPTSMDWIWRILFLVGAATGAHSGPQLQLQESGPGLVKPSETLSLTCTVSGDSISSGDYYWGWIRQPPGKGLEWIGHIYYSGVTYYNPSLKSRVTISVDTSRNQFSLKLSSVTAADTAVYYCTREDSSNWRSRGQGTLVTVSSGSGGGGSGGGGSGGGGSFEQVQLVQSGAEVKKPGASVKVSCKASGYTFKDTYIHWVRQAPGQGLEWMGRIDPANGNTKYDPKFQGRVTMTRDTSISTAYMELSRLRSDDTAVYYCARRGGVDWGQGTLVTVSSTRASTKGPSVFPLAPSSKSTSGGTAALGCLVKDYFPEPVTVSWNSGALTSGVHTFPAVLQSSGLYSLSSVVTVPSSSLGTQTYICNVNHKPSNTKVDKRVEPKSCEVKTDSTDHVKPKETENTKQPSKSCHKPKAIVHTEKVNMMSLTVLGLRMLFAKTVAVNFLLTAKLFFL

SEQ ID NO: 13819 - protein, 918 aa, Artificial Sequence
  Synthetic Polypeptide
MALPVTALLLPLALLLHAARPEVQLVESGGGLVQPGGSLRLSCAASGFSFSDFWMSWVRQAPGKGLEWVATISQAGSEKDYVDSVKGRFTISRDNAKKSLYLQMNSLRAEDTAVYYCASGVYSFDYRGQGTLVTVSSGTGGGGSGGGGSGGGGSEFDIQMTQSPSSLSASVGDRVTITCKASQDVSTAVAWFQQKPGKAPKLLIYSPSYRYTGVPSRFSGSGSGTDFTLTISSLQPEDFTYYCQQLYSTPYTFGQGTKVEIKLEGQPKANPTVTLFPPSSEELQANKATLVCLISDFYPGAVTVAWKADGSPVKAGVETTKPSKQSNNKYAASSYLSLTPEQWKSHRSYSCQVTHEGSTVEKTVAPTECSPIKTDVITMDPKDNCSKDANDTLLLQLTNTSAYYMYLLLLLKSVVYFAIITCCLLRRTAFCCNGEKSRAKRSGSGATNFSLLKQAGDVEENPGPTSMDWIWRILFLVGAATGAHSGPQLQLQESGPGLVKPSETLSLTCTVSGDSISSGDYYWGWIRQPPGKGLEWIGHIYYSGVTYYNPSLKSRVTISVDTSRNQFSLKLSSVTAADTAVYYCTREDSSNWRSRGQGTLVTVSSGSGGGGSGGGGSGGGGSFEEVQLVQSGAEVKKPGASVKVSCKASGYTFTDYYLDVVVRQAPGQGLEWIGRVNPYNGGTIYNQKFKGRVTLTRDTSTSTAYLELSSLRSEDTAVYYCARDHYRYDPLLDYWGQGTLVTVSSTRASTKGPSVFPLAPSSKSTSGGTAALGCLVKDYFPEPVTVSWNSGALTSGVHTFPAVLQSSGLYSLSSVVTVPSSSLGTQTYICNVNHKPSNTKVDKRVEPKSCEVKTDSTDHVKPKETENTKQPSKSCHKPKAIVHTEKVNMMSLTVLGLRMLFAKTVAVNFLLTAKLFFL

SEQ ID NO: 13820 - protein, 924 aa, Artificial Sequence
  Synthetic Polypeptide
MALPVTALLLPLALLLHAARPEVQLVESGGGLVQPGGSLRLSCAASGFSFSDFWMSWVRQAPGKGLEWVATISQAGSEKDYVDSVKGRFTISRDNAKKSLYLQMNSLRAEDTAVYYCASGVYSFDYRGQGTLVTVSSGTGGGGSGGGGSGGGGSEFDIQMTQSPSSLSASVGDRVTITCRASQSVSTSSYNYMHWYQQKPGKPPKLLIKYASNLESGVPSRFSGSGSGTDFTLTISSLQPEDFATYYCQHSWEIPLTFGQGTKVEIKLEGQPKANPTVTLFPPSSEELQANKATLVCLISDFYPGAVTVAWKADGSPVKAGVETTKPSKQSNNKYAASSYLSLTPEQWKSHRSYSCQVTHEGSTVEKTVAPTECSPIKTDVITMDPKDNCSKDANDTLLLQLTNTSAYYMYLLLLLKSVVYFAIITCCLLRRTAFCCNGEKSRAKRSGSGATNFSLLKQAGDVEENPGPTSMDWIWRILFLVGAATGAHSGPQLQLQESGPGLVKPSETLSLTCTVSGDSISSGDYYWGWIRQPPGKGLEWIGHIYYSGVTYYNPSLKSRVTISVDTSRNQFSLKLSSVTAADTAVYYCTREDSSNWRSRGQGTLVTVSSGSGGGGSGGGGSGGGGSFEEVQLVQSGAEVKKPGASVKVSCKASGYSFTDYYMHWVRQAPGQGLEWIGRINPYNGAAFYSQNFKDRVTLTVDTSTSTAYLELSSLRSEDTAVYYCAIERGADLEGYAMDYWGQGTLVTVSSTRASTKGPSVFPLAPSSKSTSGGTAALGCLVKDYFPEPVTVSWNSGALTSGVHTFPAVLQSSGLYSLSSVVTVPSSSLGTQTYICNVNHKPSNTKVDKRVEPKSCEVKTDSTDHVKPKETENTKQPSKSCHKPKAIVHTEKVNMMSLTVLGLRMLFAKTVAVNFLLTAKLFFL

SEQ ID NO: 13821 - protein, 922 aa, Artificial Sequence
  Synthetic Polypeptide
MALPVTALLLPLALLLHAARPEVQLVESGGGLVQPGGSLRLSCAASGFSFSDFWMSWVRQAPGKGLEWVATISQAGSEKDYVDSVKGRFTISRDNAKKSLYLQMNSLRAEDTAVYYCASGVYSFDYRGQGTLVTVSSGTGGGGSGGGGSGGGGSEFEIVLTQSPATLSASPGERVTLTCRASSNVISSYVHWYQQKPGSSPRLFLYSTSNLASGVPSRFSGSGSGTDFTFTISSLEAEDAATYYCQQYSGYPLTFGQGTRLEIKLEGQPKANPTVTLFPPSSEELQANKATLVCLISDFYPGAVTVAWKADGSPVKAGVETTKPSKQSNNKYAASSYLSLTPEQWKSHRSYSCQVTHEGSTVEKTVAPTECSPIKTDVITMDPKDNCSKDANDTLLLQLTNTSAYYMYLLLLLKSVVYFAIITCCLLRRTAFCCNGEKSRAKRSGSGATNFSLLKQAGDVEENPGPTSMDWIWRILFLVGAATGAHSGPQLQLQESGPGLVKPSETLSLTCTVSGDSISSGDYYWGWIRQPPGKGLEWIGHIYYSGVTYYNPSLKSRVTISVDTSRNQFSLKLSSVTAADTAVYYCTREDSSNWRSRGQGTLVTVSSGSGGGGSGGGGSGGGGSFEQVQLQESGPGLVKPSETLSLTCAVSGYSITSAYYWNWIRQPPGKGLEWIGYISYDGRNNYNPSLKNRITINPDTSKNQFSLQLNSVTPEDTAVYYCAREGDYDVGNYYAMDYWGQGTLVTVSSTRASTKGPSVFPLAPSSKSTSGGTAALGCLVKDYFPEPVTVSWNSGALTSGVHTFPAVLQSSGLYSLSSVVTVPSSSLGTQTYICNVNHKPSNTKVDKRVEPKSCEVKTDSTDHVKPKETENTKQPSKSCHKPKAIVHTEKVNMMSLTVLGLRMLFAKTVAVNFLLTAKLFFL

SEQ ID NO: 13822 - protein, 922 aa, Artificial Sequence
  Synthetic Polypeptide
MALPVTALLLPLALLLHAARPEVQLVESGGGLVQPGGSLRLSCAASGFSFSDFWMSWVRQAPGKGLEWVATISQAGSEKDYVDSVKGRFTISRDNAKKSLYLQMNSLRAEDTAVYYCASGVYSFDYRGQGTLVTVSSGTGGGGSGGGGSGGGGSEFEIVLTQSPATLSLSPGERATLSCRASSNVISSYVHWYQQKPGQAPRLLIYSTSNLASGIPARFSGSGSGTDFTLTISSLEPEDFAVYYCQQYSGYPLTFGQGTRLEIKLEGQPKANPTVTLFPPSSEELQANKATLVCLISDFYPGAVTVAWKADGSPVKAGVETTKPSKQSNNKYAASSYLSLTPEQWKSHRSYSCQVTHEGSTVEKTVAPTECSPIKTDVITMDPKDNCSKDANDTLLLQLTNTSAYYMYLLLLLKSVVYFAIITCCLLRRTAFCCNGEKSRAKRSGSGATNFSLLKQAGDVEENPGPTSMDWIWRILFLVGAATGAHSGPQLQLQESGPGLVKPSETLSLTCTVSGDSISSGDYYWGWIRQPPGKGLEWIGHIYYSGVTYYNPSLKSRVTISVDTSRNQFSLKLSSVTAADTAVYYCTREDSSNWRSRGQGTLVTVSSGSGGGGSGGGGSGGGGSFEEVQLVESGGGLVQPGRSLRLSCAASGYSITSAYYWNWVRQAPGKGLEWVSYISYDGRNNYNPSLKNRFTISRDNAKKSLYLQMNSLRAEDTALYYCAKEGDYDVGNYYAMDYWGQGTTVTVSSTRASTKGPSVFPLAPSSKSTSGGTAALGCLVKDYFPEPVTVSWNSGALTSGVHTFPAVLQSSGLYSLSSVVTVPSSSLGTQTYICNVNHKPSNTKVDKRVEPKSCEVKTDSTDHVKPKETENTKQPSKSCHKPKAIVHTEKVNMMSLTVLGLRMLFAKTVAVNFLLTAKLFFL

SEQ ID NO: 13823 - protein, 921 aa, Artificial Sequence
  Synthetic Polypeptide
MALPVTALLLPLALLLHAARPEVQLVESGGGLVQPGGSLRLSCAASGFSFSDFWMSWVRQAPGKGLEWVATISQAGSEKDYVDSVKGRFTISRDNAKKSLYLQMNSLRAEDTAVYYCASGVYSFDYRGQGTLVTVSSGTGGGGSGGGGSGGGGSEFDVVMTQTPLSLPVSLGDQASISCRSSQSLVHSNGNTYLRWYLQKPGQSPKVLIYKVSNRVSGVPDRFSGSGSGTDFTLKINRVEAEDLGVYFCSQSTHVPWTFGGGTKLEIKLEGQPKANPTVTLFPPSSEELQANKATLVCLISDFYPGAVTVAWKADGSPVKAGVETTKPSKQSNNKYAASSYLSLTPEQWKSHRSYSCQVTHEGSTVEKTVAPTECSPIKTDVITMDPKDNCSKDANDTLLLQLTNTSAYYMYLLLLLKSVVYFAIITCCLLRRTAFCCNGEKSRAKRSGSGATNFSLLKQAGDVEENPGPTSMDWIWRILFLVGAATGAHSGPQLQLQESGPGLVKPSETLSLTCTVSGDSISSGDYYWGWIRQPPGKGLEWIGHIYYSGVTYYNPSLKSRVTISVDTSRNQFSLKLSSVTAADTAVYYCTREDSSNWRSRGQGTLVTVSSGSGGGGSGGGGSGGGGSFEGVKLDETGGGLVQPGGAMKLSCVTSGFTFGHYWMNWVRQSPEKGLEWVAQFRNKPYNYETYYSDSVKGRFTISRDDSKSSVYLQMNNLRVEDTGIYYCTGASYGMEYLGQGTSVTVSTTRASTKGPSVFPLAPSSKSTSGGTAALGCLVKDYFPEPVTVSWNSGALTSGVHTFPAVLQSSGLYSLSSVVTVPSSSLGTQTYICNVNHKPSNTKVDKRVEPKSCEVKTDSTDHVKPKETENTKQPSKSCHKPKAIVHTEKVNMMSLTVLGLRMLFAKTVAVNFLLTAKLFFL

SEQ ID NO: 13824 - protein, 927 aa, Artificial Sequence
  Synthetic Polypeptide
MALPVTALLLPLALLLHAARPEVQLVESGGGLVQPGGSLRLSCAASGFSFSDFWMSWVRQAPGKGLEWVATISQAGSEKDYVDSVKGRFTISRDNAKKSLYLQMNSLRAEDTAVYYCASGVYSFDYRGQGTLVTVSSGTGGGGSGGGGSGGGGSEFQVQLVESGGNLVQPGGSLRLSCAASGFTFGSFSMSWVRQAPGGGLEWVAGLSARSSLTHYADSVKGRFTISRDNAKNSVYLQMNSLRVEDTAVYYCARRSYDSSGYWGHFYSYMDVWGQGTLVTVSLEGQPKANPTVTLFPPSSEELQANKATLVCLISDFYPGAVTVAWKADGSPVKAGVETTKPSKQSNNKYAASSYLSLTPEQWKSHRSYSCQVTHEGSTVEKTVAPTECSPIKTDVITMDPKDNCSKDANDTLLLQLTNTSAYYMYLLLLLKSVVYFAIITCCLLRRTAFCCNGEKSRAKRSGSGATNFSLLKQAGDVEENPGPTSMDWIWRILFLVGAATGAHSGPQLQLQESGPGLVKPSETLSLTCTVSGDSISSGDYYWGWIRQPPGKGLEWIGHIYYSGVTYYNPSLKSRVTISVDTSRNQFSLKLSSVTAADTAVYYCTREDSSNWRSRGQGTLVTVSSGSGGGGSGGGGSGGGGSFESVLTQPSSVSAAPGQKVTISCSGSTSNIGNNYVSWYQQHPGKAPKLMIYDVSKRPSGVPDRFSGSKSGNSASLDISGLQSEDEADYYCAAWDDSLSEFLFGTGTKLTVLGTRASTKGPSVFPLAPSSKSTSGGTAALGCLVKDYFPEPVTVSWNSGALTSGVHTFPAVLQSSGLYSLSSVVTVPSSSLGTQTYICNVNHKPSNTKVDKRVEPKSCEVKTDSTDHVKPKETENTKQPSKSCHKPKAIVHTEKVNMMSLTVLGLRMLFAKTVAVNFLLTAKLFFL

SEQ ID NO: 13825 - protein, 922 aa, Artificial Sequence
  Synthetic Polypeptide
MALPVTALLLPLALLLHAARPEVQLVESGGGLVQPGGSLRLSCAASGFSFSDFWMSWVRQAPGKGLEWVATISQAGSEKDYVDSVKGRFTISRDNAKKSLYLQMNSLRAEDTAVYYCASGVYSFDYRGQGTLVTVSSGTGGGGSGGGGSGGGGSEFDVVMTQSPSSLSASVGDRVTITCQSSLDISHYLNWYQQKPGKAPKLLIYDASNLETGVPSRFSGSGSGTHFTFTISSLQPEDFATYYCQQYDNLPLTFGGGTKLEIKRLEGQPKANPTVTLFPPSSEELQANKATLVCLISDFYPGAVTVAWKADGSPVKAGVETTKPSKQSNNKYAASSYLSLTPEQWKSHRSYSCQVTHEGSTVEKTVAPTECSPIKTDVITMDPKDNCSKDANDTLLLQLTNTSAYYMYLLLLLKSVVYFAIITCCLLRRTAFCCNGEKSRAKRSGSGATNFSLLKQAGDVEENPGPTSMDWIWRILFLVGAATGAHSGPQLQLQESGPGLVKPSETLSLTCTVSGDSISSGDYYWGWIRQPPGKGLEWIGHIYYSGVTYYNPSLKSRVTISVDTSRNQFSLKLSSVTAADTAVYYCTREDSSNWRSRGQGTLVTVSSGSGGGGSGGGGSGGGGSFEQVQLVQSGGGVVQPGGSLRVSCAASGVTLSDYGMHWVRQAPGKGLEWVAFIRNDGSDKYYADSVKGRFTISRDNSEKTVSLQMSSLRAEDTAVYYCAKNGESGPLDYWYLDLWGRGTLVTVSSTRASTKGPSVFPLAPSSKSTSGGTAALGCLVKDYFPEPVTVSWNSGALTSGVHTFPAVLQSSGLYSLSSVVTVPSSSLGTQTYICNVNHKPSNTKVDKRVEPKSCEVKTDSTDHVKPKETENTKQPSKSCHKPKAIVHTEKVNMMSLTVLGLRMLFAKTVAVNFLLTAKLFFL

SEQ ID NO: 13826 - protein, 926 aa, Artificial Sequence
  Synthetic Polypeptide
MALPVTALLLPLALLLHAARPEVQLVESGGGLVQPGGSLRLSCAASGFSFSDFWMSWVRQAPGKGLEWVATISQAGSEKDYVDSVKGRFTISRDNAKKSLYLQMNSLRAEDTAVYYCASGVYSFDYRGQGTLVTVSSGTGGGGSGGGGSGGGGSEFSYELTQPPSVSGTPGQRVAISCSGSSSNIGTRMVTWYQHVPGTAPKLLIFNNNQRPSGVPDRFSASKSGTSASLAIIGLQSDDEADYYCATWDDNVKSYVFGTGTKVTVLGSRLEGQPKANPTVTLFPPSSEELQANKATLVCLISDFYPGAVTVAWKADGSPVKAGVETTKPSKQSNNKYAASSYLSLTPEQWKSHRSYSCQVTHEGSTVEKTVAPTECSPIKTDVITMDPKDNCSKDANDTLLLQLTNTSAYYMYLLLLLKSVVYFAIITCCLLRRTAFCCNGEKSRAKRSGSGATNFSLLKQAGDVEENPGPTSMDWIWRILFLVGAATGAHSGPQLQLQESGPGLVKPSETLSLTCTVSGDSISSGDYYWGWIRQPPGKGLEWIGHIYYSGVTYYNPSLKSRVTISVDTSRNQFSLKLSSVTAADTAVYYCTREDSSNWRSRGQGTLVTVSSGSGGGGSGGGGSGGGGSFELEMAQVQLQQWGAGLLKPSETLSLTCAVYGGSFSGYYWSWIRQPPGKGLEWIGEINHSGSTNYNPSLKSRVTISVDTSKNQFSLKLSSVTAADTAVYYCARAPQSWYVGDVWGQGTLVTVSSTRASTKGPSVFPLAPSSKSTSGGTAALGCLVKDYFPEPVTVSWNSGALTSGVHTFPAVLQSSGLYSLSSVVTVPSSSLGTQTYICNVNHKPSNTKVDKRVEPKSCEVKTDSTDHVKPKETENTKQPSKSCHKPKAIVHTEKVNMMSLTVLGLRMLFAKTVAVNFLLTAKLFFL

SEQ ID NO: 13827 - protein, 923 aa, Artificial Sequence
  Synthetic Polypeptide
MALPVTALLLPLALLLHAARPEVQLVESGGGLVQPGGSLRLSCAASGFSFSDFWMSWVRQAPGKGLEWVATISQAGSEKDYVDSVKGRFTISRDNAKKSLYLQMNSLRAEDTAVYYCASGVYSFDYRGQGTLVTVSSGTGGGGSGGGGSGGGGSEFQSVLTQPPSLSVAPGKTASITCGGNNIGMKSVHWYQQRPGQAPVLVIYYDSDRPSGIPGRFSGSNSGNTATLTISRVEAGDEADYYCQVWDTTGDHPGYVFGTGTKVTVLLEGQPKANPTVTLFPPSSEELQANKATLVCLISDFYPGAVTVAWKADGSPVKAGVETTKPSKQSNNKYAASSYLSLTPEQWKSHRSYSCQVTHEGSTVEKTVAPTECSPIKTDVITMDPKDNCSKDANDTLLLQLTNTSAYYMYLLLLLKSVVYFAIITCCLLRRTAFCCNGEKSRAKRSGSGATNFSLLKQAGDVEENPGPTSMDWIWRILFLVGAATGAHSGPQLQLQESGPGLVKPSETLSLTCTVSGDSISSGDYYWGWIRQPPGKGLEWIGHIYYSGVTYYNPSLKSRVTISVDTSRNQFSLKLSSVTAADTAVYYCTREDSSNWRSRGQGTLVTVSSGSGGGGSGGGGSGGGGSFEQVQLVQSGAEVKKPGSSVKVSCKASGGTFSSYAISWVRQAPGQGLEWMGGIIPIFGTANYAQKFQGRVTITADESTSTAYMELSSLRSEDTAVYYCARGVYGYSGSAPYDEWGQGTLVTVSSTRASTKGPSVFPLAPSSKSTSGGTAALGCLVKDYFPEPVTVSWNSGALTSGVHTFPAVLQSSGLYSLSSVVTVPSSSLGTQTYICNVNHKPSNTKVDKRVEPKSCEVKTDSTDHVKPKETENTKQPSKSCHKPKAIVHTEKVNMMSLTVLGLRMLFAKTVAVNFLLTAKLFFL

SEQ ID NO: 13828 - protein, 921 aa, Artificial Sequence
  Synthetic Polypeptide
MALPVTALLLPLALLLHAARPEVQLVESGGGLVQPGGSLRLSCAASGFSFSDFWMSWVRQAPGKGLEWVATISQAGSEKDYVDSVKGRFTISRDNAKKSLYLQMNSLRAEDTAVYYCASGVYSFDYRGQGTLVTVSSGTGGGGSGGGGSGGGGSEFEVQLVESGGGLVQPGRSLRLSCAASGFTFDDYAMHWVRQAPGKGLEWVSGISWNSGSIGYADSVKGRFTISRDNAKNSLYLQMNSLRAEDTALYYCAKDKGGGYYDFWSGSDYWGQGTLVTVSSLEGQPKANPTVTLFPPSSEELQANKATLVCLISDFYPGAVTVAWKADGSPVKAGVETTKPSKQSNNKYAASSYLSLTPEQWKSHRSYSCQVTHEGSTVEKTVAPTECSPIKTDVITMDPKDNCSKDANDTLLLQLTNTSAYYMYLLLLLKSVVYFAIITCCLLRRTAFCCNGEKSRAKRSGSGATNFSLLKQAGDVEENPGPTSMDWIWRILFLVGAATGAHSGPQLQLQESGPGLVKPSETLSLTCTVSGDSISSGDYYWGWIRQPPGKGLEWIGHIYYSGVTYYNPSLKSRVTISVDTSRNQFSLKLSSVTAADTAVYYCTREDSSNWRSRGQGTLVTVSSGSGGGGSGGGGSGGGGSFESSELTQDPAVSVALGQTVRITCQGDSLRSYYASWYQQKPGQAPVLVIYGKNNRPSGIPDRFSGSSSGNTASLTITGAQAEDEADYYCNSRDSSGWVFGGGTKLTVLTRASTKGPSVFPLAPSSKSTSGGTAALGCLVKDYFPEPVTVSWNSGALTSGVHTFPAVLQSSGLYSLSSVVTVPSSSLGTQTYICNVNHKPSNTKVDKRVEPKSCEVKTDSTDHVKPKETENTKQPSKSCHKPKAIVHTEKVNMMSLTVLGLRMLFAKTVAVNFLLTAKLFFL

SEQ ID NO: 13829 - protein, 930 aa, Artificial Sequence
  Synthetic Polypeptide
MALPVTALLLPLALLLHAARPEVQLVESGGGLVQPGGSLRLSCAASGFSFSDFWMSWVRQAPGKGLEWVATISQAGSEKDYVDSVKGRFTISRDNAKKSLYLQMNSLRAEDTAVYYCASGVYSFDYRGQGTLVTVSSGTGGGGSGGGGSGGGGSEFEVQLQQSGPGLVKPSQTLSLTCAISGDSVLSNSDTWNWIRQSPSRGLEWLGRTYHRSTWYDDYASSVRGRVSINVDTSKNQYSLQLNAVTPEDTGVYYCARDRLQDGNSWSDAFDVWGQGTMVTVSSLEGQPKANPTVTLFPPSSEELQANKATLVCLISDFYPGAVTVAWKADGSPVKAGVETTKPSKQSNNKYAASSYLSLTPEQWKSHRSYSCQVTHEGSTVEKTVAPTECSPIKTDVITMDPKDNCSKDANDTLLLQLTNTSAYYMYLLLLLKSVVYFAIITCCLLRRTAFCCNGEKSRAKRSGSGATNFSLLKQAGDVEENPGPTSMDWIWRILFLVGAATGAHSGPQLQLQESGPGLVKPSETLSLTCTVSGDSISSGDYYWGWIRQPPGKGLEWIGHIYYSGVTYYNPSLKSRVTISVDTSRNQFSLKLSSVTAADTAVYYCTREDSSNWRSRGQGTLVTVSSGSGGGGSGGGGSGGGGSFEQSALTQPASVSGSPGQSITISCTGTSSDVGGYNYVSWYQQHPGKAPKLMIYDVSNRPSGVSNRFSGSKSGNTASLTISGLQAEDEADYYCSSYTSSSTLVYVFGTGTKVTVLTRASTKGPSVFPLAPSSKSTSGGTAALGCLVKDYFPEPVTVSWNSGALTSGVHTFPAVLQSSGLYSLSSVVTVPSSSLGTQTYICNVNHKPSNTKVDKRVEPKSCEVKTDSTDHVKPKETENTKQPSKSCHKPKAIVHTEKVNMMSLTVLGLRMLFAKTVAVNFLLTAKLFFL

SEQ ID NO: 13830 - protein, 908 aa, Artificial Sequence
  Synthetic Polypeptide
MALPVTALLLPLALLLHAARPEVQLVESGGGLVQPGGSLRLSCAASGFSFSDFWMSWVRQAPGKGLEWVATISQAGSEKDYVDSVKGRFTISRDNAKKSLYLQMNSLRAEDTAVYYCASGVYSFDYRGQGTLVTVSSGTGGGGSGGGGSGGGGSEFQVQLVQSGAEVKKPGASVKVSCKASGYTFTSYDINWVRQATGQGLEWMGWMNPNSGNTGYAQKFQGRVTMTRNTSISTAYMELSSLRSEDTAVYYCARGDSTKVEIKLEGQPKANPTVTLFPPSSEELQANKATLVCLISDFYPGAVTVAWKADGSPVKAGVETTKPSKQSNNKYAASSYLSLTPEQWKSHRSYSCQVTHEGSTVEKTVAPTECSPIKTDVITMDPKDNCSKDANDTLLLQLTNTSAYYMYLLLLLKSVVYFAIITCCLLRRTAFCCNGEKSRAKRSGSGATNFSLLKQAGDVEENPGPTSMDWIWRILFLVGAATGAHSGPQLQLQESGPGLVKPSETLSLTCTVSGDSISSGDYYWGWIRQPPGKGLEWIGHIYYSGVTYYNPSLKSRVTISVDTSRNQFSLKLSSVTAADTAVYYCTREDSSNWRSRGQGTLVTVSSGSGGGGSGGGGSGGGGSFEQSVLTQPRSVSGSPGQSVTISCTGTSSDVGGYNYVSWYQQHPGEAPKLIIYDADKRPSGISNRFSSGKSGNTASLTISGLQVEDEADYYCCSYAGGSTWVFGGGTKVTVLTRASTKGPSVFPLAPSSKSTSGGTAALGCLVKDYFPEPVTVSWNSGALTSGVHTFPAVLQSSGLYSLSSVVTVPSSSLGTQTYICNVNHKPSNTKVDKRVEPKSCEVKTDSTDHVKPKETENTKQPSKSCHKPKAIVHTEKVNMMSLTVLGLRMLFAKTVAVNFLLTAKLFFL

SEQ ID NO: 13831 - protein, 930 aa, Artificial Sequence
  Synthetic Polypeptide
MALPVTALLLPLALLLHAARPEVQLVESGGGLVQPGGSLRLSCAASGFSFSDFWMSWVRQAPGKGLEWVATISQAGSEKDYVDSVKGRFTISRDNAKKSLYLQMNSLRAEDTAVYYCASGVYSFDYRGQGTLVTVSSGTGGGGSGGGGSGGGGSEFEVQLQQSGPGLVKPSQTLSLTCAISGDSVSSNSAAWNWIRQSPSRGLEWLGRTYYRSKWYSDYAVSVKSRITINPDTSKNQFSLQLNSVTPEDTAVYYCARDPYDFWSGYPDAFDIWGQGTMVTVSSLEGQPKANPTVTLFPPSSEELQANKATLVCLISDFYPGAVTVAWKADGSPVKAGVETTKPSKQSNNKYAASSYLSLTPEQWKSHRSYSCQVTHEGSTVEKTVAPTECSPIKTDVITMDPKDNCSKDANDTLLLQLTNTSAYYMYLLLLLKSVVYFAIITCCLLRRTAFCCNGEKSRAKRSGSGATNFSLLKQAGDVEENPGPTSMDWIWRILFLVGAATGAHSGPQLQLQESGPGLVKPSETLSLTCTVSGDSISSGDYYWGWIRQPPGKGLEWIGHIYYSGVTYYNPSLKSRVTISVDTSRNQFSLKLSSVTAADTAVYYCTREDSSNWRSRGQGTLVTVSSGSGGGGSGGGGSGGGGSFEQSALTQPASVSGSPGQSITISCTGTSSDVGGYNYVSWYQQHPGKAPKVIISEVNNRPSGVSHRFSGSKSGNTASLTISGLQAEDEADYFCSSYTSGRTLYVFGTGSKVTVLGTRASTKGPSVFPLAPSSKSTSGGTAALGCLVKDYFPEPVTVSWNSGALTSGVHTFPAVLQSSGLYSLSSVVTVPSSSLGTQTYICNVNHKPSNTKVDKRVEPKSCEVKTDSTDHVKPKETENTKQPSKSCHKPKAIVHTEKVNMMSLTVLGLRMLFAKTVAVNFLLTAKLFFL

SEQ ID NO: 13832 - protein, 929 aa, Artificial Sequence
  Synthetic Polypeptide
MALPVTALLLPLALLLHAARPEVQLVESGGGLVQPGGSLRLSCAASGFSFSDFWMSWVRQAPGKGLEWVATISQAGSEKDYVDSVKGRFTISRDNAKKSLYLQMNSLRAEDTAVYYCASGVYSFDYRGQGTLVTVSSGTGGGGSGGGGSGGGGSEFQSALTQPASASGSPGQSVTISCTGTSSDVGGYNYVSWYQQHPGKAPKLMIYDVSNRPSGVSNRFSGSKSGNTASLTISGLQAEDEADYYCSSYTSSSTLYVFGTGTQLTVLLEGQPKANPTVTLFPPSSEELQANKATLVCLISDFYPGAVTVAWKADGSPVKAGVETTKPSKQSNNKYAASSYLSLTPEQWKSHRSYSCQVTHEGSTVEKTVAPTECSPIKTDVITMDPKDNCSKDANDTLLLQLTNTSAYYMYLLLLLKSVVYFAIITCCLLRRTAFCCNGEKSRAKRSGSGATNFSLLKQAGDVEENPGPTSMDWIWRILFLVGAATGAHSGPQLQLQESGPGLVKPSETLSLTCTVSGDSISSGDYYWGWIRQPPGKGLEWIGHIYYSGVTYYNPSLKSRVTISVDTSRNQFSLKLSSVTAADTAVYYCTREDSSNWRSRGQGTLVTVSSGSGGGGSGGGGSGGGGSFEEVQLQQSGPGLVKPSQTLSLTCAISGDSMLSNSDTWNWIRQSPSRGLEWLGRTYHRSTWYDDYASSVRGRVSINVDTSKNQYSLQLNAVTPEDTGVYYCARVRLQDGNSWSDAFDVWGQGTMVTVSSTRASTKGPSVFPLAPSSKSTSGGTAALGCLVKDYFPEPVTVSWNSGALTSGVHTFPAVLQSSGLYSLSSVVTVPSSSLGTQTYICNVNHKPSNTKVDKRVEPKSCEVKTDSTDHVKPKETENTKQPSKSCHKPKAIVHTEKVNMMSLTVLGLRMLFAKTVAVNFLLTAKLFFL

SEQ ID NO: 13833 - protein, 929 aa, Artificial Sequence
  Synthetic Polypeptide
MALPVTALLLPLALLLHAARPEVQLVESGGGLVQPGGSLRLSCAASGFSFSDFWMSWVRQAPGKGLEWVATISQAGSEKDYVDSVKGRFTISRDNAKKSLYLQMNSLRAEDTAVYYCASGVYSFDYRGQGTLVTVSSGTGGGGSGGGGSGGGGSEFDVMLTQTPLSLPVSLGDQASISCRSSQSILHSTGDTYLEWYLQKPGQSPKLLINKVSNRLSGVPDRFSGSGSGTDFTLKISRVEAEDLGVYYCFQGSHVPWTFGGGTKLEIKRADAAPTVSIFPLEGQPKANPTVTLFPPSSEELQANKATLVCLISDFYPGAVTVAWKADGSPVKAGVETTKPSKQSNNKYAASSYLSLTPEQWKSHRSYSCQVTHEGSTVEKTVAPTECSPIKTDVITMDPKDNCSKDANDTLLLQLTNTSAYYMYLLLLLKSVVYFAIITCCLLRRTAFCCNGEKSRAKRSGSGATNFSLLKQAGDVEENPGPTSMDWIWRILFLVGAATGAHSGPQLQLQESGPGLVKPSETLSLTCTVSGDSISSGDYYWGWIRQPPGKGLEWIGHIYYSGVTYYNPSLKSRVTISVDTSRNQFSLKLSSVTAADTAVYYCTREDSSNWRSRGQGTLVTVSSGSGGGGSGGGGSGGGGSFEQVKLQQSGPSLVKPGASVKMSCKASGYTFTDFYMKWVKQSHGKSLEWIGDINPNIGDTFYNQKFKGKATLTVDKSSSTAYMQLNSLTSEDSAVYFCSVGYFDVWGAGTTVTVSSTRASTKGPSVFPLAPSSKSTSGGTAALGCLVKDYFPEPVTVSWNSGALTSGVHTFPAVLQSSGLYSLSSVVTVPSSSLGTQTYICNVNHKPSNTKVDKRVEPKSCEVKTDSTDHVKPKETENTKQPSKSCHKPKAIVHTEKVNMMSLTVLGLRMLFAKTVAVNFLLTAKLFFL

SEQ ID NO: 13834 - protein, 925 aa, Artificial Sequence
  Synthetic Polypeptide
MALPVTALLLPLALLLHAARPEVQLVESGGGLVQPGGSLRLSCAASGFSFSDFWMSWVRQAPGKGLEWVATISQAGSEKDYVDSVKGRFTISRDNAKKSLYLQMNSLRAEDTAVYYCASGVYSFDYRGQGTLVTVSSGTGGGGSGGGGSGGGGSEFEIVLTQSPATLSLSPGERATLSCRASQSVSIYLAWYQQKPGQAPRLLIYDASNRATGIPARFSGSGSGTDFTLTISSLEPEDFAVYYCQQRSNWPPFTFGPGTKVDIKLEGQPKANPTVTLFPPSSEELQANKATLVCLISDFYPGAVTVAWKADGSPVKAGVETTKPSKQSNNKYAASSYLSLTPEQWKSHRSYSCQVTHEGSTVEKTVAPTECSPIKTDVITMDPKDNCSKDANDTLLLQLTNTSAYYMYLLLLLKSVVYFAIITCCLLRRTAFCCNGEKSRAKRSGSGATNFSLLKQAGDVEENPGPTSMDWIWRILFLVGAATGAHSGPQLQLQESGPGLVKPSETLSLTCTVSGDSISSGDYYWGWIRQPPGKGLEWIGHIYYSGVTYYNPSLKSRVTISVDTSRNQFSLKLSSVTAADTAVYYCTREDSSNWRSRGQGTLVTVSSGSGGGGSGGGGSGGGGSFEQVQLVESGGGVVQPGRSLRLSCAASGFTFSSYGMHWVRQAPGKGLEWVAVIWDDGSNKYYVDSVKGRFTISRDNSKNTLYLQMNSLRAEDTAVYYCARDDYYGSGSFNSYYGTDVWGQGTTVTVSSTRASTKGPSVFPLAPSSKSTSGGTAALGCLVKDYFPEPVTVSWNSGALTSGVHTFPAVLQSSGLYSLSSVVTVPSSSLGTQTYICNVNHKPSNTKVDKRVEPKSCEVKTDSTDHVKPKETENTKQPSKSCHKPKAIVHTEKVNMMSLTVLGLRMLFAKTVAVNFLLTAKLFFL

SEQ ID NO: 13835 - protein, 910 aa, Artificial Sequence
  Synthetic Polypeptide
MALPVTALLLPLALLLHAARPEVQLVESGGGLVQPGGSLRLSCAASGFSFSDFWMSWVRQAPGKGLEWVATISQAGSEKDYVDSVKGRFTISRDNAKKSLYLQMNSLRAEDTAVYYCASGVYSFDYRGQGTLVTVSSGTGGGGSGGGGSGGGGSEFDIQMTQSPSSLSASVGDRVTITCRASQGISSWLAWYQQKPEKAPKSLIYAASSLQSGVPSRFSGSGSGTDFTLTISSLQPEDFATYYCQQYNSYPYTFGQGTKLEIKLEGQPKANPTVTLFPPSSEELQANKATLVCLISDFYPGAVTVAWKADGSPVKAGVETTKPSKQSNNKYAASSYLSLTPEQWKSHRSYSCQVTHEGSTVEKTVAPTECSPIKTDVITMDPKDNCSKDANDTLLLQLTNTSAYYMYLLLLLKSVVYFAIITCCLLRRTAFCCNGEKSRAKRSGSGATNFSLLKQAGDVEENPGPTSMDWIWRILFLVGAATGAHSGPQLQLQESGPGLVKPSETLSLTCTVSGDSISSGDYYWGWIRQPPGKGLEWIGHIYYSGVTYYNPSLKSRVTISVDTSRNQFSLKLSSVTAADTAVYYCTREDSSNWRSRGQGTLVTVSSGSGGGGSGGGGSGGGGSFEEVQLVQSGGGLVHPGGSLRLSCAGSGFTFSTYLMYWVRQAPGKTLEWVSAIGSGGDTYYADSVKGRFTISRDNAKNSLYLQMNSLRAEDMAVYYCARGLGYWGQGTLVTVSSTRASTKGPSVFPLAPSSKSTSGGTAALGCLVKDYFPEPVTVSWNSGALTSGVHTFPAVLQSSGLYSLSSVVTVPSSSLGTQTYICNVNHKPSNTKVDKRVEPKSCEVKTDSTDHVKPKETENTKQPSKSCHKPKAIVHTEKVNMMSLTVLGLRMLFAKTVAVNFLLTAKLFFL

SEQ ID NO: 13836 - protein, 929 aa, Artificial Sequence
  Synthetic Polypeptide
MALPVTALLLPLALLLHAARPEVQLVESGGGLVQPGGSLRLSCAASGFSFSDFWMSWVRQAPGKGLEWVATISQAGSEKDYVDSVKGRFTISRDNAKKSLYLQMNSLRAEDTAVYYCASGVYSFDYRGQGTLVTVSSGTGGGGSGGGGSGGGGSEFLPVLTQPPSVSVAPGKTARITCGGNNIGSKSVHWYQQKPGQAPVLVVYDDSDRPSGIPERFSGSNSGNTATLTISRVEAGDEADYYCQVWDSSSDYVVFGGGTKLTVLLEGQPKANPTVTLFPPSSEELQANKATLVCLISDFYPGAVTVAWKADGSPVKAGVETTKPSKQSNNKYAASSYLSLTPEQWKSHRSYSCQVTHEGSTVEKTVAPTECSPIKTDVITMDPKDNCSKDANDTLLLQLTNTSAYYMYLLLLLKSVVYFAIITCCLLRRTAFCCNGEKSRAKRSGSGATNFSLLKQAGDVEENPGPTSMDWIWRILFLVGAATGAHSGPQLQLQESGPGLVKPSETLSLTCTVSGDSISSGDYYWGWIRQPPGKGLEWIGHIYYSGVTYYNPSLKSRVTISVDTSRNQFSLKLSSVTAADTAVYYCTREDSSNWRSRGQGTLVTVSSGSGGGGSGGGGSGGGGSFEEVQLVQSGAEVKKPGESLKISCKGSGYSFTSYWIGWVRQMPGKGLEWMGIIYPGDSDTRYSPSFQGQVTISADKSISTAYLQWSSLKASDTAMYYCARQVWGWQGGMYPRSNWWYNLDSWGQGTLVTVSSTRASTKGPSVFPLAPSSKSTSGGTAALGCLVKDYFPEPVTVSWNSGALTSGVHTFPAVLQSSGLYSLSSVVTVPSSSLGTQTYICNVNHKPSNTKVDKRVEPKSCEVKTDSTDHVKPKETENTKQPSKSCHKPKAIVHTEKVNMMSLTVLGLRMLFAKTVAVNFLLTAKLFFL

SEQ ID NO: 13837 - protein, 922 aa, Artificial Sequence
  Synthetic Polypeptide
MALPVTALLLPLALLLHAARPEVQLVESGGGLVQPGGSLRLSCAASGFSFSDFWMSWVRQAPGKGLEWVATISQAGSEKDYVDSVKGRFTISRDNAKKSLYLQMNSLRAEDTAVYYCASGVYSFDYRGQGTLVTVSSGTGGGGSGGGGSGGGGSEFELVMTQSPASLAVSLGQRATISCRASESVDSYGKSFMHWYQLKPGQPPKLLIYRASNLESGVPARFSGSGSRTDFTLTIDPVEADDAATYYCQQNNEDPWTFGGGTKLEIKLEGQPKANPTVTLFPPSSEELQANKATLVCLISDFYPGAVTVAWKADGSPVKAGVETTKPSKQSNNKYAASSYLSLTPEQWKSHRSYSCQVTHEGSTVEKTVAPTECSPIKTDVITMDPKDNCSKDANDTLLLQLTNTSAYYMYLLLLLKSVVYFAIITCCLLRRTAFCCNGEKSRAKRSGSGATNFSLLKQAGDVEENPGPTSMDWIWRILFLVGAATGAHSGPQLQLQESGPGLVKPSETLSLTCTVSGDSISSGDYYWGWIRQPPGKGLEWIGHIYYSGVTYYNPSLKSRVTISVDTSRNQFSLKLSSVTAADTAVYYCTREDSSNWRSRGQGTLVTVSSGSGGGGSGGGGSGGGGSFEEVQLEQSGPELVKPGASVKMSCKASGYTFTNYYMKWVKQSHGKSLEWIGDLNPNNGDTFYNQKFKGKATLTVDKSSNTAYMQLNSLTSEDSAVYYCARTGRYEENAMDYWGQGTSVTVSSTRASTKGPSVFPLAPSSKSTSGGTAALGCLVKDYFPEPVTVSWNSGALTSGVHTFPAVLQSSGLYSLSSVVTVPSSSLGTQTYICNVNHKPSNTKVDKRVEPKSCEVKTDSTDHVKPKETENTKQPSKSCHKPKAIVHTEKVNMMSLTVLGLRMLFAKTVAVNFLLTAKLFFL

SEQ ID NO: 13838 - protein, 916 aa, Artificial Sequence
  Synthetic Polypeptide
MALPVTALLLPLALLLHAARPEVQLVESGGGLVQPGGSLRLSCAASGFSFSDFWMSWVRQAPGKGLEWVATISQAGSEKDYVDSVKGRFTISRDNAKKSLYLQMNSLRAEDTAVYYCASGVYSFDYRGQGTLVTVSSGTGGGGSGGGGSGGGGSEFDVVMTQSPSSLSASVGDRVTITCMASEDIYIRLAWYQQKPGNAPKLLIYAATSLETGVPSRFSGSGSGTDFTLTISSLQPEDFATYYCQQYWSSPWTFGGGTKVEIKLEGQPKANPTVTLFPPSSEELQANKATLVCLISDFYPGAVTVAWKADGSPVKAGVETTKPSKQSNNKYAASSYLSLTPEQWKSHRSYSCQVTHEGSTVEKTVAPTECSPIKTDVITMDPKDNCSKDANDTLLLQLTNTSAYYMYLLLLLKSVVYFAIITCCLLRRTAFCCNGEKSRAKRSGSGATNFSLLKQAGDVEENPGPTSMDWIWRILFLVGAATGAHSGPQLQLQESGPGLVKPSETLSLTCTVSGDSISSGDYYWGWIRQPPGKGLEWIGHIYYSGVTYYNPSLKSRVTISVDTSRNQFSLKLSSVTAADTAVYYCTREDSSNWRSRGQGTLVTVSSGSGGGGSGGGGSGGGGSFEQVQLQESGPGLVKPSQTLSLTCTVSGYSITSDYTWNWIRQPPGNGLEWIGYITYSGSTSYNPSLKSRVLISVDTSKNQVSLKLSSVTAADTAVYYCARLGRRYTMDYWGQGTTVTVSSTRASTKGPSVFPLAPSSKSTSGGTAALGCLVKDYFPEPVTVSWNSGALTSGVHTFPAVLQSSGLYSLSSVVTVPSSSLGTQTYICNVNHKPSNTKVDKRVEPKSCEVKTDSTDHVKPKETENTKQPSKSCHKPKAIVHTEKVNMMSLTVLGLRMLFAKTVAVNFLLTAKLFFL

SEQ ID NO: 13839 - protein, 920 aa, Artificial Sequence; identical to SEQ ID NO: 13702
  Synthetic Polypeptide

SEQ ID NO: 13840 - protein, 920 aa, Artificial Sequence
  Synthetic Polypeptide
MALPVTALLLPLALLLHAARPEVQLVESGGGLVQPGGSLRLSCAASGFSFSDFWMSWVRQAPGKGLEWVATISQAGSEKDYVDSVKGRFTISRDNAKKSLYLQMNSLRAEDTAVYYCASGVYSFDYRGQGTLVTVSSGTGGGGSGGGGSGGGGSEFDIVLTQSPATLSLSPGDRATLSCRASESVTILGSHLIYWYQQKPGQAPRLLIQLASNVQTGIPARFSGSGSRTDFTLTISSLEPEDFAVYYCLQSRTIPRTFGQGTKLEIKRLEGQPKANPTVTLFPPSSEELQANKATLVCLISDFYPGAVTVAWKADGSPVKAGVETTKPSKQSNNKYAASSYLSLTPEQWKSHRSYSCQVTHEGSTVEKTVAPTECSPIKTDVITMDPKDNCSKDANDTLLLQLTNTSAYYMYLLLLLKSVVYFAIITCCLLRRTAFCCNGEKSRAKRSGSGATNFSLLKQAGDVEENPGPTSMDWIWRILFLVGAATGAHSGPQLQLQESGPGLVKPSETLSLTCTVSGDSISSGDYYWGWIRQPPGKGLEWIGHIYYSGVTYYNPSLKSRVTISVDTSRNQFSLKLSSVTAADTAVYYCTREDSSNWRSRGQGTLVTVSSGSGGGGSGGGGSGGGGSFEQVQLVQSGSELKKPGESVKISCKASGYTFTHYSMNWVRQAPGQGLEWMGRINTETGEPLYADDFKGRFVFSLDTSASTAYLQISSLKAEDTAVYYCSNDYLYSLDYWGQGTLVTVSSTRASTKGPSVFPLAPSSKSTSGGTAALGCLVKDYFPEPVTVSWNSGALTSGVHTFPAVLQSSGLYSLSSVVTVPSSSLGTQTYICNVNHKPSNTKVDKRVEPKSCEVKTDSTDHVKPKETENTKQPSKSCHKPKAIVHTEKVNMMSLTVLGLRMLFAKTVAVNFLLTAKLFFL

SEQ ID NO: 13841 - protein, 921 aa, Artificial Sequence
  Synthetic Polypeptide
MALPVTALLLPLALLLHAARPEVQLVESGGGLVQPGGSLRLSCAASGFSFSDFWMSWVRQAPGKGLEWVATISQAGSEKDYVDSVKGRFTISRDNAKKSLYLQMNSLRAEDTAVYYCASGVYSFDYRGQGTLVTVSSGTGGGGSGGGGSGGGGSEFDIQLTQSPSFLSASVGDRVTITCRASQGISTDLNWYQQKPGKAPKLLIYAASNLESGVPSRFSGSGSGTEFTLTISSLQPEDFATYYCQQSYNWPYTFGGGTKVEIKRLEGQPKANPTVTLFPPSSEELQANKATLVCLISDFYPGAVTVAWKADGSPVKAGVETTKPSKQSNNKYAASSYLSLTPEQWKSHRSYSCQVTHEGSTVEKTVAPTECSPIKTDVITMDPKDNCSKDANDTLLLQLTNTSAYYMYLLLLLKSVVYFAIITCCLLRRTAFCCNGEKSRAKRSGSGATNFSLLKQAGDVEENPGPTSMDWIWRILFLVGAATGAHSGPQLQLQESGPGLVKPSETLSLTCTVSGDSISSGDYYWGWIRQPPGKGLEWIGHIYYSGVTYYNPSLKSRVTISVDTSRNQFSLKLSSVTAADTAVYYCTREDSSNWRSRGQGTLVTVSSGSGGGGSGGGGSGGGGSFEEVQLVESGGGLVKPGGSLRLSCAASGFTFSNFEMNWVRQAPGKGLEWVSGISSNGRYINYADSVKGRFTISRDNAKNSLYLQMNSLRAEDTAVYYCARVVDFDQDYNGFDYWGQGTLVTVSSTRASTKGPSVFPLAPSSKSTSGGTAALGCLVKDYFPEPVTVSWNSGALTSGVHTFPAVLQSSGLYSLSSVVTVPSSSLGTQTYICNVNHKPSNTKVDKRVEPKSCEVKTDSTDHVKPKETENTKQPSKSCHKPKAIVHTEKVNMMSLTVLGLRMLFAKTVAVNFLLTAKLFFL

SEQ ID NO: 13842 - protein, 919 aa, Artificial Sequence
  Synthetic Polypeptide
MALPVTALLLPLALLLHAARPEVQLVESGGGLVQPGGSLRLSCAASGFSFSDFWMSWVRQAPGKGLEWVATISQAGSEKDYVDSVKGRFTISRDNAKKSLYLQMNSLRAEDTAVYYCASGVYSFDYRGQGTLVTVSSGTGGGGSGGGGSGGGGSEFDIQLTQSPSFLSASVGDRVTITCSLSLGISTWRDWFPPRLGRGLEPLTYAASTLQSGVPSRFSGSGSGTEFTLTISSLQPEDFATYYCQQLNSYPLTFGGGTKVEIKRLEGQPKANPTVTLFPPSSEELQANKATLVCLISDFYPGAVTVAWKADGSPVKAGVETTKPSKQSNNKYAASSYLSLTPEQWKSHRSYSCQVTHEGSTVEKTVAPTECSPIKTDVITMDPKDNCSKDANDTLLLQLTNTSAYYMYLLLLLKSVVYFAIITCCLLRRTAFCCNGEKSRAKRSGSGATNFSLLKQAGDVEENPGPTSMDWIWRILFLVGAATGAHSGPQLQLQESGPGLVKPSETLSLTCTVSGDSISSGDYYWGWIRQPPGKGLEWIGHIYYSGVTYYNPSLKSRVTISVDTSRNQFSLKLSSVTAADTAVYYCTREDSSNWRSRGQGTLVTVSSGSGGGGSGGGGSGGGGSFEEVQLVESGGGLVKPGGSLRLSCAASGFTFSTYGMSWVRQAPGKGLEWVAYINNGSGYIYYADSVKGRFTISRDNAKNSLYLQMNSLRAEDTAVYYCARGQWWSGGDFDYWGQGTLVTVSSTRASTKGPSVFPLAPSSKSTSGGTAALGCLVKDYFPEPVTVSWNSGALTSGVHTFPAVLQSSGLYSLSSVVTVPSSSLGTQTYICNVNHKPSNTKVDKRVEPKSCEVKTDSTDHVKPKETENTKQPSKSCHKPKAIVHTEKVNMMSLTVLGLRMLFAKTVAVNFLLTAKLFFL

SEQ ID NO: 13843 - protein, 920 aa, Artificial Sequence
  Synthetic Polypeptide
MALPVTALLLPLALLLHAARPEVQLVESGGGLVQPGGSLRLSCAASGFSFSDFWMSWVRQAPGKGLEWVATISQAGSEKDYVDSVKGRFTISRDNAKKSLYLQMNSLRAEDTAVYYCASGVYSFDYRGQGTLVTVSSGTGGGGSGGGGSGGGGSEFEIVLTQSPATLSLSPGERATLSCSASSSVSYMYWYQQKPGQAPRLLIYRTSNLASGIPARFSGSGSGTDFTLTISSLEPEDFAVYYCQQYHSYPTTFGQGTKVEIKRTVLEGQPKANPTVTLFPPSSEELQANKATLVCLISDFYPGAVTVAWKADGSPVKAGVETTKPSKQSNNKYAASSYLSLTPEQWKSHRSYSCQVTHEGSTVEKTVAPTECSPIKTDVITMDPKDNCSKDANDTLLLQLTNTSAYYMYLLLLLKSVVYFAIITCCLLRRTAFCCNGEKSRAKRSGSGATNFSLLKQAGDVEENPGPTSMDWIWRILFLVGAATGAHSGPQLQLQESGPGLVKPSETLSLTCTVSGDSISSGDYYWGWIRQPPGKGLEWIGHIYYSGVTYYNPSLKSRVTISVDTSRNQFSLKLSSVTAADTAVYYCTREDSSNWRSRGQGTLVTVSSGSGGGGSGGGGSGGGGSFEEVQLVESGGGLVQPGGSLRLSCAASGFSFNTYAMNWVRQAPGKGLEWVSHIRSKSNNFATYYADSVKDRFTISRDNAKNSLYLQMNSLRAEDTAVYYCARQGGDFPMDYWGQGTLVTVSSTRASTKGPSVFPLAPSSKSTSGGTAALGCLVKDYFPEPVTVSWNSGALTSGVHTFPAVLQSSGLYSLSSVVTVPSSSLGTQTYICNVNHKPSNTKVDKRVEPKSCEVKTDSTDHVKPKETENTKQPSKSCHKPKAIVHTEKVNMMSLTVLGLRMLFAKTVAVNFLLTAKLFFL

SEQ ID NO: 13844 - protein, 916 aa, Artificial Sequence
  Synthetic Polypeptide
MALPVTALLLPLALLLHAARPEVQLVESGGGLVQPGGSLRLSCAASGFSFSDFWMSWVRQAPGKGLEWVATISQAGSEKDYVDSVKGRFTISRDNAKKSLYLQMNSLRAEDTAVYYCASGVYSFDYRGQGTLVTVSSGTGGGGSGGGGSGGGGSEFDVVMTQSPSSLSASVGDRVTITCKASEDIYIRLAWYQQKPGKAPKLLIYAATSLETGVPSRFSGSGSGTDFTLTISSLQPEDFATYYCQQYWTTPWTFGGGTKVEIKLEGQPKANPTVTLFPPSSEELQANKATLVCLISDFYPGAVTVAWKADGSPVKAGVETTKPSKQSNNKYAASSYLSLTPEQWKSHRSYSCQVTHEGSTVEKTVAPTECSPIKTDVITMDPKDNCSKDANDTLLLQLTNTSAYYMYLLLLLKSVVYFAIITCCLLRRTAFCCNGEKSRAKRSGSGATNFSLLKQAGDVEENPGPTSMDWIWRILFLVGAATGAHSGPQLQLQESGPGLVKPSETLSLTCTVSGDSISSGDYYWGWIRQPPGKGLEWIGHIYYSGVTYYNPSLKSRVTISVDTSRNQFSLKLSSVTAADTAVYYCTREDSSNWRSRGQGTLVTVSSGSGGGGSGGGGSGGGGSFEQVQLQESGPGLVKPSQTLSLTCTVSGYSITIDYTWNWIRQPPGKGLEWIGYITYSGSTDYNPSLKSRVLISVDTSKNQVSLKLSSVTAADTAVYYCARLGRRYALDYWGQGTTVTVSSTRASTKGPSVFPLAPSSKSTSGGTAALGCLVKDYFPEPVTVSWNSGALTSGVHTFPAVLQSSGLYSLSSVVTVPSSSLGTQTYICNVNHKPSNTKVDKRVEPKSCEVKTDSTDHVKPKETENTKQPSKSCHKPKAIVHTEKVNMMSLTVLGLRMLFAKTVAVNFLLTAKLFFL

SEQ ID NO: 13845 - protein, 921 aa, Artificial Sequence
  Synthetic Polypeptide
MALPVTALLLPLALLLHAARPEVQLVESGGGLVQPGGSLRLSCAASGFSFSDFWMSWVRQAPGKGLEWVATISQAGSEKDYVDSVKGRFTISRDNAKKSLYLQMNSLRAEDTAVYYCASGVYSFDYRGQGTLVTVSSGTGGGGSGGGGSGGGGSEFDIQMTQTTSSLSASLGDRVTISCRASQDISNYLNWYQQKPDGTVKLLIYYTSILHSGVPSRFSGSGSGTDYSLTISNLEQEDFATYFCQQGNTLPWTFGGGTKLEIKALEGQPKANPTVTLFPPSSEELQANKATLVCLISDFYPGAVTVAWKADGSPVKAGVETTKPSKQSNNKYAASSYLSLTPEQWKSHRSYSCQVTHEGSTVEKTVAPTECSPIKTDVITMDPKDNCSKDANDTLLLQLTNTSAYYMYLLLLLKSVVYFAIITCCLLRRTAFCCNGEKSRAKRSGSGATNFSLLKQAGDVEENPGPTSMDWIWRILFLVGAATGAHSGPQLQLQESGPGLVKPSETLSLTCTVSGDSISSGDYYWGWIRQPPGKGLEWIGHIYYSGVTYYNPSLKSRVTISVDTSRNQFSLKLSSVTAADTAVYYCTREDSSNWRSRGQGTLVTVSSGSGGGGSGGGGSGGGGSFEEVQLVESGGGLVKPGGSLKLSCAASGFAFSIYDMSWVRQTPEKRLEWVAYISSGGGTYYPDTVKGRFTISRDNAKNTLYLQMSSLKSEDTAMYYCARHSGYGTHWGVLFAYWGQGTLVTVSATRASTKGPSVFPLAPSSKSTSGGTAALGCLVKDYFPEPVTVSWNSGALTSGVHTFPAVLQSSGLYSLSSVVTVPSSSLGTQTYICNVNHKPSNTKVDKRVEPKSCEVKTDSTDHVKPKETENTKQPSKSCHKPKAIVHTEKVNMMSLTVLGLRMLFAKTVAVNFLLTAKLFFL

SEQ ID NO: 13846 - protein, 931 aa, Artificial Sequence
  Synthetic Polypeptide
MALPVTALLLPLALLLHAARPEVQLVESGGGLVQPGGSLRLSCAASGFSFSDFWMSWVRQAPGKGLEWVATISQAGSEKDYVDSVKGRFTISRDNAKKSLYLQMNSLRAEDTAVYYCASGVYSFDYRGQGTLVTVSSGTGGGGSGGGGSGGGGSEFDIVMTQSPDSLAVSLGERATINCKSSQSLLYRSNQKNYLAWYQQKPGQPPKLLIYWASTRESGVPDRFSGSGSGTDFTLTISSLQAEDVAVYYCQQYYNYPRTFGQGTKVEIKRTVLEGQPKANPTVTLFPPSSEELQANKATLVCLISDFYPGAVTVAWKADGSPVKAGVETTKPSKQSNNKYAASSYLSLTPEQWKSHRSYSCQVTHEGSTVEKTVAPTECSPIKTDVITMDPKDNCSKDANDTLLLQLTNTSAYYMYLLLLLKSVVYFAIITCCLLRRTAFCCNGEKSRAKRSGSGATNFSLLKQAGDVEENPGPTSMDWIWRILFLVGAATGAHSGPQLQLQESGPGLVKPSETLSLTCTVSGDSISSGDYYWGWIRQPPGKGLEWIGHIYYSGVTYYNPSLKSRVTISVDTSRNQFSLKLSSVTAADTAVYYCTREDSSNWRSRGQGTLVTVSSGSGGGGSGGGGSGGGGSFEEVQLLESGGGLVQPGGSLRLSCAASGYSITSDYAWNWVRQAPGKGLEWVSYISNSGSTSYNPSLKSRFTISRDNSKNTLYLQMNSLRAEDTAVYYCAKERNYDYDDYYYAMDYWGQGTLVTVSSTRASTKGPSVFPLAPSSKSTSGGTAALGCLVKDYFPEPVTVSWNSGALTSGVHTFPAVLQSSGLYSLSSVVTVPSSSLGTQTYICNVNHKPSNTKVDKRVEPKSCEVKTDSTDHVKPKETENTKQPSKSCHKPKAIVHTEKVNMMSLTVLGLRMLFAKTVAVNFLLTAKLFFL

SEQ ID NO: 13847 - protein, 924 aa, Artificial Sequence
  Synthetic Polypeptide
MALPVTALLLPLALLLHAARPEVQLVESGGGLVQPGGSLRLSCAASGFSFSDFWMSWVRQAPGKGLEWVATISQAGSEKDYVDSVKGRFTISRDNAKKSLYLQMNSLRAEDTAVYYCASGVYSFDYRGQGTLVTVSSGTGGGGSGGGGSGGGGSEFDVVMTQSPLSLPVTLGQPASISCRSSQSLLHSSGNTYLEWYQQRPGQSPRPLIYKISTRFSGVPDRFSGSGSGTDFTLKISRVEAEDVGVYYCFQGSHVPYTFGGGTKVEIKRLEGQPKANPTVTLFPPSSEELQANKATLVCLISDFYPGAVTVAWKADGSPVKAGVETTKPSKQSNNKYAASSYLSLTPEQWKSHRSYSCQVTHEGSTVEKTVAPTECSPIKTDVITMDPKDNCSKDANDTLLLQLTNTSAYYMYLLLLLKSVVYFAIITCCLLRRTAFCCNGEKSRAKRSGSGATNFSLLKQAGDVEENPGPTSMDWIWRILFLVGAATGAHSGPQLQLQESGPGLVKPSETLSLTCTVSGDSISSGDYYWGWIRQPPGKGLEWIGHIYYSGVTYYNPSLKSRVTISVDTSRNQFSLKLSSVTAADTAVYYCTREDSSNWRSRGQGTLVTVSSGSGGGGSGGGGSGGGGSFEQVQLVQSGAEVKKPGASVKVSCKASGLTIEDYYMHWVRQAPGQGLEWMGWIDPENGDTEYGPKFQGRVTMTRDTSINTAYMELSRLRSDDTAVYYCAVHNAHYGTWFAYWGQGTLVTVSSTRASTKGPSVFPLAPSSKSTSGGTAALGCLVKDYFPEPVTVSWNSGALTSGVHTFPAVLQSSGLYSLSSVVTVPSSSLGTQTYICNVNHKPSNTKVDKRVEPKSCEVKTDSTDHVKPKETENTKQPSKSCHKPKAIVHTEKVNMMSLTVLGLRMLFAKTVAVNFLLTAKLFFL

SEQ ID NO: 13848 - protein, 916 aa, Artificial Sequence
  Synthetic Polypeptide
MALPVTALLLPLALLLHAARPEVQLVESGGGLVQPGGSLRLSCAASGFSFSDFWMSWVRQAPGKGLEWVATISQAGSEKDYVDSVKGRFTISRDNAKKSLYLQMNSLRAEDTAVYYCASGVYSFDYRGQGTLVTVSSGTGGGGSGGGGSGGGGSEFDIQMTQSPSSLSASVGDRVTITCRASENIYSNLAWYQQKPGKAPKLLIYAATNLADGVPSRFSGSGSGTDFTLTISSLQPEDFATYYCQHFWGTPTFGQGTKVEIKRTVLEGQPKANPTVTLFPPSSEELQANKATLVCLISDFYPGAVTVAWKADGSPVKAGVETTKPSKQSNNKYAASSYLSLTPEQWKSHRSYSCQVTHEGSTVEKTVAPTECSPIKTDVITMDPKDNCSKDANDTLLLQLTNTSAYYMYLLLLLKSVVYFAIITCCLLRRTAFCCNGEKSRAKRSGSGATNFSLLKQAGDVEENPGPTSMDWIWRILFLVGAATGAHSGPQLQLQESGPGLVKPSETLSLTCTVSGDSISSGDYYWGWIRQPPGKGLEWIGHIYYSGVTYYNPSLKSRVTISVDTSRNQFSLKLSSVTAADTAVYYCTREDSSNWRSRGQGTLVTVSSGSGGGGSGGGGSGGGGSFEEVQLVESGGGLVQPGGSLRLSCAASGFSLTNYGVHWVRQAPGKGLEWVSVIWSGGSTDYNAAFISRFTISADTSKNTAYLQMNSLRAEDTAVYYCARELIHAMDNWGQGTLVTVSSTRASTKGPSVFPLAPSSKSTSGGTAALGCLVKDYFPEPVTVSWNSGALTSGVHTFPAVLQSSGLYSLSSVVTVPSSSLGTQTYICNVNHKPSNTKVDKRVEPKSCEVKTDSTDHVKPKETENTKQPSKSCHKPKAIVHTEKVNMMSLTVLGLRMLFAKTVAVNFLLTAKLFFL

SEQ ID NO: 13849 - protein, 923 aa, Artificial Sequence
  Synthetic Polypeptide
MALPVTALLLPLALLLHAARPEVQLVESGGGLVQPGGSLRLSCAASGFSFSDFWMSWVRQAPGKGLEWVATISQAGSEKDYVDSVKGRFTISRDNAKKSLYLQMNSLRAEDTAVYYCASGVYSFDYRGQGTLVTVSSGTGGGGSGGGGSGGGGSEFDFVMTQSPLSLPVTPGEPASISCRSSQSIVHSNGNTYLEWYLQKPGQSPQLLIYKVSNRFSGVPDRFSGSGSGTDFTLKISRVEAEDVGVYYCFQGSHVPLTFGQGTKLEIKRLEGQPKANPTVTLFPPSSEELQANKATLVCLISDFYPGAVTVAWKADGSPVKAGVETTKPSKQSNNKYAASSYLSLTPEQWKSHRSYSCQVTHEGSTVEKTVAPTECSPIKTDVITMDPKDNCSKDANDTLLLQLTNTSAYYMYLLLLLKSVVYFAIITCCLLRRTAFCCNGEKSRAKRSGSGATNFSLLKQAGDVEENPGPTSMDWIWRILFLVGAATGAHSGPQLQLQESGPGLVKPSETLSLTCTVSGDSISSGDYYWGWIRQPPGKGLEWIGHIYYSGVTYYNPSLKSRVTISVDTSRNQFSLKLSSVTAADTAVYYCTREDSSNWRSRGQGTLVTVSSGSGGGGSGGGGSGGGGSFEEVQLVESGAEVKKPGASVKVSCKASGYTFTSYWIHWVRQAPGQGLEWMGENDPSNGRTNYNEKFKNRVTLTVDTSISTAYMELSRLRSDDTAVYYCARGPNYFYSMDYWGQGTMVTVSSTRASTKGPSVFPLAPSSKSTSGGTAALGCLVKDYFPEPVTVSWNSGALTSGVHTFPAVLQSSGLYSLSSVVTVPSSSLGTQTYICNVNHKPSNTKVDKRVEPKSCEVKTDSTDHVKPKETENTKQPSKSCHKPKAIVHTEKVNMMSLTVLGLRMLFAKTVAVNFLLTAKLFFL

SEQ ID NO: 13850 - protein, 916 aa, Artificial Sequence
  Synthetic Polypeptide
MALPVTALLLPLALLLHAARPEVQLVESGGGLVQPGGSLRLSCAASGFSFSDFWMSWVRQAPGKGLEWVATISQAGSEKDYVDSVKGRFTISRDNAKKSLYLQMNSLRAEDTAVYYCASGVYSFDYRGQGTLVTVSSGTGGGGSGGGGSGGGGSEFDIQLTQSPSFLSASVGDRVTITCSARSSISFMYWYQQKPGKAPKLLIYDTSNLASGVPSRFSGSGSGTEFTLTISSLEAEDAATYYCQQWSSYPLTFGQGTKLEIKLEGQPKANPTVTLFPPSSEELQANKATLVCLISDFYPGAVTVAWKADGSPVKAGVETTKPSKQSNNKYAASSYLSLTPEQWKSHRSYSCQVTHEGSTVEKTVAPTECSPIKTDVITMDPKDNCSKDANDTLLLQLTNTSAYYMYLLLLLKSVVYFAIITCCLLRRTAFCCNGEKSRAKRSGSGATNFSLLKQAGDVEENPGPTSMDWIWRILFLVGAATGAHSGPQLQLQESGPGLVKPSETLSLTCTVSGDSISSGDYYWGWIRQPPGKGLEWIGHIYYSGVTYYNPSLKSRVTISVDTSRNQFSLKLSSVTAADTAVYYCTREDSSNWRSRGQGTLVTVSSGSGGGGSGGGGSGGGGSFEQVQLVQSGAEVKKPGASVKVSCKASGYTFTGSWMNWVRQAPGQGLEWIGRIYPGDGETNYNGKFKDRVTITADKSTSTAYMELSSLRSEDTAVYYCARIYGNNVYFDVWGQGTTVTVSSTRASTKGPSVFPLAPSSKSTSGGTAALGCLVKDYFPEPVTVSWNSGALTSGVHTFPAVLQSSGLYSLSSVVTVPSSSLGTQTYICNVNHKPSNTKVDKRVEPKSCEVKTDSTDHVKPKETENTKQPSKSCHKPKAIVHTEKVNMMSLTVLGLRMLFAKTVAVNFLLTAKLFFL

SEQ ID NO: 13851 - protein, 924 aa, Artificial Sequence
  Synthetic Polypeptide
MALPVTALLLPLALLLHAARPEVQLVESGGGLVQPGGSLRLSCAASGFSFSDFWMSWVRQAPGKGLEWVATISQAGSEKDYVDSVKGRFTISRDNAKKSLYLQMNSLRAEDTAVYYCASGVYSFDYRGQGTLVTVSSGTGGGGSGGGGSGGGGSEFQLVLTQSPSASASLGSSVKLTCTLSSGHKTDTIDWYQQQPGKAPRYLMKLEGSGSYNKGSGVPDRFSGSSSGADWYLTISSLQSEDEADYYCGTDYPGNYLFGGGTQLTVLGLEGQPKANPTVTLFPPSSEELQANKATLVCLISDFYPGAVTVAWKADGSPVKAGVETTKPSKQSNNKYAASSYLSLTPEQWKSHRSYSCQVTHEGSTVEKTVAPTECSPIKTDVITMDPKDNCSKDANDTLLLQLTNTSAYYMYLLLLLKSVVYFAIITCCLLRRTAFCCNGEKSRAKRSGSGATNFSLLKQAGDVEENPGPTSMDWIWRILFLVGAATGAHSGPQLQLQESGPGLVKPSETLSLTCTVSGDSISSGDYYWGWIRQPPGKGLEWIGHIYYSGVTYYNPSLKSRVTISVDTSRNQFSLKLSSVTAADTAVYYCTREDSSNWRSRGQGTLVTVSSGSGGGGSGGGGSGGGGSFEQEQLVESGGGLVQPGGSLRLSCAASGFTFSDYYMSWIRQAPGKGLEWVATIYPSSGKTYYADSAKGRLTISSDNAKDSLYLQMNSLRAEDTAVYYCTRDSYADDAALFDIWGQGTTVTVSSTRASTKGPSVFPLAPSSKSTSGGTAALGCLVKDYFPEPVTVSWNSGALTSGVHTFPAVLQSSGLYSLSSVVTVPSSSLGTQTYICNVNHKPSNTKVDKRVEPKSCEVKTDSTDHVKPKETENTKQPSKSCHKPKAIVHTEKVNMMSLTVLGLRMLFAKTVAVNFLLTAKLFFL

SEQ ID NO: 13852 - protein, 892 aa, Artificial Sequence
  Synthetic Polypeptide
MALPVTALLLPLALLLHAARPEVQLVESGGGLVQPGGSLRLSCAASGFSFSDFWMSWVRQAPGKGLEWVATISQAGSEKDYVDSVKGRFTISRDNAKKSLYLQMNSLRAEDTAVYYCASGVYSFDYRGQGTLVTVSSGTGGGGSGGGGSGGGGSEFEIVLTQSPDTLSLSPGEKATLSCRASQSVSSSFLAWYQQKPGQAPSLLIYVASRRAAGIPDRFSGSGSGTDFTLTISRLEPEDFGMFYCQHYGRTPFTFGPARGTAGQSYRDTVPSKQRRTPGQQGHTCVPDLRLLPWGCDSGLEGRWISCESRRGNHQAIQAEQQQIRRQLLPEPDTAVEVPQILQLPSDPRRQHRGKDSGPYRVQPHQDRCDYNGPQGQLLQGRQRYPAAPADQHQRLLHVLVAAAEVRGVLRHHHMLPAAENRLLLQRREVGQAIWIWSNKLLTTQTSRRGGESRAYYGLDLAHPFPCRRCYRRAFRAPAPAARVWTWPGQARDTEPDLYRVRRHQQRRLLLGLDQTASWQRTGMDRPHLLQRRDLLQPQPEVQSDHQRGHQPEPVLPEAVRDSRRYRRVLLHQRGQQQLAERPGNTGHSLWIRRRRKWRRRIWRRRLFRTDPVGGIRGRCGAAGEPETVMRGVWLHIQELRHALGATGPRKGFGVGRRDLVRRIVLRRSCEGKVHHLPRQQKYALPANELTQGGYGGLLLRSLRDCCGRRIRLLGTGYPGDSIKHACLYKGTLRVSSGSQQQVYKRRNSRSGLPGQGLLSRACDRVLERSTDKRRAHLSSRAAKQRPVLSEQRGHSALPGHPDLHLQCEPQAQHQGGQESGTQELSENRLHRPREAQRDREHQAAQQELPQAQGHRAHRESEHDEPDRAGPADAVRQNRGRELPADRQAVLP

SEQ ID NO: 13853 - protein, 906 aa, Artificial Sequence
  Synthetic Polypeptide
MALPVTALLLPLALLLHAARPEVQLVESGGGLVQPGGSLRLSCAASGFSFSDFWMSWVRQAPGKGLEWVATISQAGSEKDYVDSVKGRFTISRDNAKKSLYLQMNSLRAEDTAVYYCASGVYSFDYRGQGTLVTVSSGTGGGGSGGGGSGGGGSEFDIQMTQSPSSLSASLGDRVTITCRASQGIRNDLGWYQQKPGKAPKRLIYASSTLQSGVPSRFSGSGSGTEFTLTISSLQPEDFATYYCLQHNNFPWTFGQGTKVEIKRLEGQPKANPTVTLFPPSSEELQANKATLVCLISDFYPGAVTVAWKADGSPVKAGVETTKPSKQSNNKYAASSYLSLTPEQWKSHRSYSCQVTHEGSTVEKTVAPTECSPIKTDVITMDPKDNCSKDANDTLLLQLTNTSAYYMYLLLLLKSVVYFAIITCCLLRRTAFCCNGEKSRAKRSGSGATNFSLLKQAGDVEENPGPTSMDWIWRILFLVGAATGAHSGPQLQLQESGPGLVKPSETLSLTCTVSGDSISSGDYYWGWIRQPPGKGLEWIGHIYYSGVTYYNPSLKSRVTISVDTSRNQFSLKLSSVTAADTAVYYCTREDSSNWRSRGQGTLVTVSSGSGGGGSGGGGSGGGGSFEHARKLLRSLDLYWSQPRHHSRVQVVFPSTQGWASAGSGNPLARLWNGSLTYSAMPKKATGQANPALFPRTLLSLRWCPPTWTRWTPPPITAQESLGMVGMVTTIIMGWMCGGKAQPRSQARVPLQRDPPCFLWLPAASLQAEEQPLWAAWSRITFPSLPCPGIAEHQAACTPFQPCCKAAACTLAAWSQCLALAWAPRPTSAMTTSLATPRWTREWNPRAVKKPTPPTTSPKRQRTPSSPARAATSPRPSCTPRKTAPCWACGCCSPKPWPTSCPPSCSS

SEQ ID NO: 13854 - protein, 919 aa, Artificial Sequence
  Synthetic Polypeptide
MALPVTALLLPLALLLHAARPEVQLVESGGGLVQPGGSLRLSCAASGFSFSDFWMSWVRQAPGKGLEWVATISQAGSEKDYVDSVKGRFTISRDNAKKSLYLQMNSLRAEDTAVYYCASGVYSFDYRGQGTLVTVSSGTGGGGSGGGGSGGGGSEFDIVLTQSPPSLAMSLGKRATISCRASESVTILGSHLIHWYQQKPGQPPTLLIQLASNVQTGVPARFSGSGSRTDFTLTIDPVEEDDVAVYYCLQSRTIPRTFGGGTKLEIKLEGQPKANPTVTLFPPSSEELQANKATLVCLISDFYPGAVTVAWKADGSPVKAGVETTKPSKQSNNKYAASSYLSLTPEQWKSHRSYSCQVTHEGSTVEKTVAPTECSPIKTDVITMDPKDNCSKDANDTLLLQLTNTSAYYMYLLLLLKSVVYFAIITCCLLRRTAFCCNGEKSRAKRSGSGATNFSLLKQAGDVEENPGPTSMDWIWRILFLVGAATGAHSGPQLQLQESGPGLVKPSETLSLTCTVSGDSISSGDYYWGWIRQPPGKGLEWIGHIYYSGVTYYNPSLKSRVTISVDTSRNQFSLKLSSVTAADTAVYYCTREDSSNWRSRGQGTLVTVSSGSGGGGSGGGGSGGGGSFEQIQLVQSGPELKKPGETVKISCKASGYTFTDYSINWVKRAPGKGLKWMGWINTETREPAYAYDFRGRFAFSLETSASTAYLQINNLKYEDTATYFCALDYSYAMDYWGQGTSVTVSSTRASTKGPSVFPLAPSSKSTSGGTAALGCLVKDYFPEPVTVSWNSGALTSGVHTFPAVLQSSGLYSLSSVVTVPSSSLGTQTYICNVNHKPSNTKVDKRVEPKSCEVKTDSTDHVKPKETENTKQPSKSCHKPKAIVHTEKVNMMSLTVLGLRMLFAKTVAVNFLLTAKLFFL

SEQ ID NO: 13855 - protein, 884 aa, Artificial Sequence
  Synthetic Polypeptide
MALPVTALLLPLALLLHAARPEVQLVESGGGLVQPGGSLRLSCAASGFSFSDFWMSWVRQAPGKGLEWVATISQAGSEKDYVDSVKGRFTISRDNAKKSLYLQMNSLRAEDTAVYYCASGVYSFDYRGQGTLVTVSSGTGGGGSGGGGSGGGGSEFDIQLTQSPSSLSASVGDRVSFTCQASQDINNFLNWYQQKPGKAPKLLIYDASNLETGVPSRFSGSGSGTDFTFTISSLQPEDIATYYCQQYGNLPFTFGGGTKVEIKSSRDSLRPILPHCSLQAAKNSRPTRPHLCASPTSTLGLQWLGRPMDLLKPAWKPPSHPSRATTNTPPAPTAHLSSGSPTDPTAAKPTKAAPWKRQWPLQSAAPSRPMLQWTPRTTAPRTPTIPCCSSPTPAPTTCTCCCCSPWCTSPSSHAACCGEPPSAATARSLGPSDLDLEQQTSHYSNKQVTWRRIPGLLVWTGFGASFSLSALLPARIPGPSSSCKSLDLAWSSLARHAPVPCPAIASAAAITTGAGSDSLLAKDWNGSATSTTAAPTTTPASPEPSAWTPAGTSSPSCLAQPPIPPCTTAPERTAATGGVEAREHWSQLALDPAEAEVEAEDLAAEALSNRSNCKKADPDWSLLRHLVRARSVAAPSPPIIGHGYDNPQVRAWNGLAISTIQEARTTIPASPEQFQIPVKTSSVLNCQAQLPTPLCITASHWCIVEGIVIAGSIIGDREPWLYLPRVPLQRDPPCFLWLPAASLQAEEQPLWAAWSRITFPSLPCPGIAEHQAACTPFQPCCKAAACTLAAWSQCLALAWAPRPTSAMTTSLATPRWTREWNPRAVKKPTPPTTSPKRQRTPSSPARAATSPRPSCTPRKTAPCWACGCCSPKPWPTSCPPSCSS

SEQ ID NO: 13856 - protein, 923 aa, Artificial Sequence
  Synthetic Polypeptide
MALPVTALLLPLALLLHAARPEVQLVESGGGLVQPGGSLRLSCAASGFSFSDFWMSWVRQAPGKGLEWVATISQAGSEKDYVDSVKGRFTISRDNAKKSLYLQMNSLRAEDTAVYYCASGVYSFDYRGQGTLVTVSSGTGGGGSGGGGSGGGGSEFDIQLTQSPSSLSASVGDRVSFTCQASQDINNFLNWYQQKPGKAPKLLIYDASNLETGVPSRFSGSGSGTDFTFTISSLQPEDIATYYCQQYGNLPFTFGGGTKVEIKRLEGQPKANPTVTLFPPSSEELQANKATLVCLISDFYPGAVTVAWKADGSPVKAGVETTKPSKQSNNKYAASSYLSLTPEQWKSHRSYSCQVTHEGSTVEKTVAPTECSPIKTDVITMDPKDNCSKDANDTLLLQLTNTSAYYMYLLLLLKSVVYFAIITCCLLRRTAFCCNGEKSRAKRSGSGATNFSLLKQAGDVEENPGPTSMDWIWRILFLVGAATGAHSGPQLQLQESGPGLVKPSETLSLTCTVSGDSISSGDYYWGWIRQPPGKGLEWIGHIYYSGVTYYNPSLKSRVTISVDTSRNQFSLKLSSVTAADTAVYYCTREDSSNWRSRGQGTLVTVSSGSGGGGSGGGGSGGGGSFEQVQLQESGPGLVKPSQTLSLTCTVSGGSISSGGFYWSWIRQHPGKGLEWIGYIHHSGSTHYNPSLKSRVTISIDTSKNLFSLRLSSVTAADTAVYYCASLVYCGGDCYSGFDYWGQGTLVTVSSTRASTKGPSVFPLAPSSKSTSGGTAALGCLVKDYFPEPVTVSWNSGALTSGVHTFPAVLQSSGLYSLSSVVTVPSSSLGTQTYICNVNHKPSNTKVDKRVEPKSCEVKTDSTDHVKPKETENTKQPSKSCHKPKAIVHTEKVNMMSLTVLGLRMLFAKTVAVNFLLTAKLFFL

SEQ ID NO: 13857 - protein, 919 aa, Artificial Sequence
  Synthetic Polypeptide
MALPVTALLLPLALLLHAARPEVQLVESGGGLVQPGGSLRLSCAASGFSFSDFWMSWVRQAPGKGLEWVATISQAGSEKDYVDSVKGRFTISRDNAKKSLYLQMNSLRAEDTAVYYCASGVYSFDYRGQGTLVTVSSGTGGGGSGGGGSGGGGSEFDIQMTQSPSSLSASVGDRVTITCKSSQSVLYSSNQKNYLAWFQQKPGKAPKLLIYWASTRESGVPSRFSGSGSGTDFTLTISSLQPEDFATYFCHQYLSSYTFGQGTKVEIKRLEGQPKANPTVTLFPPSSEELQANKATLVCLISDFYPGAVTVAWKADGSPVKAGVETTKPSKQSNNKYAASSYLSLTPEQWKSHRSYSCQVTHEGSTVEKTVAPTECSPIKTDVITMDPKDNCSKDANDTLLLQLTNTSAYYMYLLLLLKSVVYFAIITCCLLRRTAFCCNGEKSRAKRSGSGATNFSLLKQAGDVEENPGPTSMDWIWRILFLVGAATGAHSGPQLQLQESGPGLVKPSETLSLTCTVSGDSISSGDYYWGWIRQPPGKGLEWIGHIYYSGVTYYNPSLKSRVTISVDTSRNQFSLKLSSVTAADTAVYYCTREDSSNWRSRGQGTLVTVSSGSGGGGSGGGGSGGGGSFEEVQLVESGGGLVQPGGSLRLSCAASGYTFTTYWMHWVRQAPGKGLEWVGYIRPSTGYTEYNQKFKDRFTISADTSKNTAYLQMNSLRAEDTAVYYCARSRWLLDYWGQGTLVTVSTRASTKGPSVFPLAPSSKSTSGGTAALGCLVKDYFPEPVTVSWNSGALTSGVHTFPAVLQSSGLYSLSSVVTVPSSSLGTQTYICNVNHKPSNTKVDKRVEPKSCEVKTDSTDHVKPKETENTKQPSKSCHKPKAIVHTEKVNMMSLTVLGLRMLFAKTVAVNFLLTAKLFFL

SEQ ID NO: 13858 - protein, 916 aa, Artificial Sequence
  Synthetic Polypeptide
MALPVTALLLPLALLLHAARPEVQLVESGGGLVQPGGSLRLSCAASGFSFSDFWMSWVRQAPGKGLEWVATISQAGSEKDYVDSVKGRFTISRDNAKKSLYLQMNSLRAEDTAVYYCASGVYSFDYRGQGTLVTVSSGTGGGGSGGGGSGGGGSEFDIQMTQSPSSLSASVGDRVTITCRASQDISNYLNWYQQKPGKAPKLLIYYTSRLHSGVPSRFSGSGSGTDFTLTISSLQPEDFATYYCQQGNTLPYTFGQGTKVEIKRLEGQPKANPTVTLFPPSSEELQANKATLVCLISDFYPGAVTVAWKADGSPVKAGVETTKPSKQSNNKYAASSYLSLTPEQWKSHRSYSCQVTHEGSTVEKTVAPTECSPIKTDVITMDPKDNCSKDANDTLLLQLTNTSAYYMYLLLLLKSVVYFAIITCCLLRRTAFCCNGEKSRAKRSGSGATNFSLLKQAGDVEENPGPTSMDWIWRILFLVGAATGAHSGPQLQLQESGPGLVKPSETLSLTCTVSGDSISSGDYYWGWIRQPPGKGLEWIGHIYYSGVTYYNPSLKSRVTISVDTSRNQFSLKLSSVTAADTAVYYCTREDSSNWRSRGQGTLVTVSSGSGGGGSGGGGSGGGGSFEEVQLVESGGGLVQPGGSLRLSCAASGFTFSDYFMSWVRQAPGKGLEWVATISNGGTYTYYPDSVKGRFTISRDNSKNTLYLQMNSLRAEDTAVYYCARFDGYIFDYWGQGTLVTVSSTRASTKGPSVFPLAPSSKSTSGGTAALGCLVKDYFPEPVTVSWNSGALTSGVHTFPAVLQSSGLYSLSSVVTVPSSSLGTQTYICNVNHKPSNTKVDKRVEPKSCEVKTDSTDHVKPKETENTKQPSKSCHKPKAIVHTEKVNMMSLTVLGLRMLFAKTVAVNFLLTAKLFFL

SEQ ID NO: 13859 - protein, 761 aa, Artificial Sequence
  Synthetic Polypeptide
MALPVTALLLPLALLLHAARPEVQLVESGGGLVQPGGSLRLSCAASGFSFSDFWMSWVRQAPGKGLEWVATISQAGSEKDYVDSVKGRFTISRDNAKKSLYLQMNSLRAEDTAVYYCASGVYSFDYRGQGTLVTVSSGTGGGGSGGGGSGGGGSEFDIQMTQTTSSLSASLGDRVTISCRASQDISKYLNWYQQKPDGTVKLLIYHTSRLHSGVPSRFSGSGSGTDYSLTISNLEQEDIATYFCQQGNTLPYTFGGGTKLEITLEGQPKANPTVTLFPPSSEELQANKATLVCLISDFYPGAVTVAWKADGSPVKAGVETTKPSKQSNNKYAASSYLSLTPEQWKSHRSYSCQVTHEGSTVEKTVAPTECSGRADCGFTSESYQQGVLSATILYEILLGKATLYAVLVSALVLMAMVKRKDSRGRAKRSGSGVKQTLNFDLLKLAGDVESNPGPTSMDWIWRILFLVGAATGAHSFEVKLQESGPGLVAPSQSLSVTCTVSGVSLPDYGVSWIRQPPRKGLEWLGVIWGSETTYYNSALKSRLTIIKDNSKSQVFLKMNSLQTDDTAIYYCAKHYYYGGSYAMDYWGQGTSVTVSSTRASTKGPSVFPLAPSSKSTSGGTAALGCLVKDYFPEPVTVSWNSGALTSGVHTFPAVLQSSGLYSLSSVVTVPSSSLGTQTYICNVNHKPSNTKVDKRVEPKSCIPEDTFFPSPESSCDVKLVEKSFETDTNLNFQNLSVIGFRILLLKVAGFNLLMTLRLWSS

SEQ ID NO: 13860 - protein, 762 aa, Artificial Sequence
  Synthetic Polypeptide
MALPVTALLLPLALLLHAARPEVQLVESGGGLVQPGGSLRLSCAASGFSFSDFWMSWVRQAPGKGLEWVATISQAGSEKDYVDSVKGRFTISRDNAKKSLYLQMNSLRAEDTAVYYCASGVYSFDYRGQGTLVTVSSGTGGGGSGGGGSGGGGSEFEIVMTQSPATLSLSPGERATLSCRASQDISKYLNWYQQKPGQAPRLLIYHTSRLHSGIPARFSGSGSGTDYTLTISSLQPEDFAVYFCQQGNTLPYTFGQGTKLEIKLEGQPKANPTVTLFPPSSEELQANKATLVCLISDFYPGAVTVAWKADGSPVKAGVETTKPSKQSNNKYAASSYLSLTPEQWKSHRSYSCQVTHEGSTVEKTVAPTECSGRADCGFTSESYQQGVLSATILYEILLGKATLYAVLVSALVLMAMVKRKDSRGRAKRSGSGVKQTLNFDLLKLAGDVESNPGPTSMDWIWRILFLVGAATGAHSFEQVQLQESGPGLVKPSETLSLTCTVSGVSLPDYGVSWIRQPPGKGLEWIGVIWGSETTYYNSSLKSRVTISKDNSKNQVSLKLSSVTAADTAVYYCAKHYYYGGSYAMDYWGQGTLVTVSSTRASTKGPSVFPLAPSSKSTSGGTAALGCLVKDYFPEPVTVSWNSGALTSGVHTFPAVLQSSGLYSLSSVVTVPSSSLGTQTYICNVNHKPSNTKVDKRVEPKSCIPEDTFFPSPESSCDVKLVEKSFETDTNLNFQNLSVIGFRILLLKVAGFNLLMTLRLWSS

SEQ ID NO: 13861 - protein, 763 aa, Artificial Sequence
  Synthetic Polypeptide
MALPVTALLLPLALLLHAARPEVQLVESGGGLVQPGGSLRLSCAASGFSFSDFWMSWVRQAPGKGLEWVATISQAGSEKDYVDSVKGRFTISRDNAKKSLYLQMNSLRAEDTAVYYCASGVYSFDYRGQGTLVTVSSGTGGGGSGGGGSGGGGSEFDEIVLTQSPATLSLSPGERATLSCSASSSVSYMHWYQQKPGQAPRLLIYDTSKLASGIPARFSGSGSGTDFTLTISSLEPEDVAVYYCFQGSVYPFTFGQGTKLEIKRLEGQPKANPTVTLFPPSSEELQANKATLVCLISDFYPGAVTVAWKADGSPVKAGVETTKPSKQSNNKYAASSYLSLTPEQWKSHRSYSCQVTHEGSTVEKTVAPTECSGRADCGFTSESYQQGVLSATILYEILLGKATLYAVLVSALVLMAMVKRKDSRGRAKRSGSGVKQTLNFDLLKLAGDVESNPGPTSMDWIWRILFLVGAATGAHSFEQVQLQESGPGLVKPSQTLSLTCTVSGGSISTSGMGVGWIRQHPGKGLEWIGHIWWDDDKRYNPALKSRVTISVDTSKNQFSLKLSSVTAADTAVYYCARMELWSYYFDYWGQGTLVTVSSTRASTKGPSVFPLAPSSKSTSGGTAALGCLVKDYFPEPVTVSWNSGALTSGVHTFPAVLQSSGLYSLSSVVTVPSSSLGTQTYICNVNHKPSNTKVDKRVEPKSCIPEDTFFPSPESSCDVKLVEKSFETDTNLNFQNLSVIGFRILLLKVAGFNLLMTLRLWSS

SEQ ID NO: 13862 - protein, 761 aa, Artificial Sequence
  Synthetic Polypeptide
MALPVTALLLPLALLLHAARPEVQLVESGGGLVQPGGSLRLSCAASGFSFSDFWMSWVRQAPGKGLEWVATISQAGSEKDYVDSVKGRFTISRDNAKKSLYLQMNSLRAEDTAVYYCASGVYSFDYRGQGTLVTVSSGTGGGGSGGGGSGGGGSEFDYIHVTQSPSSLSVSIGDRVTINCQTSQGVGSDLHWYQHKPGRAPKLLIHHASSVEDGVPSRFSGTGFHTSFNLTINDLQADDIGTYYCQVLQSFGRGSRLDTKLEGQPKANPTVTLFPPSSEELQANKATLVCLISDFYPGAVTVAWKADGSPVKAGVETTKPSKQSNNKYAASSYLSLTPEQWKSHRSYSCQVTHEGSTVEKTVAPTECSGRADCGFTSESYQQGVLSATILYEILLGKATLYAVLVSALVLMAMVKRKDSRGRAKRSGSGVKQTLNFDLLKLAGDVESNPGPTSMDWIWRILFLVGAATGAHSFERAHLVQSGTAMKKPGASVRVSCQTSGYTFTAHILFWFRQAPGRGLEWVGWIKPQYGAVNFGGGFRDRVTLTRDVYREIAYMDIRGLKPDDTAVYYCARDRSYGDSSWALDAWGQGTTVVVSATRASTKGPSVFPLAPSSKSTSGGTAALGCLVKDYFPEPVTVSWNSGALTSGVHTFPAVLQSSGLYSLSSVVTVPSSSLGTQTYICNVNHKPSNTKVDKRVEPKSCIPEDTFFPSPESSCDVKLVEKSFETDTNLNFQNLSVIGFRILLLKVAGFNLLMTLRLWSS

SEQ ID NO: 13863 - protein, 771 aa, Artificial Sequence
  Synthetic Polypeptide
MALPVTALLLPLALLLHAARPEVQLVESGGGLVQPGGSLRLSCAASGFSFSDFWMSWVRQAPGKGLEWVATISQAGSEKDYVDSVKGRFTISRDNAKKSLYLQMNSLRAEDTAVYYCASGVYSFDYRGQGTLVTVSSGTGGGGSGGGGSGGGGSEFDVQMIQTPDSLAVSLGQRATISCRASESVDNYGISFMHWYQQKPGQSPKLLIYRASNLESGIPARFSGSGSRTDFTLTINPVETDDVATYYCQQNNKDPPTFGGGTKLEIKLEGQPKANPTVTLFPPSSEELQANKATLVCLISDFYPGAVTVAWKADGSPVKAGVETTKPSKQSNNKYAASSYLSLTPEQWKSHRSYSCQVTHEGSTVEKTVAPTECSGRADCGFTSESYQQGVLSATILYEILLGKATLYAVLVSALVLMAMVKRKDSRGRAKRSGSGVKQTLNFDLLKLAGDVESNPGPTSMDWIWRILFLVGAATGAHSFEGGGGSQVQLQQSGAELVKPGASVKISCKASGYAFSSYWMNWVKQRPGKGLEWIGQIYPGDGDTTYNGKFKGKATLTADKSSSTVYMQLNSLTSEDSAVYFCVRYYYGSSGYFDYWGQGTTLTVSSTRASTKGPSVFPLAPSSKSTSGGTAALGCLVKDYFPEPVTVSWNSGALTSGVHTFPAVLQSSGLYSLSSVVTVPSSSLGTQTYICNVNHKPSNTKVDKRVEPKSCIPEDTFFPSPESSCDVKLVEKSFETDTNLNFQNLSVIGFRILLLKVAGFNLLMTLRLWSS

SEQ ID NO: 13864 - protein, 762 aa, Artificial Sequence
  Synthetic Polypeptide
MALPVTALLLPLALLLHAARPEVQLVESGGGLVQPGGSLRLSCAASGFSFSDFWMSWVRQAPGKGLEWVATISQAGSEKDYVDSVKGRFTISRDNAKKSLYLQMNSLRAEDTAVYYCASGVYSFDYRGQGTLVTVSSGTGGGGSGGGGSGGGGSEFDVQMIQTPSSLSASLGDRVTISCRASQDIGNYLNWYQQKPDGTVKLLIYYTSRLHSGVPSRFSGSGSGTEYSLTISNLEQEDIATYFCQQGSALPPTFGGGTKLEINLEGQPKANPTVTLFPPSSEELQANKATLVCLISDFYPGAVTVAWKADGSPVKAGVETTKPSKQSNNKYAASSYLSLTPEQWKSHRSYSCQVTHEGSTVEKTVAPTECSGRADCGFTSESYQQGVLSATILYEILLGKATLYAVLVSALVLMAMVKRKDSRGRAKRSGSGVKQTLNFDLLKLAGDVESNPGPTSMDWIWRILFLVGAATGAHSFEALQLQQSGAELVRPGASVTLSCKASGYTFTDYEMHWVKQTPVHGLEWIGAIDPETGGTAYNQKFEGKAILTADKSSSTAYMELRSLTSEDSPVYYCARRRYYGSSSFDYWGQGTTLTVSSTRASTKGPSVFPLAPSSKSTSGGTAALGCLVKDYFPEPVTVSWNSGALTSGVHTFPAVLQSSGLYSLSSVVTVPSSSLGTQTYICNVNHKPSNTKVDKRVEPKSCIPEDTFFPSPESSCDVKLVEKSFETDTNLNFQNLSVIGFRILLLKVAGFNLLMTLRLWSS

SEQ ID NO: 13865 - protein, 766 aa, Artificial Sequence
  Synthetic Polypeptide
MALPVTALLLPLALLLHAARPEVQLVESGGGLVQPGGSLRLSCAASGFSFSDFWMSWVRQAPGKGLEWVATISQAGSEKDYVDSVKGRFTISRDNAKKSLYLQMNSLRAEDTAVYYCASGVYSFDYRGQGTLVTVSSGTGGGGSGGGGSGGGGSEFDIVLTQSPASLAVSLGQRATISCRASKSVSTSGYSYLHWYQQKPGQPPKLLIYLASNLESGVPARFSGSGSGTDFTLNIHPVEEEDAATYYCQHSRELPFTFGSGTKLEIKLEGQPKANPTVTLFPPSSEELQANKATLVCLISDFYPGAVTVAWKADGSPVKAGVETTKPSKQSNNKYAASSYLSLTPEQWKSHRSYSCQVTHEGSTVEKTVAPTECSGRADCGFTSESYQQGVLSATILYEILLGKATLYAVLVSALVLMAMVKRKDSRGRAKRSGSGVKQTLNFDLLKLAGDVESNPGPTSMDWIWRILFLVGAATGAHSFEQVQLVESGGGLVQPGGSLKLSCAASGFDFSRYWMSWVRQAPGKGLEWIGEINPTSSTINFTPSLKDKVFISRDNAKNTLYLQMSKVRSEDTALYYCARGNYYRYGDAMDYWGQGTSVTVSTRASTKGPSVFPLAPSSKSTSGGTAALGCLVKDYFPEPVTVSWNSGALTSGVHTFPAVLQSSGLYSLSSVVTVPSSSLGTQTYICNVNHKPSNTKVDKRVEPKSCIPEDTFFPSPESSCDVKLVEKSFETDTNLNFQNLSVIGFRILLLKVAGFNLLMTLRLWSS

SEQ ID NO: 13866 - protein, 764 aa, Artificial Sequence
  Synthetic Polypeptide
MALPVTALLLPLALLLHAARPEVQLVESGGGLVQPGGSLRLSCAASGFSFSDFWMSWVRQAPGKGLEWVATISQAGSEKDYVDSVKGRFTISRDNAKKSLYLQMNSLRAEDTAVYYCASGVYSFDYRGQGTLVTVSSGTGGGGSGGGGSGGGGSEFDIQMTQSPSSLSASVGDRVTITCSASQDISNYLNWYQQKPGKAPKLLIYYTSNLHSGVPSRFSGSGSGTDFTLTISSLQPEDFATYYCQQYRKLPWTFGQGTKLEIKRLEGQPKANPTVTLFPPSSEELQANKATLVCLISDFYPGAVTVAWKADGSPVKAGVETTKPSKQSNNKYAASSYLSLTPEQWKSHRSYSCQVTHEGSTVEKTVAPTECSGRADCGFTSESYQQGVLSATILYEILLGKATLYAVLVSALVLMAMVKRKDSRGRAKRSGSGVKQTLNFDLLKLAGDVESNPGPTSMDWIWRILFLVGAATGAHSFEQVQLVQSGAEVKKPGSSVKVSCKASGGTFSNYWMHWVRQAPGQGLEWMGATYRGHSDTYYNQKFKGRVTITADKSTSTAYMELSSLRSEDTAVYYCARGAIYDGYDVLDNWGQGTLVTVSSTRASTKGPSVFPLAPSSKSTSGGTAALGCLVKDYFPEPVTVSWNSGALTSGVHTFPAVLQSSGLYSLSSVVTVPSSSLGTQTYICNVNHKPSNTKVDKRVEPKSCIPEDTFFPSPESSCDVKLVEKSFETDTNLNFQNLSVIGFRILLLKVAGFNLLMTLRLWSS

SEQ ID NO: 13867 - protein, 764 aa, Artificial Sequence
  Synthetic Polypeptide
MALPVTALLLPLALLLHAARPEVQLVESGGGLVQPGGSLRLSCAASGFSFSDFWMSWVRQAPGKGLEWVATISQAGSEKDYVDSVKGRFTISRDNAKKSLYLQMNSLRAEDTAVYYCASGVYSFDYRGQGTLVTVSSGTGGGGSGGGGSGGGGSEFDIVLTQSPATLSLSPGDRATISCRASESVTILGSHLIYWYQQKPGQPPRLLIQLASNVQTGVPARFSGSGSRTDFTLTISSVEPEDFAVYYCLQSRTIPRTFGQGTKLEIKRLEGQPKANPTVTLFPPSSEELQANKATLVCLISDFYPGAVTVAWKADGSPVKAGVETTKPSKQSNNKYAASSYLSLTPEQWKSHRSYSCQVTHEGSTVEKTVAPTECSGRADCGFTSESYQQGVLSATILYEILLGKATLYAVLVSALVLMAMVKRKDSRGRAKRSGSGVKQTLNFDLLKLAGDVESNPGPTSMDWIWRILFLVGAATGAHSFEQVQLVQSGPEVKKPGESVKISCKASGYTFRHYSMNWVKQAPGQGLKWMGRINTESGVPIYADDFKGRFSFTVDTSASTAYLEISSLTSEDTAVYFCSNDYLYSLDFWGQGTTLTVSSTRASTKGPSVFPLAPSSKSTSGGTAALGCLVKDYFPEPVTVSWNSGALTSGVHTFPAVLQSSGLYSLSSVVTVPSSSLGTQTYICNVNHKPSNTKVDKRVEPKSCIPEDTFFPSPESSCDVKLVEKSFETDTNLNFQNLSVIGFRILLLKVAGFNLLMTLRLWSS

SEQ ID NO: 13868 - protein, 765 aa, Artificial Sequence
  Synthetic Polypeptide
MALPVTALLLPLALLLHAARPEVQLVESGGGLVQPGGSLRLSCAASGFSFSDFWMSWVRQAPGKGLEWVATISQAGSEKDYVDSVKGRFTISRDNAKKSLYLQMNSLRAEDTAVYYCASGVYSFDYRGQGTLVTVSSGTGGGGSGGGGSGGGGSEFQSVLTQPPSVSGAPGQRVTISCTGSSSNIGAGFDVHWYQQLPGTAPKLLIYGNSNRPSGVPDRFSGSKSGTSASLAITGLQAEDEADYYCQSYDSSLSGYVFGTGTKVTVLGLEGQPKANPTVTLFPPSSEELQANKATLVCLISDFYPGAVTVAWKADGSPVKAGVETTKPSKQSNNKYAASSYLSLTPEQWKSHRSYSCQVTHEGSTVEKTVAPTECSGRADCGFTSESYQQGVLSATILYEILLGKATLYAVLVSALVLMAMVKRKDSRGRAKRSGSGVKQTLNFDLLKLAGDVESNPGPTSMDWIWRILFLVGAATGAHSFEQVQLVQSGAEVKKPGASVKVSCKASGYTFTDYYMHWVRQAPGQRLEWMGWINPNSGGTNYAQKFQDRITVTRDTSSNTGYMELTRLRSDDTAVYYCARSPYSGVLDKWGQGTLVTVSSTRASTKGPSVFPLAPSSKSTSGGTAALGCLVKDYFPEPVTVSWNSGALTSGVHTFPAVLQSSGLYSLSSVVTVPSSSLGTQTYICNVNHKPSNTKVDKRVEPKSCIPEDTFFPSPESSCDVKLVEKSFETDTNLNFQNLSVIGFRILLLKVAGFNLLMTLRLWSS

SEQ ID NO: 13869 - protein, 762 aa, Artificial Sequence
  Synthetic Polypeptide
MALPVTALLLPLALLLHAARPEVQLVESGGGLVQPGGSLRLSCAASGFSFSDFWMSWVRQAPGKGLEWVATISQAGSEKDYVDSVKGRFTISRDNAKKSLYLQMNSLRAEDTAVYYCASGVYSFDYRGQGTLVTVSSGTGGGGSGGGGSGGGGSEFQAVLTQPPSASGTPGQRVTISCSGSSSNIGSYTVSWYQQLPGTAPKFLIYSNNQRPSGVPDRFSGSKSGTSASLAISGLQSEDEADYYCAAWDDSLNGYVFGTGTKVTVLGLEGQPKANPTVTLFPPSSEELQANKATLVCLISDFYPGAVTVAWKADGSPVKAGVETTKPSKQSNNKYAASSYLSLTPEQWKSHRSYSCQVTHEGSTVEKTVAPTECSGRADCGFTSESYQQGVLSATILYEILLGKATLYAVLVSALVLMAMVKRKDSRGRAKRSGSGVKQTLNFDLLKLAGDVESNPGPTSMDWIWRILFLVGAATGAHSFEVQLVQSGAEVKKPGESLKISCKGSGYDFTTYWIGWVRQMPGKGLEWMGIIYPGDSDTRYSPSVRGRVTISADKSINTAYLQWSSLEASDTAMYYCARMWTFSQDGWGQGTLVTVSSTRASTKGPSVFPLAPSSKSTSGGTAALGCLVKDYFPEPVTVSWNSGALTSGVHTFPAVLQSSGLYSLSSVVTVPSSSLGTQTYICNVNHKPSNTKVDKRVEPKSCIPEDTFFPSPESSCDVKLVEKSFETDTNLNFQNLSVIGFRILLLKVAGFNLLMTLRLWSS

SEQ ID NO: 13870 - protein, 765 aa, Artificial Sequence
  Synthetic Polypeptide
MALPVTALLLPLALLLHAARPEVQLVESGGGLVQPGGSLRLSCAASGFSFSDFWMSWVRQAPGKGLEWVATISQAGSEKDYVDSVKGRFTISRDNAKKSLYLQMNSLRAEDTAVYYCASGVYSFDYRGQGTLVTVSSGTGGGGSGGGGSGGGGSEFDIVMTQSPDSLAVSLGERATINCKSSQSILYSSNQKNYLAWYQQKPGQSPKLLIYWASTRESGVPDRFSGSGSGTDFTLTISSLQAEDVAVYYCHQYISSYTFGQGTKLEIKLEGQPKANPTVTLFPPSSEELQANKATLVCLISDFYPGAVTVAWKADGSPVKAGVETTKPSKQSNNKYAASSYLSLTPEQWKSHRSYSCQVTHEGSTVEKTVAPTECSGRADCGFTSESYQQGVLSATILYEILLGKATLYAVLVSALVLMAMVKRKDSRGRAKRSGSGVKQTLNFDLLKLAGDVESNPGPTSMDWIWRILFLVGAATGAHSFEQVQLVQSGAEVKKPGASVKVSCKASGYTFASQWMHWMRQAPGQGLEWIGWINPGNVNTKYNEKFKGRATLTVDTSTNTAYMELSSLRSEDTAVYYCARSTWYRPLDYWGQGTLVTVSSTRASTKGPSVFPLAPSSKSTSGGTAALGCLVKDYFPEPVTVSWNSGALTSGVHTFPAVLQSSGLYSLSSVVTVPSSSLGTQTYICNVNHKPSNTKVDKRVEPKSCIPEDTFFPSPESSCDVKLVEKSFETDTNLNFQNLSVIGFRILLLKVAGFNLLMTLRLWSS

SEQ ID NO: 13871 - protein, 765 aa, Artificial Sequence
  Synthetic Polypeptide
MALPVTALLLPLALLLHAARPEVQLVESGGGLVQPGGSLRLSCAASGFSFSDFWMSWVRQAPGKGLEWVATISQAGSEKDYVDSVKGRFTISRDNAKKSLYLQMNSLRAEDTAVYYCASGVYSFDYRGQGTLVTVSSGTGGGGSGGGGSGGGGSEFDHIVLTQSPSSLSASLGDRVTISCRASQDISTYLNWYQQKPDGTVKLLIFYTSRLHAGVPSRFSGSGSGTHHSLTISNLEQEDIATYFCQQGNSLPFTFGSGTKLEIKRLEGQPKANPTVTLFPPSSEELQANKATLVCLISDFYPGAVTVAWKADGSPVKAGVETTKPSKQSNNKYAASSYLSLTPEQWKSHRSYSCQVTHEGSTVEKTVAPTECSGRADCGFTSESYQQGVLSATILYEILLGKATLYAVLVSALVLMAMVKRKDSRGRAKRSGSGVKQTLNFDLLKLAGDVESNPGPTSMDWIWRILFLVGAATGAHSFEQVQLKESGPELEKPGASVKISCKASGYSFTAYSMNWVKQNNGMSLEWIGSIDPYYGDTKYAQKFKGKATLTVDKASSTAYLQLKSLTSEDSAVYYCARRMITTGDWYFDVWGAGTTVTVSSTRASTKGPSVFPLAPSSKSTSGGTAALGCLVKDYFPEPVTVSWNSGALTSGVHTFPAVLQSSGLYSLSSVVTVPSSSLGTQTYICNVNHKPSNTKVDKRVEPKSCIPEDTFFPSPESSCDVKLVEKSFETDTNLNFQNLSVIGFRILLLKVAGFNLLMTLRLWSS

SEQ ID NO: 13872 - protein, 765 aa, Artificial Sequence; identical to SEQ ID NO: 13871
  Synthetic Polypeptide

SEQ ID NO: 13873 - protein, 765 aa, Artificial Sequence
  Synthetic Polypeptide
MALPVTALLLPLALLLHAARPEVQLVESGGGLVQPGGSLRLSCAASGFSFSDFWMSWVRQAPGKGLEWVATISQAGSEKDYVDSVKGRFTISRDNAKKSLYLQMNSLRAEDTAVYYCASGVYSFDYRGQGTLVTVSSGTGGGGSGGGGSGGGGSEFDEIVLTQSPATLSLSPGERATLSCRASQSVSSYLAWYQQKPGQAPRLLIYDASNRATGIPARFSGSGSGTDFTLTISSLEPEDFAVYYCQQRSNWPITFGQGTRLEIKLEGQPKANPTVTLFPPSSEELQANKATLVCLISDFYPGAVTVAWKADGSPVKAGVETTKPSKQSNNKYAASSYLSLTPEQWKSHRSYSCQVTHEGSTVEKTVAPTECSGRADCGFTSESYQQGVLSATILYEILLGKATLYAVLVSALVLMAMVKRKDSRGRAKRSGSGVKQTLNFDLLKLAGDVESNPGPTSMDWIWRILFLVGAATGAHSFEEVQLVESGGGLVQPGRSLRLSCAASGFTFNDYAMHWVRQAPGKGLEWVSTISWNSGSIGYADSVKGRFTISRDNAKKSLYLQMNSLRAEDTALYYCAKDIQYGNYYYGMDVWGQGTTVTVSSTRASTKGPSVFPLAPSSKSTSGGTAALGCLVKDYFPEPVTVSWNSGALTSGVHTFPAVLQSSGLYSLSSVVTVPSSSLGTQTYICNVNHKPSNTKVDKRVEPKSCIPEDTFFPSPESSCDVKLVEKSFETDTNLNFQNLSVIGFRILLLKVAGFNLLMTLRLWSS

SEQ ID NO: 13874 - protein, 767 aa, Artificial Sequence
  Synthetic Polypeptide
MALPVTALLLPLALLLHAARPEVQLVESGGGLVQPGGSLRLSCAASGFSFSDFWMSWVRQAPGKGLEWVATISQAGSEKDYVDSVKGRFTISRDNAKKSLYLQMNSLRAEDTAVYYCASGVYSFDYRGQGTLVTVSSGTGGGGSGGGGSGGGGSEFDIVMTQTPLSLPVTPGEPASISCRSSKSLLHSNGITYLYWYLQKPGQSPQLLIYQMSNLVSGVPDRFSGSGSGTDFTLKISRVEAEDVGVYYCAQNLELPYTFGGGTKVEIKRLEGQPKANPTVTLFPPSSEELQANKATLVCLISDFYPGAVTVAWKADGSPVKAGVETTKPSKQSNNKYAASSYLSLTPEQWKSHRSYSCQVTHEGSTVEKTVAPTECSGRADCGFTSESYQQGVLSATILYEILLGKATLYAVLVSALVLMAMVKRKDSRGRAKRSGSGVKQTLNFDLLKLAGDVESNPGPTSMDWIWRILFLVGAATGAHSFEQVQLVQSGAEVKKPGSSVKVSCKASGYAFSYSWINWVRQAPGQGLEWMGRIFPGDGDTDYNGKFKGRVTITADKSTSTAYMELSSLRSEDTAVYYCARNVFDGYWLVYWGQGTLVTVSSTRASTKGPSVFPLAPSSKSTSGGTAALGCLVKDYFPEPVTVSWNSGALTSGVHTFPAVLQSSGLYSLSSVVTVPSSSLGTQTYICNVNHKPSNTKVDKRVEPKSCIPEDTFFPSPESSCDVKLVEKSFETDTNLNFQNLSVIGFRILLLKVAGFNLLMTLRLWSS

SEQ ID NO: 13875 - protein, 768 aa, Artificial Sequence
  Synthetic Polypeptide
MALPVTALLLPLALLLHAARPEVQLVESGGGLVQPGGSLRLSCAASGFSFSDFWMSWVRQAPGKGLEWVATISQAGSEKDYVDSVKGRFTISRDNAKKSLYLQMNSLRAEDTAVYYCASGVYSFDYRGQGTLVTVSSGTGGGGSGGGGSGGGGSEFDIQMTQSPSSLSASVGDRVTITCRSSQSIVHSVGNTFLEWYQQKPGKAPKLLIYKVSNRFSGVPSRFSGSGSGTDFTLTISSLQPEDFATYYCFQGSQFPYTFGQGTKVEIKRLEGQPKANPTVTLFPPSSEELQANKATLVCLISDFYPGAVTVAWKADGSPVKAGVETTKPSKQSNNKYAASSYLSLTPEQWKSHRSYSCQVTHEGSTVEKTVAPTECSGRADCGFTSESYQQGVLSATILYEILLGKATLYAVLVSALVLMAMVKRKDSRGRAKRSGSGVKQTLNFDLLKLAGDVESNPGPTSMDWIWRILFLVGAATGAHSFEEVQLVESGGGLVQPGGSLRLSCAASGYEFSRSWMNWVRQAPGKGLEWVGRIYPGDGDTNYSGKFKGRFTISADTSKNTAYLQMNSLRAEDTAVYYCARDGSSWDWYFDVWGQGTLVTVSSTRASTKGPSVFPLAPSSKSTSGGTAALGCLVKDYFPEPVTVSWNSGALTSGVHTFPAVLQSSGLYSLSSVVTVPSSSLGTQTYICNVNHKPSNTKVDKRVEPKSCIPEDTFFPSPESSCDVKLVEKSFETDTNLNFQNLSVIGFRILLLKVAGFNLLMTLRLWSS

SEQ ID NO: 13876 - protein, 766 aa, Artificial Sequence
  Synthetic Polypeptide
MALPVTALLLPLALLLHAARPEVQLVESGGGLVQPGGSLRLSCAASGFSFSDFWMSWVRQAPGKGLEWVATISQAGSEKDYVDSVKGRFTISRDNAKKSLYLQMNSLRAEDTAVYYCASGVYSFDYRGQGTLVTVSSGTGGGGSGGGGSGGGGSEFDIQMTQSPSSLSASVGDRVTITCRASQTIWSYLNWYQQRPGKAPNLLIYAASSLQSGVPSRFSGRGSGTDFTLTISSLQAEDFATYYCQQSYSIPQIFGQGTKLEIKLEGQPKANPTVTLFPPSSEELQANKATLVCLISDFYPGAVTVAWKADGSPVKAGVETTKPSKQSNNKYAASSYLSLTPEQWKSHRSYSCQVTHEGSTVEKTVAPTECSGRADCGFTSESYQQGVLSATILYEILLGKATLYAVLVSALVLMAMVKRKDSRGRAKRSGSGVKQTLNFDLLKLAGDVESNPGPTSMDWIWRILFLVGAATGAHSFEQVQLQQSGPGLVKPSQTLSLTCAISGDSVSSNSAAWNWIRQSPSRGLEWLGRTYYRSKWYNDYAVSVKSRITINPDTSKNQFSLQLNSVTPEDTAVYYCAREVTGDLEDAFDIWGQGTMVTVSSTRASTKGPSVFPLAPSSKSTSGGTAALGCLVKDYFPEPVTVSWNSGALTSGVHTFPAVLQSSGLYSLSSVVTVPSSSLGTQTYICNVNHKPSNTKVDKRVEPKSCIPEDTFFPSPESSCDVKLVEKSFETDTNLNFQNLSVIGFRILLLKVAGFNLLMTLRLWSS

SEQ ID NO: 13877 - protein, 759 aa, Artificial Sequence
  Synthetic Polypeptide
MALPVTALLLPLALLLHAARPEVQLVESGGGLVQPGGSLRLSCAASGFSFSDFWMSWVRQAPGKGLEWVATISQAGSEKDYVDSVKGRFTISRDNAKKSLYLQMNSLRAEDTAVYYCASGVYSFDYRGQGTLVTVSSGTGGGGSGGGGSGGGGSEFDIQMTQSPATIENTSLSASVGDRVTITCRASQGISSWLTWYQQKPEKAPKSLIYAASSLQSGVPSRFSGSGSGTDFTLTISSLQPEDFATYYCQQYDSYPITFGQGTRLEIKLEGQPKANPTVTLFPPSSEELQANKATLVCLISDFYPGAVTVAWKADGSPVKAGVETTKPSKQSNNKYAASSYLSLTPEQWKSHRSYSCQVTHEGSTVEKTVAPTECSGRADCGFTSESYQQGVLSATILYEILLGKATLYAVLVSALVLMAMVKRKDSRGRAKRSGSGVKQTLNFDLLKLAGDVESNPGPTSMDWIWRILFLVGAATGAHSFEQVQLQQWGAGLLKPSETLSLTCAVYGGSFSAYYWSWIRQPPGKGLEWIGDINHGGGTNYNPSLKSRVTISVDTSKNQFSLKLNSVTAADTAVYYCASLTAYWGQGSLVTVSSTRASTKGPSVFPLAPSSKSTSGGTAALGCLVKDYFPEPVTVSWNSGALTSGVHTFPAVLQSSGLYSLSSVVTVPSSSLGTQTYICNVNHKPSNTKVDKRVEPKSCIPEDTFFPSPESSCDVKLVEKSFETDTNLNFQNLSVIGFRILLLKVAGFNLLMTLRLWSS

SEQ ID NO: 13878 - protein, 764 aa, Artificial Sequence
  Synthetic Polypeptide
MALPVTALLLPLALLLHAARPEVQLVESGGGLVQPGGSLRLSCAASGFSFSDFWMSWVRQAPGKGLEWVATISQAGSEKDYVDSVKGRFTISRDNAKKSLYLQMNSLRAEDTAVYYCASGVYSFDYRGQGTLVTVSSGTGGGGSGGGGSGGGGSEFDEIVLTQSPDSLAVSLGERATINCKASQSVDFDGDSYLNWYQQKPGQPPKVLIYAASTLQSGVPSRFSGSGSGTDFTLTINSLEAEDAATYYCQQSNEDPWTFGGGTKVEIKLEGQPKANPTVTLFPPSSEELQANKATLVCLISDFYPGAVTVAWKADGSPVKAGVETTKPSKQSNNKYAASSYLSLTPEQWKSHRSYSCQVTHEGSTVEKTVAPTECSGRADCGFTSESYQQGVLSATILYEILLGKATLYAVLVSALVLMAMVKRKDSRGRAKRSGSGVKQTLNFDLLKLAGDVESNPGPTSMDWIWRILFLVGAATGAHSFEQVQLVQSGAEVKKPGASVKVSCKVSGYTFTDYYITWVRQAPGQALEWMGWIYPGSGNTKYSQKFQGRFVFSVDTSASTAYLQLSSLKAEDTAVYYCANYGNYWFAYWGQGTLVTVSSTRASTKGPSVFPLAPSSKSTSGGTAALGCLVKDYFPEPVTVSWNSGALTSGVHTFPAVLQSSGLYSLSSVVTVPSSSLGTQTYICNVNHKPSNTKVDKRVEPKSCIPEDTFFPSPESSCDVKLVEKSFETDTNLNFQNLSVIGFRILLLKVAGFNLLMTLRLWSS

SEQ ID NO: 13879 - protein, 761 aa, Artificial Sequence
  Synthetic Polypeptide
MALPVTALLLPLALLLHAARPEVQLVESGGGLVQPGGSLRLSCAASGFSFSDFWMSWVRQAPGKGLEWVATISQAGSEKDYVDSVKGRFTISRDNAKKSLYLQMNSLRAEDTAVYYCASGVYSFDYRGQGTLVTVSSGTGGGGSGGGGSGGGGSEFDIQMTQSPSSLSASVGDRVTITCRASQGISSWLAWYQQKPEKAPKSLIYAASSLQSGVPSRFSGSGSGTDFTLTISSLQPEDFATYYCQQYNSYPPTFGGGTKVEIKLEGQPKANPTVTLFPPSSEELQANKATLVCLISDFYPGAVTVAWKADGSPVKAGVETTKPSKQSNNKYAASSYLSLTPEQWKSHRSYSCQVTHEGSTVEKTVAPTECSGRADCGFTSESYQQGVLSATILYEILLGKATLYAVLVSALVLMAMVKRKDSRGRAKRSGSGVKQTLNFDLLKLAGDVESNPGPTSMDWIWRILFLVGAATGAHSFEEVQLVQSGGGLVHPGGSLRLSCAGSGFAFSSSTMHWIRQAPGKGLEWISLIGSGGGIYYGDSVKGRFTISRDNAKNSLYLQMNSLRAEDMAVYYCVRGYFDWVDYFDYWGQGTLVTVSSTRASTKGPSVFPLAPSSKSTSGGTAALGCLVKDYFPEPVTVSWNSGALTSGVHTFPAVLQSSGLYSLSSVVTVPSSSLGTQTYICNVNHKPSNTKVDKRVEPKSCIPEDTFFPSPESSCDVKLVEKSFETDTNLNFQNLSVIGFRILLLKVAGFNLLMTLRLWSS

SEQ ID NO: 13880 - protein, 771 aa, Artificial Sequence
  Synthetic Polypeptide
MALPVTALLLPLALLLHAARPEVQLVESGGGLVQPGGSLRLSCAASGFSFSDFWMSWVRQAPGKGLEWVATISQAGSEKDYVDSVKGRFTISRDNAKKSLYLQMNSLRAEDTAVYYCASGVYSFDYRGQGTLVTVSSGTGGGGSGGGGSGGGGSEFDDIVMTQSPDSLTVSLGERTTINCKSSQSVLDSSKNKNSLAWYQQKPGQPPKLLLSWASTRESGIPDRFSGSGSGTDFTLTIDSLQPEDSATYYCQQSAHFPITFGQGTRLEIKLEGQPKANPTVTLFPPSSEELQANKATLVCLISDFYPGAVTVAWKADGSPVKAGVETTKPSKQSNNKYAASSYLSLTPEQWKSHRSYSCQVTHEGSTVEKTVAPTECSGRADCGFTSESYQQGVLSATILYEILLGKATLYAVLVSALVLMAMVKRKDSRGRAKRSGSGVKQTLNFDLLKLAGDVESNPGPTSMDWIWRILFLVGAATGAHSFEQVQLVQSGAEVKKPGASVKVSCKASGYTFTNYGMNWVKQAPGQGLKWMGWINTYTGEPTYADDFKGRVTMTSDTSTSTAYLELHNLRSDDTAVYYCARWSWSDGYYVYFDYWGQGTTVTVSSTRASTKGPSVFPLAPSSKSTSGGTAALGCLVKDYFPEPVTVSWNSGALTSGVHTFPAVLQSSGLYSLSSVVTVPSSSLGTQTYICNVNHKPSNTKVDKRVEPKSCIPEDTFFPSPESSCDVKLVEKSFETDTNLNFQNLSVIGFRILLLKVAGFNLLMTLRLWSS

SEQ ID NO: 13881 - protein, 767 aa, Artificial Sequence
  Synthetic Polypeptide
MALPVTALLLPLALLLHAARPEVQLVESGGGLVQPGGSLRLSCAASGFSFSDFWMSWVRQAPGKGLEWVATISQAGSEKDYVDSVKGRFTISRDNAKKSLYLQMNSLRAEDTAVYYCASGVYSFDYRGQGTLVTVSSGTGGGGSGGGGSGGGGSEFDEIVLTQSPGSLAVSPGERVTMSCKSSQSVFFSSSQKNYLAWYQQIPGQSPRLLIYWASTRESGVPDRFTGSGSGTDFTLTISSVQPEDLAIYYCHQYLSSRTFGQGTKLEIKRLEGQPKANPTVTLFPPSSEELQANKATLVCLISDFYPGAVTVAWKADGSPVKAGVETTKPSKQSNNKYAASSYLSLTPEQWKSHRSYSCQVTHEGSTVEKTVAPTECSGRADCGFTSESYQQGVLSATILYEILLGKATLYAVLVSALVLMAMVKRKDSRGRAKRSGSGVKQTLNFDLLKLAGDVESNPGPTSMDWIWRILFLVGAATGAHSFEQVQLQQPGAEVVKPGASVKMSCKASGYTFTSYYIHWIKQTPGQGLEWVGVIYPGNDDISYNQKFQGKATLTADKSSTTAYMQLSSLTSEDSAVYYCAREVRLRYFDVWGQGTTVTVSSTRASTKGPSVFPLAPSSKSTSGGTAALGCLVKDYFPEPVTVSWNSGALTSGVHTFPAVLQSSGLYSLSSVVTVPSSSLGTQTYICNVNHKPSNTKVDKRVEPKSCIPEDTFFPSPESSCDVKLVEKSFETDTNLNFQNLSVIGFRILLLKVAGFNLLMTLRLWSS

SEQ ID NO: 13882 - protein, 771 aa, Artificial Sequence
  Synthetic Polypeptide
MALPVTALLLPLALLLHAARPEVQLVESGGGLVQPGGSLRLSCAASGFSFSDFWMSWVRQAPGKGLEWVATISQAGSEKDYVDSVKGRFTISRDNAKKSLYLQMNSLRAEDTAVYYCASGVYSFDYRGQGTLVTVSSGTGGGGSGGGGSGGGGSEFDVLLTQSPLSLPVTLGQPASISCRSSQTIVHSNGNTYLEWFQQRPGQSPRLLIYQVSNRFSGVPDRFSGSGSGTDFTLKISRVEAEDVGVYYCFQGSHVPRTFGGGTKVEIKRALEGQPKANPTVTLFPPSSEELQANKATLVCLISDFYPGAVTVAWKADGSPVKAGVETTKPSKQSNNKYAASSYLSLTPEQWKSHRSYSCQVTHEGSTVEKTVAPTECSGRADCGFTSESYQQGVLSATILYEILLGKATLYAVLVSALVLMAMVKRKDSRGRAKRSGSGVKQTLNFDLLKLAGDVESNPGPTSMDWIWRILFLVGAATGAHSFEQIQLVQSGSELKKPGASVKVSCKASGYTFTNYGMNWVRQAPGQGLKWMGWINTNTGEPKYAEEFKGRFALSLDTSVSTAYLQINSLKAEDTAVYFCARGYGNYARGAWLAYWGQGTLVTVSSTRASTKGPSVFPLAPSSKSTSGGTAALGCLVKDYFPEPVTVSWNSGALTSGVHTFPAVLQSSGLYSLSSVVTVPSSSLGTQTYICNVNHKPSNTKVDKRVEPKSCIPEDTFFPSPESSCDVKLVEKSFETDTNLNFQNLSVIGFRILLLKVAGFNLLMTLRLWSS

SEQ ID NO: 13883 - protein, 756 aa, Artificial Sequence
  Synthetic Polypeptide
MALPVTALLLPLALLLHAARPEVQLVESGGGLVQPGGSLRLSCAASGFSFSDFWMSWVRQAPGKGLEWVATISQAGSEKDYVDSVKGRFTISRDNAKKSLYLQMNSLRAEDTAVYYCASGVYSFDYRGQGTLVTVSSGTGGGGSGGGGSGGGGSEFDEIVLTQSPATLSLSPGERATLSCSASSSINYIYWLQQKPGQAPRILIYLTSNLASGVPARFSGSGSGTDFTLTISSLEPEDFAVYYCLQWSSNPLTFGGGTKVEIKLEGQPKANPTVTLFPPSSEELQANKATLVCLISDFYPGAVTVAWKADGSPVKAGVETTKPSKQSNNKYAASSYLSLTPEQWKSHRSYSCQVTHEGSTVEKTVAPTECSGRADCGFTSESYQQGVLSATILYEILLGKATLYAVLVSALVLMAMVKRKDSRGRAKRSGSGVKQTLNFDLLKLAGDVESNPGPTSMDWIWRILFLVGAATGAHSFEEVQLVESGGGLVKPGGSLRLSCAASGFTFSSYDMSWVRQAPGKGLEWVSTISSGGSYTYYLDSIKGRFTISRDNAKNSLYLQMNSLRAEDTAVYYCARQGLDYWGRGTLVTVSSTRASTKGPSVFPLAPSSKSTSGGTAALGCLVKDYFPEPVTVSWNSGALTSGVHTFPAVLQSSGLYSLSSVVTVPSSSLGTQTYICNVNHKPSNTKVDKRVEPKSCIPEDTFFPSPESSCDVKLVEKSFETDTNLNFQNLSVIGFRILLLKVAGFNLLMTLRLWSS

SEQ ID NO: 13884 - protein, 765 aa, Artificial Sequence
  Synthetic Polypeptide
MALPVTALLLPLALLLHAARPEVQLVESGGGLVQPGGSLRLSCAASGFSFSDFWMSWVRQAPGKGLEWVATISQAGSEKDYVDSVKGRFTISRDNAKKSLYLQMNSLRAEDTAVYYCASGVYSFDYRGQGTLVTVSSGTGGGGSGGGGSGGGGSEFDIVMTQSPDSLAVSLGERATINCRASKSVSTSGYSFMHWYQQKPGQPPKLLIYLASNLESGVPDRFSGSGSGTDFTLTISSLQAEDVAVYYCQHSREVPWTFGQGTKVEIKRLEGQPKANPTVTLFPPSSEELQANKATLVCLISDFYPGAVTVAWKADGSPVKAGVETTKPSKQSNNKYAASSYLSLTPEQWKSHRSYSCQVTHEGSTVEKTVAPTECSGRADCGFTSESYQQGVLSATILYEILLGKATLYAVLVSALVLMAMVKRKDSRGRAKRSGSGVKQTLNFDLLKLAGDVESNPGPTSMDWIWRILFLVGAATGAHSFEQVQLVQSGAEVKKPGASVKVSCKASGYTFTNYGMNWVRQAPGQGLEWMGWINTYTGEPTYADAFKGRFAFSLDTSTSTAYLQINSLRSDDTAVYYCARDYGDYGMDYWGQGTTVTVSSTRASTKGPSVFPLAPSSKSTSGGTAALGCLVKDYFPEPVTVSWNSGALTSGVHTFPAVLQSSGLYSLSSVVTVPSSSLGTQTYICNVNHKPSNTKVDKRVEPKSCIPEDTFFPSPESSCDVKLVEKSFETDTNLNFQNLSVIGFRILLLKVAGFNLLMTLRLWSS

SEQ ID NO: 13885 - protein, 761 aa, Artificial Sequence
  Synthetic Polypeptide
MALPVTALLLPLALLLHAARPEVQLVESGGGLVQPGGSLRLSCAASGFSFSDFWMSWVRQAPGKGLEWVATISQAGSEKDYVDSVKGRFTISRDNAKKSLYLQMNSLRAEDTAVYYCASGVYSFDYRGQGTLVTVSSGTGGGGSGGGGSGGGGSEFDIVMTQTPLTLSVTIGQPASISCKSSQSLLDSDGKTYLNWLLQRPGQSPERLIYLVSKLDSGVPDRFTGSGSGTDFTLKISRVEAEDLGVYCCWQGTHFPYTFGGGTKVEIKGLEGQPKANPTVTLFPPSSEELQANKATLVCLISDFYPGAVTVAWKADGSPVKAGVETTKPSKQSNNKYAASSYLSLTPEQWKSHRSYSCQVTHEGSTVEKTVAPTECSGRADCGFTSESYQQGVLSATILYEILLGKATLYAVLVSALVLMAMVKRKDSRGRAKRSGSGVKQTLNFDLLKLAGDVESNPGPTSMDWIWRILFLVGAATGAHSFEQVQLQQPGAELVRPGASVKLSCKASGYTFTSYWMNWVKQRPGQGLEWIGMIDPSDSETHYNHIFKDKATLTVDKSSSTAYLQLSSLTSEDSAVYYCARNLYLWGQGTSVTVSSTRASTKGPSVFPLAPSSKSTSGGTAALGCLVKDYFPEPVTVSWNSGALTSGVHTFPAVLQSSGLYSLSSVVTVPSSSLGTQTYICNVNHKPSNTKVDKRVEPKSCIPEDTFFPSPESSCDVKLVEKSFETDTNLNFQNLSVIGFRILLLKVAGFNLLMTLRLWSS

SEQ ID NO: 13886 - protein, 769 aa, Artificial Sequence
  Synthetic Polypeptide
MALPVTALLLPLALLLHAARPEVQLVESGGGLVQPGGSLRLSCAASGFSFSDFWMSWVRQAPGKGLEWVATISQAGSEKDYVDSVKGRFTISRDNAKKSLYLQMNSLRAEDTAVYYCASGVYSFDYRGQGTLVTVSSGTGGGGSGGGGSGGGGSEFDIVMTQSPDSLAVSLGERATINCESSQSLLNSGNQKNYLTWYQQKPGQPPKPLIYWASTRESGVPDRFSGSGSGTDFTLTISSLQAEDVAVYYCQNDYSYPYTFGQGTKLEIKRLEGQPKANPTVTLFPPSSEELQANKATLVCLISDFYPGAVTVAWKADGSPVKAGVETTKPSKQSNNKYAASSYLSLTPEQWKSHRSYSCQVTHEGSTVEKTVAPTECSGRADCGFTSESYQQGVLSATILYEILLGKATLYAVLVSALVLMAMVKRKDSRGRAKRSGSGVKQTLNFDLLKLAGDVESNPGPTSMDWIWRILFLVGAATGAHSFEEVQLVQSGAEVKKPGESLKISCKGSGYSFTDYYMKWARQMPGKGLEWMGDIIPSNGATFYNQKFKGQVTISADKSISTTYLQWSSLKASDTAMYYCARSHLLRASWFAYWGQGTMVTVSSTRASTKGPSVFPLAPSSKSTSGGTAALGCLVKDYFPEPVTVSWNSGALTSGVHTFPAVLQSSGLYSLSSVVTVPSSSLGTQTYICNVNHKPSNTKVDKRVEPKSCIPEDTFFPSPESSCDVKLVEKSFETDTNLNFQNLSVIGFRILLLKVAGFNLLMTLRLWSS

SEQ ID NO: 13887 - protein, 764 aa, Artificial Sequence
  Synthetic Polypeptide
MALPVTALLLPLALLLHAARPEVQLVESGGGLVQPGGSLRLSCAASGFSFSDFWMSWVRQAPGKGLEWVATISQAGSEKDYVDSVKGRFTISRDNAKKSLYLQMNSLRAEDTAVYYCASGVYSFDYRGQGTLVTVSSGTGGGGSGGGGSGGGGSEFDIQMTQSTSSLSASLGDRVTISCSASQGINNYLNWYQQKPDGTVELLIYYTSTLQSGVPSRFSGSGSGTDYSLTISNLEPEDIGTYYCQQYSKLPRTFGGGTKLEIKLEGQPKANPTVTLFPPSSEELQANKATLVCLISDFYPGAVTVAWKADGSPVKAGVETTKPSKQSNNKYAASSYLSLTPEQWKSHRSYSCQVTHEGSTVEKTVAPTECSGRADCGFTSESYQQGVLSATILYEILLGKATLYAVLVSALVLMAMVKRKDSRGRAKRSGSGVKQTLNFDLLKLAGDVESNPGPTSMDWIWRILFLVGAATGAHSFEQVQLQQSGSELMMPGASVKISCKATGYTFSNYWIEWVKQRPGHGLEWIGEILPGTGRTIYNEKFKGKATFTADISSNTVQMQLSSLTSEDSAVYYCARRDYYGNFYYAMDYWGQGTSVTVSSTRASTKGPSVFPLAPSSKSTSGGTAALGCLVKDYFPEPVTVSWNSGALTSGVHTFPAVLQSSGLYSLSSVVTVPSSSLGTQTYICNVNHKPSNTKVDKRVEPKSCIPEDTFFPSPESSCDVKLVEKSFETDTNLNFQNLSVIGFRILLLKVAGFNLLMTLRLWSS

SEQ ID NO: 13888 - protein, 759 aa, Artificial Sequence
  Synthetic Polypeptide
MALPVTALLLPLALLLHAARPEVQLVESGGGLVQPGGSLRLSCAASGFSFSDFWMSWVRQAPGKGLEWVATISQAGSEKDYVDSVKGRFTISRDNAKKSLYLQMNSLRAEDTAVYYCASGVYSFDYRGQGTLVTVSSGTGGGGSGGGGSGGGGSEFDIQMTQSPASLSVSVGETVTITCRASENIYSNLAWYQQKQGKSPQLLVYAATNLADGVPSRFSGSGSGTQYSLKINSLQSEDFGSYYCQHFWGTWTFGGGTTLEIKLEGQPKANPTVTLFPPSSEELQANKATLVCLISDFYPGAVTVAWKADGSPVKAGVETTKPSKQSNNKYAASSYLSLTPEQWKSHRSYSCQVTHEGSTVEKTVAPTECSGRADCGFTSESYQQGVLSATILYEILLGKATLYAVLVSALVLMAMVKRKDSRGRAKRSGSGVKQTLNFDLLKLAGDVESNPGPTSMDWIWRILFLVGAATGAHSFEEVQLQQSGPELVKPGASVKMSCKASGYTFTDYYMKWMKQSHGKSLEWIGDINPNNGGTTYNQKFKGKATLTVDKSSSTAYMQLNSLTSEDSAVYYCARDYGYGYFDYWGQGTTLTVSSTRASTKGPSVFPLAPSSKSTSGGTAALGCLVKDYFPEPVTVSWNSGALTSGVHTFPAVLQSSGLYSLSSVVTVPSSSLGTQTYICNVNHKPSNTKVDKRVEPKSCIPEDTFFPSPESSCDVKLVEKSFETDTNLNFQNLSVIGFRILLLKVAGFNLLMTLRLWSS

SEQ ID NO: 13889 - protein, 762 aa, Artificial Sequence
  Synthetic Polypeptide
MALPVTALLLPLALLLHAARPEVQLVESGGGLVQPGGSLRLSCAASGFSFSDFWMSWVRQAPGKGLEWVATISQAGSEKDYVDSVKGRFTISRDNAKKSLYLQMNSLRAEDTAVYYCASGVYSFDYRGQGTLVTVSSGTGGGGSGGGGSGGGGSEFEIVLTQSPGTLSLSPGERATLSCRASQSVGGYLAWYQQKPGQAPRLLIYDASNRATGIPARFSGSGSGTDFTLTISSLEPEDFAVYYCQQRNNWPPMYTFGQGTKLEIKRLEGQPKANPTVTLFPPSSEELQANKATLVCLISDFYPGAVTVAWKADGSPVKAGVETTKPSKQSNNKYAASSYLSLTPEQWKSHRSYSCQVTHEGSTVEKTVAPTECSGRADCGFTSESYQQGVLSATILYEILLGKATLYAVLVSALVLMAMVKRKDSRGRAKRSGSGVKQTLNFDLLKLAGDVESNPGPTSMDWIWRILFLVGAATGAHSFEQVQLVQSGAEVKKPGSSVKVSCKASGGTFSSYAISWVRQAPGQGLEWMGGIIPILGTANYAQKFQGRVTITADESTSTAYMELSSLRSEDTAVYYCARWGGGAFDIWGQGTMVTVSSTRASTKGPSVFPLAPSSKSTSGGTAALGCLVKDYFPEPVTVSWNSGALTSGVHTFPAVLQSSGLYSLSSVVTVPSSSLGTQTYICNVNHKPSNTKVDKRVEPKSCIPEDTFFPSPESSCDVKLVEKSFETDTNLNFQNLSVIGFRILLLKVAGFNLLMTLRLWSS

SEQ ID NO: 13890 - protein, 757 aa, Artificial Sequence
  Synthetic Polypeptide
MALPVTALLLPLALLLHAARPEVQLVESGGGLVQPGGSLRLSCAASGFSFSDFWMSWVRQAPGKGLEWVATISQAGSEKDYVDSVKGRFTISRDNAKKSLYLQMNSLRAEDTAVYYCASGVYSFDYRGQGTLVTVSSGTGGGGSGGGGSGGGGSEFQIVLTQSPALMSASPGEKVTMTCSASSSVRYMYWYQQKPRSSPKPWIHLTSNLASGVPARFSGSGSGTSYSLTISSMEAEDAATYYCQQWSSHPFTFGSGTKLEIKLEGQPKANPTVTLFPPSSEELQANKATLVCLISDFYPGAVTVAWKADGSPVKAGVETTKPSKQSNNKYAASSYLSLTPEQWKSHRSYSCQVTHEGSTVEKTVAPTECSGRADCGFTSESYQQGVLSATILYEILLGKATLYAVLVSALVLMAMVKRKDSRGRAKRSGSGVKQTLNFDLLKLAGDVESNPGPTSMDWIWRILFLVGAATGAHSFEDVQLQESGPGLVKPSQSLSLTCTVTGFSITSDYSWNWIRQFPGNKLEWMGYISYSGHTSYNPSLESRISITRDTSKNQFFLQLNSVTTEDTATYYCTRGNWDVVYWGQGTLVTVSATRASTKGPSVFPLAPSSKSTSGGTAALGCLVKDYFPEPVTVSWNSGALTSGVHTFPAVLQSSGLYSLSSVVTVPSSSLGTQTYICNVNHKPSNTKVDKRVEPKSCIPEDTFFPSPESSCDVKLVEKSFETDTNLNFQNLSVIGFRILLLKVAGFNLLMTLRLWSS

SEQ ID NO: 13891 - protein, 767 aa, Artificial Sequence
  Synthetic Polypeptide
MALPVTALLLPLALLLHAARPEVQLVESGGGLVQPGGSLRLSCAASGFSFSDFWMSWVRQAPGKGLEWVATISQAGSEKDYVDSVKGRFTISRDNAKKSLYLQMNSLRAEDTAVYYCASGVYSFDYRGQGTLVTVSSGTGGGGSGGGGSGGGGSEFDVVMTQSPLSLPVTLGQPASISCRSSQSIVHSDGNTYLEWYQQRPGQSPRRLIYKVSNRFSGVPDRFSGSGSGTDFTLKISRVEAEDVGVYYCFQGSHAPWTFGGGTKVEIKLEGQPKANPTVTLFPPSSEELQANKATLVCLISDFYPGAVTVAWKADGSPVKAGVETTKPSKQSNNKYAASSYLSLTPEQWKSHRSYSCQVTHEGSTVEKTVAPTECSGRADCGFTSESYQQGVLSATILYEILLGKATLYAVLVSALVLMAMVKRKDSRGRAKRSGSGVKQTLNFDLLKLAGDVESNPGPTSMDWIWRILFLVGAATGAHSFEEVQLVESGGGLVQPGGSLRLSCAASGFTFSSYGMHWVRQAPGKGLEWVAYITTRSSTIYYADSVKGRFTISRDNAKNSLYLQMNSLRAEDTAVYYCTREPLTGYYAMDYWGQGTSVTVSSTRASTKGPSVFPLAPSSKSTSGGTAALGCLVKDYFPEPVTVSWNSGALTSGVHTFPAVLQSSGLYSLSSVVTVPSSSLGTQTYICNVNHKPSNTKVDKRVEPKSCIPEDTFFPSPESSCDVKLVEKSFETDTNLNFQNLSVIGFRILLLKVAGFNLLMTLRLWSS

SEQ ID NO: 13892 - protein, 759 aa, Artificial Sequence
  Synthetic Polypeptide
MALPVTALLLPLALLLHAARPEVQLVESGGGLVQPGGSLRLSCAASGFSFSDFWMSWVRQAPGKGLEWVATISQAGSEKDYVDSVKGRFTISRDNAKKSLYLQMNSLRAEDTAVYYCASGVYSFDYRGQGTLVTVSSGTGGGGSGGGGSGGGGSEFDIQMTQSPSSLSASVGDRVTITCRASQSISLWLNWYQQKPGKAPKLLIYAASTLQSGVPSRFSGSGSGTDFTLTISSLQPEDFATYYCQQYYTSPYTFGQGTKVEIKRLEGQPKANPTVTLFPPSSEELQANKATLVCLISDFYPGAVTVAWKADGSPVKAGVETTKPSKQSNNKYAASSYLSLTPEQWKSHRSYSCQVTHEGSTVEKTVAPTECSGRADCGFTSESYQQGVLSATILYEILLGKATLYAVLVSALVLMAMVKRKDSRGRAKRSGSGVKQTLNFDLLKLAGDVESNPGPTSMDWIWRILFLVGAATGAHSFEQVQLLESGGGLVQPGGSLRLSCAASGFTFSSYAMSWVRQAPGKGLEWVSVIRSSGSSTYYADSVKGRFTISRDNSKNTLYLQMNSLRAEDTAVYYCARGGGYFDYWGQGTLVTVSSTRASTKGPSVFPLAPSSKSTSGGTAALGCLVKDYFPEPVTVSWNSGALTSGVHTFPAVLQSSGLYSLSSVVTVPSSSLGTQTYICNVNHKPSNTKVDKRVEPKSCIPEDTFFPSPESSCDVKLVEKSFETDTNLNFQNLSVIGFRILLLKVAGFNLLMTLRLWSS

SEQ ID NO: 13893 - protein, 762 aa, Artificial Sequence
  Synthetic Polypeptide
MALPVTALLLPLALLLHAARPEVQLVESGGGLVQPGGSLRLSCAASGFSFSDFWMSWVRQAPGKGLEWVATISQAGSEKDYVDSVKGRFTISRDNAKKSLYLQMNSLRAEDTAVYYCASGVYSFDYRGQGTLVTVSSGTGGGGSGGGGSGGGGSEFDIQMTQSPSSLSASVGDRVTITCRASQSISSYLNWYQQKPGKAPKLLIYAVSTLQSGVPSRFSGSGSGTDFTLTISSLQPEDFATYYCQQSGTFPPTTFGQGTKVEIKRLEGQPKANPTVTLFPPSSEELQANKATLVCLISDFYPGAVTVAWKADGSPVKAGVETTKPSKQSNNKYAASSYLSLTPEQWKSHRSYSCQVTHEGSTVEKTVAPTECSGRADCGFTSESYQQGVLSATILYEILLGKATLYAVLVSALVLMAMVKRKDSRGRAKRSGSGVKQTLNFDLLKLAGDVESNPGPTSMDWIWRILFLVGAATGAHSFEQVQLLESGGGLVQPGGSLRLSCAASGFTFSSHGMHWVRQAPGKGLEWVSVISGSGSNTGYADSVKGRFTISRDNSKNTLYLQMNSLRAEDTAVYYCARQWGSYAFDSWGQGTLVTVSSTRASTKGPSVFPLAPSSKSTSGGTAALGCLVKDYFPEPVTVSWNSGALTSGVHTFPAVLQSSGLYSLSSVVTVPSSSLGTQTYICNVNHKPSNTKVDKRVEPKSCIPEDTFFPSPESSCDVKLVEKSFETDTNLNFQNLSVIGFRILLLKVAGFNLLMTLRLWSS

SEQ ID NO: 13894 - protein, 772 aa, Artificial Sequence
  Synthetic Polypeptide
MALPVTALLLPLALLLHAARPEVQLVESGGGLVQPGGSLRLSCAASGFSFSDFWMSWVRQAPGKGLEWVATISQAGSEKDYVDSVKGRFTISRDNAKKSLYLQMNSLRAEDTAVYYCASGVYSFDYRGQGTLVTVSSGTGGGGSGGGGSGGGGSEFDIVMSQSPSSLAVSVGEKVTMSCKSSQSLLHSSNQKNYLAWYQQKPGQSPKVLIYWASTRESGVPDRFTGSGSGTDFTLTITSVKSEDLAVYYCQQYYSYPWTFGGGTRLEIKRLEGQPKANPTVTLFPPSSEELQANKATLVCLISDFYPGAVTVAWKADGSPVKAGVETTKPSKQSNNKYAASSYLSLTPEQWKSHRSYSCQVTHEGSTVEKTVAPTECSGRADCGFTSESYQQGVLSATILYEILLGKATLYAVLVSALVLMAMVKRKDSRGRAKRSGSGVKQTLNFDLLKLAGDVESNPGPTSMDWIWRILFLVGAATGAHSFEEVQLQQSVAELVKPGASVKMSCKVSGYTLTDHTIHWMKQRPEQGLEWIGYIYPRDGITGYNEKFKGKATLTADTSSSTAYMQLNSLTSEDSAVYFCARWGYSYRNYAYYYDYWGQGTTLTVSSTRASTKGPSVFPLAPSSKSTSGGTAALGCLVKDYFPEPVTVSWNSGALTSGVHTFPAVLQSSGLYSLSSVVTVPSSSLGTQTYICNVNHKPSNTKVDKRVEPKSCIPEDTFFPSPESSCDVKLVEKSFETDTNLNFQNLSVIGFRILLLKVAGFNLLMTLRLWSS

SEQ ID NO: 13895 - protein, 769 aa, Artificial Sequence
  Synthetic Polypeptide
MALPVTALLLPLALLLHAARPEVQLVESGGGLVQPGGSLRLSCAASGFSFSDFWMSWVRQAPGKGLEWVATISQAGSEKDYVDSVKGRFTISRDNAKKSLYLQMNSLRAEDTAVYYCASGVYSFDYRGQGTLVTVSSGTGGGGSGGGGSGGGGSEFEIVLTQSPGTLSLSPGERATLSCRASQSVSSSYLAWYQQKPGQAPRLLIYGTSSRATGIPDRFSGSGSGTDFTLTISRLEPEDFAVYYCQQYGSSPFTFGGGTKVEIKRLEGQPKANPTVTLFPPSSEELQANKATLVCLISDFYPGAVTVAWKADGSPVKAGVETTKPSKQSNNKYAASSYLSLTPEQWKSHRSYSCQVTHEGSTVEKTVAPTECSGRADCGFTSESYQQGVLSATILYEILLGKATLYAVLVSALVLMAMVKRKDSRGRAKRSGSGVKQTLNFDLLKLAGDVESNPGPTSMDWIWRILFLVGAATGAHSFEQVQLQESGPGLAKPSETLSLTCTVSGDSITSYYWSWIRQPPGKGLEWIGYIYYSGSTNYNPSLKSRVTISVDTSKNQFSLKLSSVTAADTAVYYCARDQRRIAAAGTHFYGMDVWGQGTTVTVSSTRASTKGPSVFPLAPSSKSTSGGTAALGCLVKDYFPEPVTVSWNSGALTSGVHTFPAVLQSSGLYSLSSVVTVPSSSLGTQTYICNVNHKPSNTKVDKRVEPKSCIPEDTFFPSPESSCDVKLVEKSFETDTNLNFQNLSVIGFRILLLKVAGFNLLMTLRLWSS

SEQ ID NO: 13896 - protein, 761 aa, Artificial Sequence
  Synthetic Polypeptide
MALPVTALLLPLALLLHAARPEVQLVESGGGLVQPGGSLRLSCAASGFSFSDFWMSWVRQAPGKGLEWVATISQAGSEKDYVDSVKGRFTISRDNAKKSLYLQMNSLRAEDTAVYYCASGVYSFDYRGQGTLVTVSSGTGGGGSGGGGSGGGGSEFDILLTQSPVILSVSPGERVSFSCRASQSIGTNIHWYQQRTNGSPRLLIKYASESISGIPSRFSGSGSGTDFTLSINSVESEDIADYYCQQNNNWPTTFGAGTKLELKLEGQPKANPTVTLFPPSSEELQANKATLVCLISDFYPGAVTVAWKADGSPVKAGVETTKPSKQSNNKYAASSYLSLTPEQWKSHRSYSCQVTHEGSTVEKTVAPTECSGRADCGFTSESYQQGVLSATILYEILLGKATLYAVLVSALVLMAMVKRKDSRGRAKRSGSGVKQTLNFDLLKLAGDVESNPGPTSMDWIWRILFLVGAATGAHSFEQVQLKQSGPGLVQPSQSLSITCTVSGFSLTNYGVHWVRQSPGKGLEWLGVIWSGGNTDYNTPFTSRLSINKDNSKSQVFFKMNSLQSNDTAIYYCARALTYYDYEFAYWGQGTLVTVSATRASTKGPSVFPLAPSSKSTSGGTAALGCLVKDYFPEPVTVSWNSGALTSGVHTFPAVLQSSGLYSLSSVVTVPSSSLGTQTYICNVNHKPSNTKVDKRVEPKSCIPEDTFFPSPESSCDVKLVEKSFETDTNLNFQNLSVIGFRILLLKVAGFNLLMTLRLWSS

SEQ ID NO: 13897 - protein, 754 aa, Artificial Sequence
  Synthetic Polypeptide
MALPVTALLLPLALLLHAARPEVQLVESGGGLVQPGGSLRLSCAASGFSFSDFWMSWVRQAPGKGLEWVATISQAGSEKDYVDSVKGRFTISRDNAKKSLYLQMNSLRAEDTAVYYCASGVYSFDYRGQGTLVTVSSGTGGGGSGGGGSGGGGSEFMTQSPKFLLVSAGDRVTLTCKASQSVNNDVYWYQQEPGQSPKLLIYWASTRESGVPDRFTGSGSGTDFTLTISSVQAEDLAVYYCKQSYNLYTFGGGTKLEIKRLEGQPKANPTVTLFPPSSEELQANKATLVCLISDFYPGAVTVAWKADGSPVKAGVETTKPSKQSNNKYAASSYLSLTPEQWKSHRSYSCQVTHEGSTVEKTVAPTECSGRADCGFTSESYQQGVLSATILYEILLGKATLYAVLVSALVLMAMVKRKDSRGRAKRSGSGVKQTLNFDLLKLAGDVESNPGPTSMDWIWRILFLVGAATGAHSFEESGRGLVQPGGSRKLSCAASGFTFSTSGMHWVRQAPEKGLEWVAYISSGSTTIYHADTVKGRFTISRDNPKNTLFLQMTSLRSEDTAMYYCCARSGQFGNYFDYWGQGTTLTVSSTRASTKGPSVFPLAPSSKSTSGGTAALGCLVKDYFPEPVTVSWNSGALTSGVHTFPAVLQSSGLYSLSSVVTVPSSSLGTQTYICNVNHKPSNTKVDKRVEPKSCIPEDTFFPSPESSCDVKLVEKSFETDTNLNFQNLSVIGFRILLLKVAGFNLLMTLRLWSS

SEQ ID NO: 13898 - protein, 759 aa, Artificial Sequence
  Synthetic Polypeptide
MALPVTALLLPLALLLHAARPEVQLVESGGGLVQPGGSLRLSCAASGFSFSDFWMSWVRQAPGKGLEWVATISQAGSEKDYVDSVKGRFTISRDNAKKSLYLQMNSLRAEDTAVYYCASGVYSFDYRGQGTLVTVSSGTGGGGSGGGGSGGGGSEFQSPSSLAVSAGEKVTMSCKSSQSLLNSRTRKNYLAWYQQKPGQSPKLLIYWASTRESGVPDRFTGSGSGTDFTLTISSVQAEDLAVYYCKQSNLYTFGGGTKLEIKLEGQPKANPTVTLFPPSSEELQANKATLVCLISDFYPGAVTVAWKADGSPVKAGVETTKPSKQSNNKYAASSYLSLTPEQWKSHRSYSCQVTHEGSTVEKTVAPTECSGRADCGFTSESYQQGVLSATILYEILLGKATLYAVLVSALVLMAMVKRKDSRGRAKRSGSGVKQTLNFDLLKLAGDVESNPGPTSMDWIWRILFLVGAATGAHSFEQVQLEESGPELVKPGASVKLSCKASGYTFTEYIIHWVKQRSGQGLEWIGWFYPGSGSIKYNEKFKDKATLTADKSSSTVYMELSGLTSEDSAVYFCARHDGYSYFDYWGQGTTLTVSSTRASTKGPSVFPLAPSSKSTSGGTAALGCLVKDYFPEPVTVSWNSGALTSGVHTFPAVLQSSGLYSLSSVVTVPSSSLGTQTYICNVNHKPSNTKVDKRVEPKSCIPEDTFFPSPESSCDVKLVEKSFETDTNLNFQNLSVIGFRILLLKVAGFNLLMTLRLWSS

SEQ ID NO: 13899 - protein, 762 aa, Artificial Sequence
  Synthetic Polypeptide
MALPVTALLLPLALLLHAARPEVQLVESGGGLVQPGGSLRLSCAASGFSFSDFWMSWVRQAPGKGLEWVATISQAGSEKDYVDSVKGRFTISRDNAKKSLYLQMNSLRAEDTAVYYCASGVYSFDYRGQGTLVTVSSGTGGGGSGGGGSGGGGSEFDIQMTQSPSSLSASLGERVSLTCRATQELSGYLSWLQQKPDGTIKRLIYAASTLDSGVPKRFSGNRSGSDYSLTISSLESEDFADYYCLQYAIYPYTFGGGTKLEIKLEGQPKANPTVTLFPPSSEELQANKATLVCLISDFYPGAVTVAWKADGSPVKAGVETTKPSKQSNNKYAASSYLSLTPEQWKSHRSYSCQVTHEGSTVEKTVAPTECSGRADCGFTSESYQQGVLSATILYEILLGKATLYAVLVSALVLMAMVKRKDSRGRAKRSGSGVKQTLNFDLLKLAGDVESNPGPTSMDWIWRILFLVGAATGAHSFEEVQLQQSGPELVKPGASVKMSCKASGYTFTSYFIHWVKQKPGQGLEWIGFINPYNDGSKYNEKFKGKATLTSDKSSSTAYMELSSLTSEDSAVYYCTRDDGYYGYAMDYWGQGTSVTVSSTRASTKGPSVFPLAPSSKSTSGGTAALGCLVKDYFPEPVTVSWNSGALTSGVHTFPAVLQSSGLYSLSSVVTVPSSSLGTQTYICNVNHKPSNTKVDKRVEPKSCIPEDTFFPSPESSCDVKLVEKSFETDTNLNFQNLSVIGFRILLLKVAGFNLLMTLRLWSS

SEQ ID NO: 13900 - protein, 767 aa, Artificial Sequence
  Synthetic Polypeptide
MALPVTALLLPLALLLHAARPEVQLVESGGGLVQPGGSLRLSCAASGFSFSDFWMSWVRQAPGKGLEWVATISQAGSEKDYVDSVKGRFTISRDNAKKSLYLQMNSLRAEDTAVYYCASGVYSFDYRGQGTLVTVSSGTGGGGSGGGGSGGGGSEFDTIVLTQSPASLAVSLGQRATISCRASESVDSYGNSFMHWYQQKPGQPPKLLIYLASNLESGVPARFSGSGSRTDFTLTIDPVEADDAATYYCQQNNYDPWTFGGGTKLEIKLEGQPKANPTVTLFPPSSEELQANKATLVCLISDFYPGAVTVAWKADGSPVKAGVETTKPSKQSNNKYAASSYLSLTPEQWKSHRSYSCQVTHEGSTVEKTVAPTECSGRADCGFTSESYQQGVLSATILYEILLGKATLYAVLVSALVLMAMVKRKDSRGRAKRSGSGVKQTLNFDLLKLAGDVESNPGPTSMDWIWRILFLVGAATGAHSFEEVQLQQSGPELVKPGASVKMSCKASGYTFTSYVMHWVKQKPGQGLEWIGYINPYNDGTKYNEKFKGKATLTSDTSSSTAYMELNSLTSEDSAVYFCARPIYFDNDYFDYWGQGTTLKVSSTRASTKGPSVFPLAPSSKSTSGGTAALGCLVKDYFPEPVTVSWNSGALTSGVHTFPAVLQSSGLYSLSSVVTVPSSSLGTQTYICNVNHKPSNTKVDKRVEPKSCIPEDTFFPSPESSCDVKLVEKSFETDTNLNFQNLSVIGFRILLLKVAGFNLLMTLRLWSS

SEQ ID NO: 13901 - protein, 762 aa, Artificial Sequence
  Synthetic Polypeptide
MALPVTALLLPLALLLHAARPEVQLVESGGGLVQPGGSLRLSCAASGFSFSDFWMSWVRQAPGKGLEWVATISQAGSEKDYVDSVKGRFTISRDNAKKSLYLQMNSLRAEDTAVYYCASGVYSFDYRGQGTLVTVSSGTGGGGSGGGGSGGGGSEFDIQMTQSPSSLSASVGDRVTITCKASQDVGIAVAWYQQKPGKVPKLLIYWASTRHTGVPDRFSGSGSGTDFTLTISSLQPEDVATYYCQQYSSYPYTFGQGTKVEIKRLEGQPKANPTVTLFPPSSEELQANKATLVCLISDFYPGAVTVAWKADGSPVKAGVETTKPSKQSNNKYAASSYLSLTPEQWKSHRSYSCQVTHEGSTVEKTVAPTECSGRADCGFTSESYQQGVLSATILYEILLGKATLYAVLVSALVLMAMVKRKDSRGRAKRSGSGVKQTLNFDLLKLAGDVESNPGPTSMDWIWRILFLVGAATGAHSFEEVQLVESGGGLVQPGGSLRLSCAASGFDFSRYWMSWVRQAPGKGLEWIGEINPDSSTINYAPSLKDKFIISRDNAKNSLYLQMNSLRAEDTAVYYCARPDGNYWYFDVWGQGTLVTVSSTRASTKGPSVFPLAPSSKSTSGGTAALGCLVKDYFPEPVTVSWNSGALTSGVHTFPAVLQSSGLYSLSSVVTVPSSSLGTQTYICNVNHKPSNTKVDKRVEPKSCIPEDTFFPSPESSCDVKLVEKSFETDTNLNFQNLSVIGFRILLLKVAGFNLLMTLRLWSS

SEQ ID NO: 13902 - protein, 762 aa, Artificial Sequence
  Synthetic Polypeptide
MALPVTALLLPLALLLHAARPEVQLVESGGGLVQPGGSLRLSCAASGFSFSDFWMSWVRQAPGKGLEWVATISQAGSEKDYVDSVKGRFTISRDNAKKSLYLQMNSLRAEDTAVYYCASGVYSFDYRGQGTLVTVSSGTGGGGSGGGGSGGGGSEFDIVMTQSQKSMSTSVGDRVSITCKASQDVITGVAWYQQKPGQSPKLLIYSASYRYTGVPDRFTGSGSGTDFTFTISNVQAEDLAVYYCQQHYSTPLTFGAGTKLELKLEGQPKANPTVTLFPPSSEELQANKATLVCLISDFYPGAVTVAWKADGSPVKAGVETTKPSKQSNNKYAASSYLSLTPEQWKSHRSYSCQVTHEGSTVEKTVAPTECSGRADCGFTSESYQQGVLSATILYEILLGKATLYAVLVSALVLMAMVKRKDSRGRAKRSGSGVKQTLNFDLLKLAGDVESNPGPTSMDWIWRILFLVGAATGAHSFEQVQLQQPGAELVRPGASVKLSCKASGYSFTTYWMNWVKQRPGQGLEWIGMIHPSDSETRLNQKFKDKATLTVDKSSSTAYMQLSSPTSEDSAVYYCARSTMIATRAMDYWGQGTSVTVSSTRASTKGPSVFPLAPSSKSTSGGTAALGCLVKDYFPEPVTVSWNSGALTSGVHTFPAVLQSSGLYSLSSVVTVPSSSLGTQTYICNVNHKPSNTKVDKRVEPKSCIPEDTFFPSPESSCDVKLVEKSFETDTNLNFQNLSVIGFRILLLKVAGFNLLMTLRLWSS

SEQ ID NO: 13903 - protein, 768 aa, Artificial Sequence
  Synthetic Polypeptide
MALPVTALLLPLALLLHAARPEVQLVESGGGLVQPGGSLRLSCAASGFSFSDFWMSWVRQAPGKGLEWVATISQAGSEKDYVDSVKGRFTISRDNAKKSLYLQMNSLRAEDTAVYYCASGVYSFDYRGQGTLVTVSSGTGGGGSGGGGSGGGGSEFQSVLTQPPSVSGAPGQRVTISCTGSGSNIGAPYDVSWYQQLPGTAPKLLIYHNNKRPSGVPDRFSGSKSGTSASLAITGLQAEDEADYYCATVEAGLSGSVFGGGTKLTVLGALEGQPKANPTVTLFPPSSEELQANKATLVCLISDFYPGAVTVAWKADGSPVKAGVETTKPSKQSNNKYAASSYLSLTPEQWKSHRSYSCQVTHEGSTVEKTVAPTECSGRADCGFTSESYQQGVLSATILYEILLGKATLYAVLVSALVLMAMVKRKDSRGRAKRSGSGVKQTLNFDLLKLAGDVESNPGPTSMDWIWRILFLVGAATGAHSFEQVQLVQSGAEVKKPGASVKVSCKVSGYTLTELSIHWVRQAPGKGLEWMGGFDPEENEIVYAQRFQGRVTMTEDTSTDTAYMELSSLRSEDTAVYYCAIVGSFSPLTLGLWGQGTMVTVSSTRASTKGPSVFPLAPSSKSTSGGTAALGCLVKDYFPEPVTVSWNSGALTSGVHTFPAVLQSSGLYSLSSVVTVPSSSLGTQTYICNVNHKPSNTKVDKRVEPKSCIPEDTFFPSPESSCDVKLVEKSFETDTNLNFQNLSVIGFRILLLKVAGFNLLMTLRLWSS

SEQ ID NO: 13904 - protein, 768 aa, Artificial Sequence
  Synthetic Polypeptide
MALPVTALLLPLALLLHAARPEVQLVESGGGLVQPGGSLRLSCAASGFSFSDFWMSWVRQAPGKGLEWVATISQAGSEKDYVDSVKGRFTISRDNAKKSLYLQMNSLRAEDTAVYYCASGVYSFDYRGQGTLVTVSSGTGGGGSGGGGSGGGGSEFQSVLTQPPSVSGAPGQRVTISCTGSGSNIGAPYDVSWYQQLPGTAPKLLIYHNNKRPSGVPDRFSGSKSGTSASLAITGLQAEDEADYYCQSYDSSSISTIFGGGTKLTVLGALEGQPKANPTVTLFPPSSEELQANKATLVCLISDFYPGAVTVAWKADGSPVKAGVETTKPSKQSNNKYAASSYLSLTPEQWKSHRSYSCQVTHEGSTVEKTVAPTECSGRADCGFTSESYQQGVLSATILYEILLGKATLYAVLVSALVLMAMVKRKDSRGRAKRSGSGVKQTLNFDLLKLAGDVESNPGPTSMDWIWRILFLVGAATGAHSFEQVQLVQSGAEVKKPGASVKVSCKVSGYTLTELSIHWVRQAPGKGLEWMGGFDPEENEIVYAQRFQGRVTMTEDTSTDTAYMELSSLRSEDTAVYYCAIVGSFSGIAYRPWGQGTMVTVSSTRASTKGPSVFPLAPSSKSTSGGTAALGCLVKDYFPEPVTVSWNSGALTSGVHTFPAVLQSSGLYSLSSVVTVPSSSLGTQTYICNVNHKPSNTKVDKRVEPKSCIPEDTFFPSPESSCDVKLVEKSFETDTNLNFQNLSVIGFRILLLKVAGFNLLMTLRLWSS

SEQ ID NO: 13905 - protein, 756 aa, Artificial Sequence
  Synthetic Polypeptide
MALPVTALLLPLALLLHAARPEVQLVESGGGLVQPGGSLRLSCAASGFSFSDFWMSWVRQAPGKGLEWVATISQAGSEKDYVDSVKGRFTISRDNAKKSLYLQMNSLRAEDTAVYYCASGVYSFDYRGQGTLVTVSSGTGGGGSGGGGSGGGGSEFDIQMTQSPSSLSASVGDRVTITCRASQGIRNNLAWYQQKPGKAPKRLIYAASNLQSGVPSRFTGSGSGTEFTLIVSSLQPEDFATYYCLQHHSYPLTSGGGTKVELEGQPKANPTVTLFPPSSEELQANKATLVCLISDFYPGAVTVAWKADGSPVKAGVETTKPSKQSNNKYAASSYLSLTPEQWKSHRSYSCQVTHEGSTVEKTVAPTECSGRADCGFTSESYQQGVLSATILYEILLGKATLYAVLVSALVLMAMVKRKDSRGRAKRSGSGVKQTLNFDLLKLAGDVESNPGPTSMDWIWRILFLVGAATGAHSFEEVQVLESGGGLVQPGGSLRLSCAASGFTFSSYAMSWVRQAPGKGLEWVSAISGSGGSTNYADSVKGRFTISRDNSKNTLYLQMNSLRAEDTAVYYCAGSSGWSEYWGQGTLVTVSSTRASTKGPSVFPLAPSSKSTSGGTAALGCLVKDYFPEPVTVSWNSGALTSGVHTFPAVLQSSGLYSLSSVVTVPSSSLGTQTYICNVNHKPSNTKVDKRVEPKSCIPEDTFFPSPESSCDVKLVEKSFETDTNLNFQNLSVIGFRILLLKVAGFNLLMTLRLWSS

SEQ ID NO: 13906 - protein, 762 aa, Artificial Sequence
  Synthetic Polypeptide
MALPVTALLLPLALLLHAARPEVQLVESGGGLVQPGGSLRLSCAASGFSFSDFWMSWVRQAPGKGLEWVATISQAGSEKDYVDSVKGRFTISRDNAKKSLYLQMNSLRAEDTAVYYCASGVYSFDYRGQGTLVTVSSGTGGGGSGGGGSGGGGSEFDEIQLVQSGAEVKKPGESLRISCKGSGFNIEDYYIHWVRQMPGKGLEWMGRIDPENDETKYGPIFQGHVTISADTSINTVYLQWSSLKASDTAMYYCAFRGGVYWGQGTTVTVSSLEGQPKANPTVTLFPPSSEELQANKATLVCLISDFYPGAVTVAWKADGSPVKAGVETTKPSKQSNNKYAASSYLSLTPEQWKSHRSYSCQVTHEGSTVEKTVAPTECSGRADCGFTSESYQQGVLSATILYEILLGKATLYAVLVSALVLMAMVKRKDSRGRAKRSGSGVKQTLNFDLLKLAGDVESNPGPTSMDWIWRILFLVGAATGAHSFEDVVMTQSPDSLAVSLGERATINCKSSQSLLDSDGKTYLNWLQQKPGQPPKRLISLVSKLDSGVPDRFSGSGSGTDFTLTISSLQAEDVAVYYCWQGTHFPGTFGGGTKVEIKTRASTKGPSVFPLAPSSKSTSGGTAALGCLVKDYFPEPVTVSWNSGALTSGVHTFPAVLQSSGLYSLSSVVTVPSSSLGTQTYICNVNHKPSNTKVDKRVEPKSCIPEDTFFPSPESSCDVKLVEKSFETDTNLNFQNLSVIGFRILLLKVAGFNLLMTLRLWSS

SEQ ID NO: 13907 - protein, 769 aa, Artificial Sequence
  Synthetic Polypeptide
MALPVTALLLPLALLLHAARPEVQLVESGGGLVQPGGSLRLSCAASGFSFSDFWMSWVRQAPGKGLEWVATISQAGSEKDYVDSVKGRFTISRDNAKKSLYLQMNSLRAEDTAVYYCASGVYSFDYRGQGTLVTVSSGTGGGGSGGGGSGGGGSEFDELVMTQSPSSLTVTAGEKVTMSCKSSQSLLNSGNQKNYLTWYQQKPGQPPKLLIYWASTRESGVPDRFTGSGSGTDFTLTISSVQAEDLAVYYCQNDYSYPLTFGAGTKLEIKLEGQPKANPTVTLFPPSSEELQANKATLVCLISDFYPGAVTVAWKADGSPVKAGVETTKPSKQSNNKYAASSYLSLTPEQWKSHRSYSCQVTHEGSTVEKTVAPTECSGRADCGFTSESYQQGVLSATILYEILLGKATLYAVLVSALVLMAMVKRKDSRGRAKRSGSGVKQTLNFDLLKLAGDVESNPGPTSMDWIWRILFLVGAATGAHSFEEVQLLEQSGAELVRPGTSVKISCKASGYAFTNYWLGWVKQRPGHGLEWIGDIFPGSGNIHYNEKFKGKATLTADKSSSTAYMQLSSLTFEDSAVYFCARLRNWDEPMDYWGQGTTVTVSSTRASTKGPSVFPLAPSSKSTSGGTAALGCLVKDYFPEPVTVSWNSGALTSGVHTFPAVLQSSGLYSLSSVVTVPSSSLGTQTYICNVNHKPSNTKVDKRVEPKSCIPEDTFFPSPESSCDVKLVEKSFETDTNLNFQNLSVIGFRILLLKVAGFNLLMTLRLWSS

SEQ ID NO: 13908 - protein, 770 aa, Artificial Sequence
  Synthetic Polypeptide
MALPVTALLLPLALLLHAARPEVQLVESGGGLVQPGGSLRLSCAASGFSFSDFWMSWVRQAPGKGLEWVATISQAGSEKDYVDSVKGRFTISRDNAKKSLYLQMNSLRAEDTAVYYCASGVYSFDYRGQGTLVTVSSGTGGGGSGGGGSGGGGSEFDELQMTQSPSSLSASVGDRVTITCRASQSISSYLNWYQQKPGQPPKLLIYWASTRESGVPDRFSGSESGTNYTLTISSLQPEDFATYFCQQSDSLPITFGQGTRLDIQLEGQPKANPTVTLFPPSSEELQANKATLVCLISDFYPGAVTVAWKADGSPVKAGVETTKPSKQSNNKYAASSYLSLTPEQWKSHRSYSCQVTHEGSTVEKTVAPTECSGRADCGFTSESYQQGVLSATILYEILLGKATLYAVLVSALVLMAMVKRKDSRGRAKRSGSGVKQTLNFDLLKLAGDVESNPGPTSMDWIWRILFLVGAATGAHSFEEVQLLESGGGVVQPGRSLRLSCAASGFTFSSYGMHWVRQAPGKGLEWVAVISYDGSNKYYADSVKGRFTISRDNSKNTLYLQMNSLRAEDTAVYYCAKDMGWGSGWRPYYYYGMDVWGQGTTVTVSSTRASTKGPSVFPLAPSSKSTSGGTAALGCLVKDYFPEPVTVSWNSGALTSGVHTFPAVLQSSGLYSLSSVVTVPSSSLGTQTYICNVNHKPSNTKVDKRVEPKSCIPEDTFFPSPESSCDVKLVEKSFETDTNLNFQNLSVIGFRILLLKVAGFNLLMTLRLWSS

SEQ ID NO: 13909 - protein, 767 aa, Artificial Sequence
  Synthetic Polypeptide
MALPVTALLLPLALLLHAARPEVQLVESGGGLVQPGGSLRLSCAASGFSFSDFWMSWVRQAPGKGLEWVATISQAGSEKDYVDSVKGRFTISRDNAKKSLYLQMNSLRAEDTAVYYCASGVYSFDYRGQGTLVTVSSGTGGGGSGGGGSGGGGSEFDDIQMTQSPSSLSASVGDRVTITCRASQSISSYLNWYQQKPGKAPKLLIYAASSLQSGVPSRFSGSGSGTDFTLTISSLQPEDLATYYCQQSYSTPFTFGPGTKVDIKLEGQPKANPTVTLFPPSSEELQANKATLVCLISDFYPGAVTVAWKADGSPVKAGVETTKPSKQSNNKYAASSYLSLTPEQWKSHRSYSCQVTHEGSTVEKTVAPTECSGRADCGFTSESYQQGVLSATILYEILLGKATLYAVLVSALVLMAMVKRKDSRGRAKRSGSGVKQTLNFDLLKLAGDVESNPGPTSMDWIWRILFLVGAATGAHSFEVHEVQLVQSGAEVKKPGSSVKVSCKASGGTFSSYAISWVRQAPGQGLEWMGGIIPIFGTANYAQKFQGRVTITADKSTSTAYMELSSLRSEDTAVYYCATFALFGFREQAFDIWGQGTTVTVSSTRASTKGPSVFPLAPSSKSTSGGTAALGCLVKDYFPEPVTVSWNSGALTSGVHTFPAVLQSSGLYSLSSVVTVPSSSLGTQTYICNVNHKPSNTKVDKRVEPKSCIPEDTFFPSPESSCDVKLVEKSFETDTNLNFQNLSVIGFRILLLKVAGFNLLMTLRLWSS

SEQ ID NO: 13910 - protein, 765 aa, Artificial Sequence
  Synthetic Polypeptide
MALPVTALLLPLALLLHAARPEVQLVESGGGLVQPGGSLRLSCAASGFSFSDFWMSWVRQAPGKGLEWVATISQAGSEKDYVDSVKGRFTISRDNAKKSLYLQMNSLRAEDTAVYYCASGVYSFDYRGQGTLVTVSSGTGGGGSGGGGSGGGGSEFDIVLTQSPLSLAVSLGQPAIISCKASQSVSFAGTSLMHWYHQKPGQQPRLLIYRASNLEAGVPDRFSGSGSKTDFTLTISPVEAEDAATYYCQQSREYPYTFGGGTKLEIKRLEGQPKANPTVTLFPPSSEELQANKATLVCLISDFYPGAVTVAWKADGSPVKAGVETTKPSKQSNNKYAASSYLSLTPEQWKSHRSYSCQVTHEGSTVEKTVAPTECSGRADCGFTSESYQQGVLSATILYEILLGKATLYAVLVSALVLMAMVKRKDSRGRAKRSGSGVKQTLNFDLLKLAGDVESNPGPTSMDWIWRILFLVGAATGAHSFEQVQLVQSGAEVVKPGASVKISCKASGYTFTGYFMNWVKQSPGQSLEWIGRIHPYDGDTFYNQKFQGKATLTVDKSSNTAHMELLSLTSEDFAVYYCTRYDGSRAMDYWGQGTTVTVSSTRASTKGPSVFPLAPSSKSTSGGTAALGCLVKDYFPEPVTVSWNSGALTSGVHTFPAVLQSSGLYSLSSVVTVPSSSLGTQTYICNVNHKPSNTKVDKRVEPKSCIPEDTFFPSPESSCDVKLVEKSFETDTNLNFQNLSVIGFRILLLKVAGFNLLMTLRLWSS

SEQ ID NO: 13911 - protein, 762 aa, Artificial Sequence
  Synthetic Polypeptide
MALPVTALLLPLALLLHAARPEVQLVESGGGLVQPGGSLRLSCAASGFSFSDFWMSWVRQAPGKGLEWVATISQAGSEKDYVDSVKGRFTISRDNAKKSLYLQMNSLRAEDTAVYYCASGVYSFDYRGQGTLVTVSSGTGGGGSGGGGSGGGGSEFDDVVMTQTPLSLPVTPGEPASISCRSSQSLVHRNGNTYLHWYLQKPGQSPKLLIHKVSNRFSGVPDRFSGSGSGTDFTLKISRVEAEDLGVYFCSQSTHVPPLTFGAGTKLELKLEGQPKANPTVTLFPPSSEELQANKATLVCLISDFYPGAVTVAWKADGSPVKAGVETTKPSKQSNNKYAASSYLSLTPEQWKSHRSYSCQVTHEGSTVEKTVAPTECSGRADCGFTSESYQQGVLSATILYEILLGKATLYAVLVSALVLMAMVKRKDSRGRAKRSGSGVKQTLNFDLLKLAGDVESNPGPTSMDWIWRILFLVGAATGAHSFEEVQLVQSGAEVEKPGASVKISCKASGSSFTGYNMNWVRQNIGKSLEWIGAIDPYYGGTSYNQKFKGRATLTVDKSTSTAYMHLKSLRSEDTAVYYCVSGMEYWGQGTSVTVSSTRASTKGPSVFPLAPSSKSTSGGTAALGCLVKDYFPEPVTVSWNSGALTSGVHTFPAVLQSSGLYSLSSVVTVPSSSLGTQTYICNVNHKPSNTKVDKRVEPKSCIPEDTFFPSPESSCDVKLVEKSFETDTNLNFQNLSVIGFRILLLKVAGFNLLMTLRLWSS

SEQ ID NO: 13912 - protein, 760 aa, Artificial Sequence
  Synthetic Polypeptide
MALPVTALLLPLALLLHAARPEVQLVESGGGLVQPGGSLRLSCAASGFSFSDFWMSWVRQAPGKGLEWVATISQAGSEKDYVDSVKGRFTISRDNAKKSLYLQMNSLRAEDTAVYYCASGVYSFDYRGQGTLVTVSSGTGGGGSGGGGSGGGGSEFDEIVMTQTPATLSVSAGERVTITCKASQSVSNDVTWYQQKPGQAPRLLIYSASNRYSGVPARFSGSGYGTEFTFTISSVQSEDFAVYFCQQDYSSFGQGTKLEIKRLEGQPKANPTVTLFPPSSEELQANKATLVCLISDFYPGAVTVAWKADGSPVKAGVETTKPSKQSNNKYAASSYLSLTPEQWKSHRSYSCQVTHEGSTVEKTVAPTECSGRADCGFTSESYQQGVLSATILYEILLGKATLYAVLVSALVLMAMVKRKDSRGRAKRSGSGVKQTLNFDLLKLAGDVESNPGPTSMDWIWRILFLVGAATGAHSFEQVQLVESGPGVVQPGRSLRISCAVSGFSVTNYGVHWVRQPPGKGLEWLGVIWAGGITNYNSAFMSRLTISKDNSKNTVYLQMNSLRAEDTAMYYCASRGGHYGYALDYWGQGTLVTVSSTRASTKGPSVFPLAPSSKSTSGGTAALGCLVKDYFPEPVTVSWNSGALTSGVHTFPAVLQSSGLYSLSSVVTVPSSSLGTQTYICNVNHKPSNTKVDKRVEPKSCIPEDTFFPSPESSCDVKLVEKSFETDTNLNFQNLSVIGFRILLLKVAGFNLLMTLRLWSS

SEQ ID NO: 13913 - protein, 762 aa, Artificial Sequence
  Synthetic Polypeptide
MALPVTALLLPLALLLHAARPEVQLVESGGGLVQPGGSLRLSCAASGFSFSDFWMSWVRQAPGKGLEWVATISQAGSEKDYVDSVKGRFTISRDNAKKSLYLQMNSLRAEDTAVYYCASGVYSFDYRGQGTLVTVSSGTGGGGSGGGGSGGGGSEFDIQMTQTASSLPASLGDRVTISCSASQDISNYLNWYQQKPDGTVKLLIFYSSNLHSGVPSRFSGGGSGTDYSLTISNLEPEDIATYFCHQYSKLPWTFGGGTKLEIKRLEGQPKANPTVTLFPPSSEELQANKATLVCLISDFYPGAVTVAWKADGSPVKAGVETTKPSKQSNNKYAASSYLSLTPEQWKSHRSYSCQVTHEGSTVEKTVAPTECSGRADCGFTSESYQQGVLSATILYEILLGKATLYAVLVSALVLMAMVKRKDSRGRAKRSGSGVKQTLNFDLLKLAGDVESNPGPTSMDWIWRILFLVGAATGAHSFEEVTLVESGGDFVKPGGSLKVSCAASGFAFSHYAMSWVRQTPAKRLEWVAYISSGGSGTYYSDSVKGRFTISRDNAKNTLYLQMRSLRSEDSAMYFCTRVKLGTYYFDSWGQGTTLTVSSTRASTKGPSVFPLAPSSKSTSGGTAALGCLVKDYFPEPVTVSWNSGALTSGVHTFPAVLQSSGLYSLSSVVTVPSSSLGTQTYICNVNHKPSNTKVDKRVEPKSCIPEDTFFPSPESSCDVKLVEKSFETDTNLNFQNLSVIGFRILLLKVAGFNLLMTLRLWSS

SEQ ID NO: 13914 - protein, 764 aa, Artificial Sequence
  Synthetic Polypeptide
MALPVTALLLPLALLLHAARPEVQLVESGGGLVQPGGSLRLSCAASGFSFSDFWMSWVRQAPGKGLEWVATISQAGSEKDYVDSVKGRFTISRDNAKKSLYLQMNSLRAEDTAVYYCASGVYSFDYRGQGTLVTVSSGTGGGGSGGGGSGGGGSEFQFVLTQSPSASAALGASAKLTCTLSSAHKTYTIDWYQQQKGKAPRYLIQVKSDGTYTKATGVPDRFSGSSSGADRYLIIPSVQADDEADYYCGTDYTGGYVFGGGTQLTVTLEGQPKANPTVTLFPPSSEELQANKATLVCLISDFYPGAVTVAWKADGSPVKAGVETTKPSKQSNNKYAASSYLSLTPEQWKSHRSYSCQVTHEGSTVEKTVAPTECSGRADCGFTSESYQQGVLSATILYEILLGKATLYAVLVSALVLMAMVKRKDSRGRAKRSGSGVKQTLNFDLLKLAGDVESNPGPTSMDWIWRILFLVGAATGAHSFEEQLKESGGGLFKPTDTLTLTCTVSGFSLSYYGVNWVRQAPGNGLEWIGTIGGSGDTYYASWAKSRSTIIRNTNENTVTLKMTSLTAADTATYFCVRYANIGYEYFNVWGPGTLVTVSSTRASTKGPSVFPLAPSSKSTSGGTAALGCLVKDYFPEPVTVSWNSGALTSGVHTFPAVLQSSGLYSLSSVVTVPSSSLGTQTYICNVNHKPSNTKVDKRVEPKSCIPEDTFFPSPESSCDVKLVEKSFETDTNLNFQNLSVIGFRILLLKVAGFNLLMTLRLWSS

SEQ ID NO: 13915 - protein, 769 aa, Artificial Sequence
  Synthetic Polypeptide
MALPVTALLLPLALLLHAARPEVQLVESGGGLVQPGGSLRLSCAASGFSFSDFWMSWVRQAPGKGLEWVATISQAGSEKDYVDSVKGRFTISRDNAKKSLYLQMNSLRAEDTAVYYCASGVYSFDYRGQGTLVTVSSGTGGGGSGGGGSGGGGSEFQFVLTQSPSVSAALGASAKLTCTLSSAHKTYTIDWYQQQQGEAPRYLMQVKSDGSYTKGTGVPDRFSGSSSGADRYLIIPSVQADDEAGYVCGADDNGGYVFGGGTQLTVTLEGQPKANPTVTLFPPSSEELQANKATLVCLISDFYPGAVTVAWKADGSPVKAGVETTKPSKQSNNKYAASSYLSLTPEQWKSHRSYSCQVTHEGSTVEKTVAPTECSGRADCGFTSESYQQGVLSATILYEILLGKATLYAVLVSALVLMAMVKRKDSRGRAKRSGSGVKQTLNFDLLKLAGDVESNPGPTSMDWIWRILFLVGAATGAHSFEQSVKESEGGLFKPTDTLTLTCTVSGFSLSRHALTWVRQAPGNGLEWIGAIDNAGTTYYASWAKSRSTITRNTDLHTVTLKMTSLTASDTATYFCARVFYDINSGYYLDGMDLWGPGTLVTVSSTRASTKGPSVFPLAPSSKSTSGGTAALGCLVKDYFPEPVTVSWNSGALTSGVHTFPAVLQSSGLYSLSSVVTVPSSSLGTQTYICNVNHKPSNTKVDKRVEPKSCIPEDTFFPSPESSCDVKLVEKSFETDTNLNFQNLSVIGFRILLLKVAGFNLLMTLRLWSS

SEQ ID NO: 13916 - protein, 763 aa, Artificial Sequence
  Synthetic Polypeptide
MALPVTALLLPLALLLHAARPEVQLVESGGGLVQPGGSLRLSCAASGFSFSDFWMSWVRQAPGKGLEWVATISQAGSEKDYVDSVKGRFTISRDNAKKSLYLQMNSLRAEDTAVYYCASGVYSFDYRGQGTLVTVSSGTGGGGSGGGGSGGGGSEFDIQMTQSPSSLSASVGDRVTITCRASQGISSWLAWYQQKPEKAPKSLIYAASSLQSGVPSRFSGSGSGTDFTLTISSLQPEDFATYYCQQYNSYPPTFGGGTKVEIKLEGQPKANPTVTLFPPSSEELQANKATLVCLISDFYPGAVTVAWKADGSPVKAGVETTKPSKQSNNKYAASSYLSLTPEQWKSHRSYSCQVTHEGSTVEKTVAPTECSGRADCGFTSESYQQGVLSATILYEILLGKATLYAVLVSALVLMAMVKRKDSRGRAKRSGSGVKQTLNFDLLKLAGDVESNPGPTSMDWIWRILFLVGAATGAHSFEEVQLVESGGGLVQPGESLRLSCVASGFTFSRYKMNWVRQAPGKGLEWVSYISRSGRDIYYADSVKGRFTISRDNAKNSLYLQMNSLRDEDTAVYYCAGTVTTYYYFGMDVWGHGTTVTVSSTRASTKGPSVFPLAPSSKSTSGGTAALGCLVKDYFPEPVTVSWNSGALTSGVHTFPAVLQSSGLYSLSSVVTVPSSSLGTQTYICNVNHKPSNTKVDKRVEPKSCIPEDTFFPSPESSCDVKLVEKSFETDTNLNFQNLSVIGFRILLLKVAGFNLLMTLRLWSS

SEQ ID NO: 13917 - protein, 764 aa, Artificial Sequence
  Synthetic Polypeptide
MALPVTALLLPLALLLHAARPEVQLVESGGGLVQPGGSLRLSCAASGFSFSDFWMSWVRQAPGKGLEWVATISQAGSEKDYVDSVKGRFTISRDNAKKSLYLQMNSLRAEDTAVYYCASGVYSFDYRGQGTLVTVSSGTGGGGSGGGGSGGGGSEFDIQMTQSPSSLSASVGDRVTITCRASQGISSWLAWYQQKPEKAPKSLIYAASSLQSGVPSRFSGSGSGTDFTLTISSLQPEDFATYYCQQYNSYPPTFGGGTKVEIKLEGQPKANPTVTLFPPSSEELQANKATLVCLISDFYPGAVTVAWKADGSPVKAGVETTKPSKQSNNKYAASSYLSLTPEQWKSHRSYSCQVTHEGSTVEKTVAPTECSGRADCGFTSESYQQGVLSATILYEILLGKATLYAVLVSALVLMAMVKRKDSRGRAKRSGSGVKQTLNFDLLKLAGDVESNPGPTSMDWIWRILFLVGAATGAHSFEEVQLVESGGGSVQPGESLRLSCVASGFTFSRYKMNWVRQAPGKGLEWVSYISRSGRDIYYADSVKGRFTISRDNAKNSLYLQMNSLRDEDTAVYYCAGTVTTYYYDFGMDVWGQGTTVTVSSTRASTKGPSVFPLAPSSKSTSGGTAALGCLVKDYFPEPVTVSWNSGALTSGVHTFPAVLQSSGLYSLSSVVTVPSSSLGTQTYICNVNHKPSNTKVDKRVEPKSCIPEDTFFPSPESSCDVKLVEKSFETDTNLNFQNLSVIGFRILLLKVAGFNLLMTLRLWSS

SEQ ID NO: 13918 - protein, 762 aa, Artificial Sequence
  Synthetic Polypeptide
MALPVTALLLPLALLLHAARPEVQLVESGGGLVQPGGSLRLSCAASGFSFSDFWMSWVRQAPGKGLEWVATISQAGSEKDYVDSVKGRFTISRDNAKKSLYLQMNSLRAEDTAVYYCASGVYSFDYRGQGTLVTVSSGTGGGGSGGGGSGGGGSEFQSVLTQPPSASGTPGQRVTISCSGSRSNVGGNYVFWYQQVPGATPKLLIYRSNQRPSGVPDRFAGSKSGSSASLAISGLRSEDEADYYCATWDDSLSGFVFGTGTKVTVLGLEGQPKANPTVTLFPPSSEELQANKATLVCLISDFYPGAVTVAWKADGSPVKAGVETTKPSKQSNNKYAASSYLSLTPEQWKSHRSYSCQVTHEGSTVEKTVAPTECSGRADCGFTSESYQQGVLSATILYEILLGKATLYAVLVSALVLMAMVKRKDSRGRAKRSGSGVKQTLNFDLLKLAGDVESNPGPTSMDWIWRILFLVGAATGAHSFEVQLVESGGGLVKPGGSLRLSCAASGFTFSDYYMSWIRQAPGKGLEWVSYISSSGSTIYYADSVKGRFTISRDNAKNSLYLQMNSLRAEDTAVYYCARGYGKAYDQWGQGTLVTVSSTRASTKGPSVFPLAPSSKSTSGGTAALGCLVKDYFPEPVTVSWNSGALTSGVHTFPAVLQSSGLYSLSSVVTVPSSSLGTQTYICNVNHKPSNTKVDKRVEPKSCIPEDTFFPSPESSCDVKLVEKSFETDTNLNFQNLSVIGFRILLLKVAGFNLLMTLRLWSS

SEQ ID NO: 13919 - protein, 761 aa, Artificial Sequence
  Synthetic Polypeptide
MALPVTALLLPLALLLHAARPEVQLVESGGGLVQPGGSLRLSCAASGFSFSDFWMSWVRQAPGKGLEWVATISQAGSEKDYVDSVKGRFTISRDNAKKSLYLQMNSLRAEDTAVYYCASGVYSFDYRGQGTLVTVSSGTGGGGSGGGGSGGGGSEFQSVVTQPPSMSAAPGQQVTISCSGGNSNIERNYVSWYLQLPGTAPKLVIFDNDRRPSGIPDRFSGSKSGTSATLGITGLQTGDEADYYCGTWDSSLRGWVFGGGTKLTVLGLEGQPKANPTVTLFPPSSEELQANKATLVCLISDFYPGAVTVAWKADGSPVKAGVETTKPSKQSNNKYAASSYLSLTPEQWKSHRSYSCQVTHEGSTVEKTVAPTECSGRADCGFTSESYQQGVLSATILYEILLGKATLYAVLVSALVLMAMVKRKDSRGRAKRSGSGVKQTLNFDLLKLAGDVESNPGPTSMDWIWRILFLVGAATGAHSFEVQLVESGGGLIQPGGSLRLSCAASGFTFSNYAMNWVRQAPGKGLEWVSTINGRGSSTIYADSVKGRFTISRDNSKNTLYLQMNSLRAEDTATYYCARYISRGLGDSWGQGTLVTVTRASTKGPSVFPLAPSSKSTSGGTAALGCLVKDYFPEPVTVSWNSGALTSGVHTFPAVLQSSGLYSLSSVVTVPSSSLGTQTYICNVNHKPSNTKVDKRVEPKSCIPEDTFFPSPESSCDVKLVEKSFETDTNLNFQNLSVIGFRILLLKVAGFNLLMTLRLWSS

SEQ ID NO: 13920 - protein, 762 aa, Artificial Sequence
  Synthetic Polypeptide
MALPVTALLLPLALLLHAARPEVQLVESGGGLVQPGGSLRLSCAASGFSFSDFWMSWVRQAPGKGLEWVATISQAGSEKDYVDSVKGRFTISRDNAKKSLYLQMNSLRAEDTAVYYCASGVYSFDYRGQGTLVTVSSGTGGGGSGGGGSGGGGSEFDVVMTQTPLSLPVSLGDQASISCRSSQSLVHSNGNTYLHWYLQKPGQSPKLLIYKVSNRFSGVPDRFSGSGSGTDFTLKISRVEAEDLGVYFCSQNTPVPPKFGSGTKLEIKLEGQPKANPTVTLFPPSSEELQANKATLVCLISDFYPGAVTVAWKADGSPVKAGVETTKPSKQSNNKYAASSYLSLTPEQWKSHRSYSCQVTHEGSTVEKTVAPTECSGRADCGFTSESYQQGVLSATILYEILLGKATLYAVLVSALVLMAMVKRKDSRGRAKRSGSGVKQTLNFDLLKLAGDVESNPGPTSMDWIWRILFLVGAATGAHSFEQVQLQQSGAELVRPGASVKLSCKASGYTFNDYEMHWVKQTPVHGLKWIGALEPKTGDTAYSQKFKGKATLTADKSSSTAYMELRSLTSEDSAVYYCTSCYYYTYSGQGTLVTVSATRASTKGPSVFPLAPSSKSTSGGTAALGCLVKDYFPEPVTVSWNSGALTSGVHTFPAVLQSSGLYSLSSVVTVPSSSLGTQTYICNVNHKPSNTKVDKRVEPKSCIPEDTFFPSPESSCDVKLVEKSFETDTNLNFQNLSVIGFRILLLKVAGFNLLMTLRLWSS

SEQ ID NO: 13921 - protein, 761 aa, Artificial Sequence
  Synthetic Polypeptide
MALPVTALLLPLALLLHAARPEVQLVESGGGLVQPGGSLRLSCAASGFSFSDFWMSWVRQAPGKGLEWVATISQAGSEKDYVDSVKGRFTISRDNAKKSLYLQMNSLRAEDTAVYYCASGVYSFDYRGQGTLVTVSSGTGGGGSGGGGSGGGGSEFDIQLTQSPSSLSASVGDRVTITCRASQGIRNDLGWYQQKPGKAPKRLIYAASSLQNGVPSRFSGSGSGTEFTLTISSLQPEDFATYYCLQHNTYPAFGQGTKVEIKRLEGQPKANPTVTLFPPSSEELQANKATLVCLISDFYPGAVTVAWKADGSPVKAGVETTKPSKQSNNKYAASSYLSLTPEQWKSHRSYSCQVTHEGSTVEKTVAPTECSGRADCGFTSESYQQGVLSATILYEILLGKATLYAVLVSALVLMAMVKRKDSRGRAKRSGSGVKQTLNFDLLKLAGDVESNPGPTSMDWIWRILFLVGAATGAHSFEQVQLQESGPGLVKPSQTLSLTCTVSGGSISSFNYYWSWIRHHPGKGLEWIGYIYYSGSTYSNPSLKSRVTISVDTSKNQFSLTLSSVTAADTAVYYCARGYNWNYFDYWGQGTLVTVSSTRASTKGPSVFPLAPSSKSTSGGTAALGCLVKDYFPEPVTVSWNSGALTSGVHTFPAVLQSSGLYSLSSVVTVPSSSLGTQTYICNVNHKPSNTKVDKRVEPKSCIPEDTFFPSPESSCDVKLVEKSFETDTNLNFQNLSVIGFRILLLKVAGFNLLMTLRLWSS

SEQ ID NO: 13922 - protein, 763 aa, Artificial Sequence
  Synthetic Polypeptide
MALPVTALLLPLALLLHAARPEVQLVESGGGLVQPGGSLRLSCAASGFSFSDFWMSWVRQAPGKGLEWVATISQAGSEKDYVDSVKGRFTISRDNAKKSLYLQMNSLRAEDTAVYYCASGVYSFDYRGQGTLVTVSSGTGGGGSGGGGSGGGGSEFDDIVLTQSPASLAVSLGQSVTISCRASESVEYYGTSLMQWYQQKPGQPPKLLIYATSNVESGVPARFSGSGSGTDFSLNIHPVEEDDIAMYFCQQSRKLPSTFGGGTKLEIKLEGQPKANPTVTLFPPSSEELQANKATLVCLISDFYPGAVTVAWKADGSPVKAGVETTKPSKQSNNKYAASSYLSLTPEQWKSHRSYSCQVTHEGSTVEKTVAPTECSGRADCGFTSESYQQGVLSATILYEILLGKATLYAVLVSALVLMAMVKRKDSRGRAKRSGSGVKQTLNFDLLKLAGDVESNPGPTSMDWIWRILFLVGAATGAHSFEDVRLQESGPGQVKPSQTVSLTCSVTGYSITNGNHWWNWIRQVSGSKLEWIGYISSSGSTDSNPSLKSRISITRDTSKNQLFLQLNSVTTEDIATYYCARGYYFDYWGQGTTLTVSSTRASTKGPSVFPLAPSSKSTSGGTAALGCLVKDYFPEPVTVSWNSGALTSGVHTFPAVLQSSGLYSLSSVVTVPSSSLGTQTYICNVNHKPSNTKVDKRVEPKSCIPEDTFFPSPESSCDVKLVEKSFETDTNLNFQNLSVIGFRILLLKVAGFNLLMTLRLWSS

SEQ ID NO: 13923 - protein, 762 aa, Artificial Sequence
  Synthetic Polypeptide
MALPVTALLLPLALLLHAARPEVQLVESGGGLVQPGGSLRLSCAASGFSFSDFWMSWVRQAPGKGLEWVATISQAGSEKDYVDSVKGRFTISRDNAKKSLYLQMNSLRAEDTAVYYCASGVYSFDYRGQGTLVTVSSGTGGGGSGGGGSGGGGSEFDIQMTQSPSSLSASVGDRVTITCRASQDVNTAVAWYQQKPGKAPKLLIYSASFLESGVPSRFSGSRSGTDFTLTISSLQPEDFATYYCQQHYTTPPTFGQTKVEIKRLEGQPKANPTVTLFPPSSEELQANKATLVCLISDFYPGAVTVAWKADGSPVKAGVETTKPSKQSNNKYAASSYLSLTPEQWKSHRSYSCQVTHEGSTVEKTVAPTECSGRADCGFTSESYQQGVLSATILYEILLGKATLYAVLVSALVLMAMVKRKDSRGRAKRSGSGVKQTLNFDLLKLAGDVESNPGPTSMDWIWRILFLVGAATGAHSFEEVQLVESGGGLVQPGGSLRLSCAASGFNIKDTYIHWVRQAPGKGLEWVARIYPTNGYTRYADSVKGRFTISADTSKNTAYLQMNSLRAEDTAVYYCSRWGGDGFYAMDVWGQGTLVTVSSTRASTKGPSVFPLAPSSKSTSGGTAALGCLVKDYFPEPVTVSWNSGALTSGVHTFPAVLQSSGLYSLSSVVTVPSSSLGTQTYICNVNHKPSNTKVDKRVEPKSCIPEDTFFPSPESSCDVKLVEKSFETDTNLNFQNLSVIGFRILLLKVAGFNLLMTLRLWSS

SEQ ID NO: 13924 - protein, 761 aa, Artificial Sequence
  Synthetic Polypeptide
MALPVTALLLPLALLLHAARPEVQLVESGGGLVQPGGSLRLSCAASGFSFSDFWMSWVRQAPGKGLEWVATISQAGSEKDYVDSVKGRFTISRDNAKKSLYLQMNSLRAEDTAVYYCASGVYSFDYRGQGTLVTVSSGTGGGGSGGGGSGGGGSEFDQSVLTQPPSVSVAPGKTARIPCEGNYIGSSNVHWYQQKPGQAPVLVIHFDSDRPSGIPDRFSGSNSGNMATLTISRVEAGDEADYYCQVWENHGWVFGGGTKLTVLSLEGQPKANPTVTLFPPSSEELQANKATLVCLISDFYPGAVTVAWKADGSPVKAGVETTKPSKQSNNKYAASSYLSLTPEQWKSHRSYSCQVTHEGSTVEKTVAPTECSGRADCGFTSESYQQGVLSATILYEILLGKATLYAVLVSALVLMAMVKRKDSRGRAKRSGSGVKQTLNFDLLKLAGDVESNPGPTSMDWIWRILFLVGAATGAHSFEEVQLVETGGGLVQPGESLRLSCAASGFTFSDYEMNWVRQAPGKGLEWVSYISSSGSTIYYADSVKGRFTIYRDNAKNSLYLQMNSLRAEDTALYYCARAWGVGPPDYWGQGTLVTVSSTRASTKGPSVFPLAPSSKSTSGGTAALGCLVKDYFPEPVTVSWNSGALTSGVHTFPAVLQSSGLYSLSSVVTVPSSSLGTQTYICNVNHKPSNTKVDKRVEPKSCIPEDTFFPSPESSCDVKLVEKSFETDTNLNFQNLSVIGFRILLLKVAGFNLLMTLRLWSS

SEQ ID NO: 13925 - protein, 769 aa, Artificial Sequence
  Synthetic Polypeptide
MALPVTALLLPLALLLHAARPEVQLVESGGGLVQPGGSLRLSCAASGFSFSDFWMSWVRQAPGKGLEWVATISQAGSEKDYVDSVKGRFTISRDNAKKSLYLQMNSLRAEDTAVYYCASGVYSFDYRGQGTLVTVSSGTGGGGSGGGGSGGGGSEFDIQMTQSPSSLSASVGDTVTITCQANGYLNWYQQRRGKAPKLLIYDGSKLERGVPSRFSGRRWGQEYNLTINNLQPEDIATYFCQVYEFVVPGTRLDLKRTVAAPLEGQPKANPTVTLFPPSSEELQANKATLVCLISDFYPGAVTVAWKADGSPVKAGVETTKPSKQSNNKYAASSYLSLTPEQWKSHRSYSCQVTHEGSTVEKTVAPTECSGRADCGFTSESYQQGVLSATILYEILLGKATLYAVLVSALVLMAMVKRKDSRGRAKRSGSGVKQTLNFDLLKLAGDVESNPGPTSMDWIWRILFLVGAATGAHSFEQVQLLQSGAAVTKPGASVRVSCEASGYNIRDYFIHWWRQAPGQGLQWVGWINPKTGQPNNPRQFQGRVSLTRHASWDFDTFSFYMDLKALRSDDTAVYFCARQRSDYWDFDVWGSGTQVTVSSASTKGPTRASTKGPSVFPLAPSSKSTSGGTAALGCLVKDYFPEPVTVSWNSGALTSGVHTFPAVLQSSGLYSLSSVVTVPSSSLGTQTYICNVNHKPSNTKVDKRVEPKSCIPEDTFFPSPESSCDVKLVEKSFETDTNLNFQNLSVIGFRILLLKVAGFNLLMTLRLWSS

SEQ ID NO: 13926 - protein, 775 aa, Artificial Sequence
  Synthetic Polypeptide
MALPVTALLLPLALLLHAARPEVQLVESGGGLVQPGGSLRLSCAASGFSFSDFWMSWVRQAPGKGLEWVATISQAGSEKDYVDSVKGRFTISRDNAKKSLYLQMNSLRAEDTAVYYCASGVYSFDYRGQGTLVTVSSGTGGGGSGGGGSGGGGSEFQSALTQPPSASGSPGQSITISCTGTSNNFVSWYQQHAGKAPKLVIYDVNKRPSGVPDRFSGSKSGNTASLTVSGLQTDDEAVYYCGSLVGNWDVIFGGGTKLTVLLEGQPKANPTVTLFPPSSEELQANKATLVCLISDFYPGAVTVAWKADGSPVKAGVETTKPSKQSNNKYAASSYLSLTPEQWKSHRSYSCQVTHEGSTVEKTVAPTECSGRADCGFTSESYQQGVLSATILYEILLGKATLYAVLVSALVLMAMVKRKDSRGRAKRSGSGVKQTLNFDLLKLAGDVESNPGPTSMDWIWRILFLVGAATGAHSFEQPQLQESGPTLVEASETLSLTCAVSGDSTAACNSFWGWVRQPPGKGLEWVGSLSHCASYWNRGWTYHNPSLKSRLTLALDTPKNLVFLKLNSVTAADTATYYCARFGGEVLRYTDWPKPAWVDLWGRGTLVTVSSTRASTKGPSVFPLAPSSKSTSGGTAALGCLVKDYFPEPVTVSWNSGALTSGVHTFPAVLQSSGLYSLSSVVTVPSSSLGTQTYICNVNHKPSNTKVDKRVEPKSCIPEDTFFPSPESSCDVKLVEKSFETDTNLNFQNLSVIGFRILLLKVAGFNLLMTLRLWSS

SEQ ID NO: 13927 - protein, 760 aa, Artificial Sequence
  Synthetic Polypeptide
MALPVTALLLPLALLLHAARPEVQLVESGGGLVQPGGSLRLSCAASGFSFSDFWMSWVRQAPGKGLEWVATISQAGSEKDYVDSVKGRFTISRDNAKKSLYLQMNSLRAEDTAVYYCASGVYSFDYRGQGTLVTVSSGTGGGGSGGGGSGGGGSEFEIVLTQSPGTLSLSPGETAIISCRTSQYGSLAWYQQRPGQAPRLVIYSGSTRAAGIPDRFSGSRWGPDYNLTISNLESGDFGVYYCQQYEFFGQGTKVQVDIKRLEGQPKANPTVTLFPPSSEELQANKATLVCLISDFYPGAVTVAWKADGSPVKAGVETTKPSKQSNNKYAASSYLSLTPEQWKSHRSYSCQVTHEGSTVEKTVAPTECSGRADCGFTSESYQQGVLSATILYEILLGKATLYAVLVSALVLMAMVKRKDSRGRAKRSGSGVKQTLNFDLLKLAGDVESNPGPTSMDWIWRILFLVGAATGAHSFEQVQLVQSGGQMKKPGESMRISCRASGYEFIDCTLNWIRLAPGKRPEWMGWLKPRGGAVNYARPLQGRVTMTRDVYSDTAFLELRSLTVDDTAVYFCTRGKNCDYNWDFEHWGRGTPVIVSSTRASTKGPSVFPLAPSSKSTSGGTAALGCLVKDYFPEPVTVSWNSGALTSGVHTFPAVLQSSGLYSLSSVVTVPSSSLGTQTYICNVNHKPSNTKVDKRVEPKSCIPEDTFFPSPESSCDVKLVEKSFETDTNLNFQNLSVIGFRILLLKVAGFNLLMTLRLWSS

SEQ ID NO: 13928 - protein, 770 aa, Artificial Sequence
  Synthetic Polypeptide
MALPVTALLLPLALLLHAARPEVQLVESGGGLVQPGGSLRLSCAASGFSFSDFWMSWVRQAPGKGLEWVATISQAGSEKDYVDSVKGRFTISRDNAKKSLYLQMNSLRAEDTAVYYCASGVYSFDYRGQGTLVTVSSGTGGGGSGGGGSGGGGSEFELVLTQSPGTLSLSAGERATLSCRASQSVSSGSLAWYQQKPGQAPRLLIYGASTRATGIPDRFSGSGSGTDFTLTIGRLEPEDLAVYYCQQYGTSPYTFGQGTKLEILEGQPKANPTVTLFPPSSEELQANKATLVCLISDFYPGAVTVAWKADGSPVKAGVETTKPSKQSNNKYAASSYLSLTPEQWKSHRSYSCQVTHEGSTVEKTVAPTECSGRADCGFTSESYQQGVLSATILYEILLGKATLYAVLVSALVLMAMVKRKDSRGRAKRSGSGVKQTLNFDLLKLAGDVESNPGPTSMDWIWRILFLVGAATGAHSFELEQSGAEVKKPGSSVQVSCKASGGTFSMYGFNWVRQAPGHGLEWMGGIIPIFGTSNYAQKFRGRVTFTADQATSTAYMELTNLRSDDTAVYYCARDFGPDWEDGDSYDGSGRGFFDFWGQGTLVTVSSTRASTKGPSVFPLAPSSKSTSGGTAALGCLVKDYFPEPVTVSWNSGALTSGVHTFPAVLQSSGLYSLSSVVTVPSSSLGTQTYICNVNHKPSNTKVDKRVEPKSCIPEDTFFPSPESSCDVKLVEKSFETDTNLNFQNLSVIGFRILLLKVAGFNLLMTLRLWSS

SEQ ID NO: 13929 - protein, 750 aa, Artificial Sequence
  Synthetic Polypeptide
MALPVTALLLPLALLLHAARPEVQLVESGGGLVQPGGSLRLSCAASGFSFSDFWMSWVRQAPGKGLEWVATISQAGSEKDYVDSVKGRFTISRDNAKKSLYLQMNSLRAEDTAVYYCASGVYSFDYRGQGTLVTVSSGTGGGGSGGGGSGGGGSEFDIQMTQSPSSLSASVGDRVTITCQASQDINNYLNWYQQKPGKAPKLLIYDASNLQTGVPSRFSGSGSGTDFTFTIEDIATYYCQQYTFGPGTKVDIKLEGQPKANPTVTLFPPSSEELQANKATLVCLISDFYPGAVTVAWKADGSPVKAGVETTKPSKQSNNKYAASSYLSLTPEQWKSHRSYSCQVTHEGSTVEKTVAPTECSGRADCGFTSESYQQGVLSATILYEILLGKATLYAVLVSALVLMAMVKRKDSRGRAKRSGSGVKQTLNFDLLKLAGDVESNPGPTSMDWIWRILFLVGAATGAHSFEEVQLLESGGGLVQPGGSLRLSCAASGFTFSWYSMTWVRQAPGKGLEWVSSIVPWGDFTQYADSVKGRFTISRDNSKNTLYLQMNSLRAEDTAVYYCAKGPGWGSFDLWGRGTLVTVSSTRASTKGPSVFPLAPSSKSTSGGTAALGCLVKDYFPEPVTVSWNSGALTSGVHTFPAVLQSSGLYSLSSVVTVPSSSLGTQTYICNVNHKPSNTKVDKRVEPKSCIPEDTFFPSPESSCDVKLVEKSFETDTNLNFQNLSVIGFRILLLKVAGFNLLMTLRLWSS

SEQ ID NO: 13930 - protein, 760 aa, Artificial Sequence
  Synthetic Polypeptide
MALPVTALLLPLALLLHAARPEVQLVESGGGLVQPGGSLRLSCAASGFSFSDFWMSWVRQAPGKGLEWVATISQAGSEKDYVDSVKGRFTISRDNAKKSLYLQMNSLRAEDTAVYYCASGVYSFDYRGQGTLVTVSSGTGGGGSGGGGSGGGGSEFDIQMTQSPSSLSASVGDRVTITCTASLSVSSTYLHWYQQKPGSSPKLWIYSTSNLASGVPSRFSGSGSGTSYTLTISSLQPEDFATYYCHQYHRSPLTFGGGTKVEIKRLEGQPKANPTVTLFPPSSEELQANKATLVCLISDFYPGAVTVAWKADGSPVKAGVETTKPSKQSNNKYAASSYLSLTPEQWKSHRSYSCQVTHEGSTVEKTVAPTECSGRADCGFTSESYQQGVLSATILYEILLGKATLYAVLVSALVLMAMVKRKDSRGRAKRSGSGVKQTLNFDLLKLAGDVESNPGPTSMDWIWRILFLVGAATGAHSFEEVQLVESGGGLVQPGGSLRLSCAASGFSLTKYGVHWVRQAPGKGLEWVGVKWAGGSTDYNSALMSRFTISKDNAKNSLYLQMNSLRAEDTAVYYCARDHRDAMDYWGQGTLVTVSSTRASTKGPSVFPLAPSSKSTSGGTAALGCLVKDYFPEPVTVSWNSGALTSGVHTFPAVLQSSGLYSLSSVVTVPSSSLGTQTYICNVNHKPSNTKVDKRVEPKSCIPEDTFFPSPESSCDVKLVEKSFETDTNLNFQNLSVIGFRILLLKVAGFNLLMTLRLWSS

SEQ ID NO: 13931 - protein, 764 aa, Artificial Sequence
  Synthetic Polypeptide
MALPVTALLLPLALLLHAARPEVQLVESGGGLVQPGGSLRLSCAASGFSFSDFWMSWVRQAPGKGLEWVATISQAGSEKDYVDSVKGRFTISRDNAKKSLYLQMNSLRAEDTAVYYCASGVYSFDYRGQGTLVTVSSGTGGGGSGGGGSGGGGSEFDIQMTQSPSSLSASVGDRVTITCKASQDVGTAVAWYQQKPGKAPKLLIYSASYRSTGVPSRFSGSGSGTDFTLTISSLQPEDFATYYCQHHYSAPWTFGGGTKVEIKLEGQPKANPTVTLFPPSSEELQANKATLVCLISDFYPGAVTVAWKADGSPVKAGVETTKPSKQSNNKYAASSYLSLTPEQWKSHRSYSCQVTHEGSTVEKTVAPTECSGRADCGFTSESYQQGVLSATILYEILLGKATLYAVLVSALVLMAMVKRKDSRGRAKRSGSGVKQTLNFDLLKLAGDVESNPGPTSMDWIWRILFLVGAATGAHSFEEVQLVESGGGLVQPGGSLRLSCAASGFTFSRNGMSWVRQAPGKGLEWVATVSSGGSYIYYADSVKGRFTISRDNAKNSLYLQMNSLRAEDTAVYYCARQGTTALATRFFDVWGQGTLVTVSSTRASTKGPSVFPLAPSSKSTSGGTAALGCLVKDYFPEPVTVSWNSGALTSGVHTFPAVLQSSGLYSLSSVVTVPSSSLGTQTYICNVNHKPSNTKVDKRVEPKSCIPEDTFFPSPESSCDVKLVEKSFETDTNLNFQNLSVIGFRILLLKVAGFNLLMTLRLWSS

SEQ ID NO: 13932 - protein, 760 aa, Artificial Sequence
  Synthetic Polypeptide
MALPVTALLLPLALLLHAARPEVQLVESGGGLVQPGGSLRLSCAASGFSFSDFWMSWVRQAPGKGLEWVATISQAGSEKDYVDSVKGRFTISRDNAKKSLYLQMNSLRAEDTAVYYCASGVYSFDYRGQGTLVTVSSGTGGGGSGGGGSGGGGSEFDIQMTQSPPSLSASVGGKVTITCKASQDIDRYMAWYQDKPGKGPKLLIHDTSTLQPGIPSRFSGSGSGRDYSFSISNLEPEDIATYYCLQYDNLWTFGGGTKLEIKRLEGQPKANPTVTLFPPSSEELQANKATLVCLISDFYPGAVTVAWKADGSPVKAGVETTKPSKQSNNKYAASSYLSLTPEQWKSHRSYSCQVTHEGSTVEKTVAPTECSGRADCGFTSESYQQGVLSATILYEILLGKATLYAVLVSALVLMAMVKRKDSRGRAKRSGSGVKQTLNFDLLKLAGDVESNPGPTSMDWIWRILFLVGAATGAHSFEQVQLVQSGAELVKPGASVKMSCKASGYIFTNYNIHWVKKSPGQGLEWIGAIYPGNGDAPYSQKFQDRATLTADTSSSTTYMELSSLTSEDSAVYYCVRANWDVAFAYWGQGTLVSVSSTRASTKGPSVFPLAPSSKSTSGGTAALGCLVKDYFPEPVTVSWNSGALTSGVHTFPAVLQSSGLYSLSSVVTVPSSSLGTQTYICNVNHKPSNTKVDKRVEPKSCIPEDTFFPSPESSCDVKLVEKSFETDTNLNFQNLSVIGFRILLLKVAGFNLLMTLRLWSS

SEQ ID NO: 13933 - protein, 761 aa, Artificial Sequence
  Synthetic Polypeptide
MALPVTALLLPLALLLHAARPEVQLVESGGGLVQPGGSLRLSCAASGFSFSDFWMSWVRQAPGKGLEWVATISQAGSEKDYVDSVKGRFTISRDNAKKSLYLQMNSLRAEDTAVYYCASGVYSFDYRGQGTLVTVSSGTGGGGSGGGGSGGGGSEFDIQMTQSPASLSASVGETVTITCRVSGNIHNYLAWYQQKQGKSPQLLVYNAKTLADGVPSRFSGSGSGTQYSLKINSLQPEDFGSYYCQHFWSNPYTFGGGTKLEIKLEGQPKANPTVTLFPPSSEELQANKATLVCLISDFYPGAVTVAWKADGSPVKAGVETTKPSKQSNNKYAASSYLSLTPEQWKSHRSYSCQVTHEGSTVEKTVAPTECSGRADCGFTSESYQQGVLSATILYEILLGKATLYAVLVSALVLMAMVKRKDSRGRAKRSGSGVKQTLNFDLLKLAGDVESNPGPTSMDWIWRILFLVGAATGAHSFEQVQLQQSGASVKVSCKASELVRPGTGYAFTNYLIEWVKQRPGQGLEWIGVINPGSGGTNYNEKFKGKATLTADKSSSTAYMQLSSLTSDDSAVYFCARYRSYDWYFDVWGAGTTVTVSSTRASTKGPSVFPLAPSSKSTSGGTAALGCLVKDYFPEPVTVSWNSGALTSGVHTFPAVLQSSGLYSLSSVVTVPSSSLGTQTYICNVNHKPSNTKVDKRVEPKSCIPEDTFFPSPESSCDVKLVEKSFETDTNLNFQNLSVIGFRILLLKVAGFNLLMTLRLWSS

SEQ ID NO: 13934 - protein, 760 aa, Artificial Sequence
  Synthetic Polypeptide
MALPVTALLLPLALLLHAARPEVQLVESGGGLVQPGGSLRLSCAASGFSFSDFWMSWVRQAPGKGLEWVATISQAGSEKDYVDSVKGRFTISRDNAKKSLYLQMNSLRAEDTAVYYCASGVYSFDYRGQGTLVTVSSGTGGGGSGGGGSGGGGSEFDIQMTQSFSSLSASVGDRVTITCRASQDISNYLNWYQQKPGKAPKLLIYYTSRLHSGVPSRFSGSGSGTDYTLTISSLQPEDFATYFCQQGNTLPWTFGGGTKLEIKRLEGQPKANPTVTLFPPSSEELQANKATLVCLISDFYPGAVTVAWKADGSPVKAGVETTKPSKQSNNKYAASSYLSLTPEQWKSHRSYSCQVTHEGSTVEKTVAPTECSGRADCGFTSESYQQGVLSATILYEILLGKATLYAVLVSALVLMAMVKRKDSRGRAKRSGSGVKQTLNFDLLKLAGDVESNPGPTSMDWIWRILFLVGAATGAHSFEEVQLVQSGGGLVQSGGSLRLSCRASGYTFTRYWMLWVRQRPGKGLEWVAEINPRNDRTNYNEKFKTRFTISVDRSKNTLYLQMDSLRAEDTAVYFCALGGGYAMDYWGQGTLVTVSSTRASTKGPSVFPLAPSSKSTSGGTAALGCLVKDYFPEPVTVSWNSGALTSGVHTFPAVLQSSGLYSLSSVVTVPSSSLGTQTYICNVNHKPSNTKVDKRVEPKSCIPEDTFFPSPESSCDVKLVEKSFETDTNLNFQNLSVIGFRILLLKVAGFNLLMTLRLWSS

SEQ ID NO: 13935 - protein, 761 aa, Artificial Sequence
  Synthetic Polypeptide
MALPVTALLLPLALLLHAARPEVQLVESGGGLVQPGGSLRLSCAASGFSFSDFWMSWVRQAPGKGLEWVATISQAGSEKDYVDSVKGRFTISRDNAKKSLYLQMNSLRAEDTAVYYCASGVYSFDYRGQGTLVTVSSGTGGGGSGGGGSGGGGSEFDIQMTQSPASLSASVGETVTIICRASVNIYSYLAWYQQKQGKSPQLLVYNAKILAEGVPSRFSGSGSGTQFSLKINSLQPEDFGSYYCQHHYGTFTFGSGTKLEIKRLEGQPKANPTVTLFPPSSEELQANKATLVCLISDFYPGAVTVAWKADGSPVKAGVETTKPSKQSNNKYAASSYLSLTPEQWKSHRSYSCQVTHEGSTVEKTVAPTECSGRADCGFTSESYQQGVLSATILYEILLGKATLYAVLVSALVLMAMVKRKDSRGRAKRSGSGVKQTLNFDLLKLAGDVESNPGPTSMDWIWRILFLVGAATGAHSFEQVQLKESGPGLVAPSQSLSITCTISGFSLTSYGVHWVRQPPGKGLEWLVVIWSDGSTTYNSALKSRLSISKDNSKSQVFLKMNSLQTDDTAIYYCASHYGSTLAFASWGHGTLVTVSAATRASTKGPSVFPLAPSSKSTSGGTAALGCLVKDYFPEPVTVSWNSGALTSGVHTFPAVLQSSGLYSLSSVVTVPSSSLGTQTYICNVNHKPSNTKVDKRVEPKSCIPEDTFFPSPESSCDVKLVEKSFETDTNLNFQNLSVIGFRILLLKVAGFNLLMTLRLWSS

SEQ ID NO: 13936 - protein, 769 aa, Artificial Sequence
  Synthetic Polypeptide
MALPVTALLLPLALLLHAARPEVQLVESGGGLVQPGGSLRLSCAASGFSFSDFWMSWVRQAPGKGLEWVATISQAGSEKDYVDSVKGRFTISRDNAKKSLYLQMNSLRAEDTAVYYCASGVYSFDYRGQGTLVTVSSGTGGGGSGGGGSGGGGSEFDIVMTQSHKFMSTSVGDRVSVTCKASQNVGNNVAWYQQKPGQSPKVLIYSASYRYSGVPDRFTGSGSGTDFTLTISNVQSEDLAEYFCQQYNTYPFTFGSGTKLEIKLEGQPKANPTVTLFPPSSEELQANKATLVCLISDFYPGAVTVAWKADGSPVKAGVETTKPSKQSNNKYAASSYLSLTPEQWKSHRSYSCQVTHEGSTVEKTVAPTECSGRADCGFTSESYQQGVLSATILYEILLGKATLYAVLVSALVLMAMVKRKDSRGRAKRSGSGVKQTLNFDLLKLAGDVESNPGPTSMDWIWRILFLVGAATGAHSFEEVQLEESGGGLVQPGGSMKLSCVASGFTFSNYWMNWVRQSPEKGLEWVAEIRFKSHNYATHFAESVKGRFTISRDDSKSSVYLQMNNLRAEDTGIYYCTRRIGNSDYDWWYFDVWGAGTSVTVSSASTRASTKGPSVFPLAPSSKSTSGGTAALGCLVKDYFPEPVTVSWNSGALTSGVHTFPAVLQSSGLYSLSSVVTVPSSSLGTQTYICNVNHKPSNTKVDKRVEPKSCIPEDTFFPSPESSCDVKLVEKSFETDTNLNFQNLSVIGFRILLLKVAGFNLLMTLRLWSS

SEQ ID NO: 13937 - protein, 762 aa, Artificial Sequence
  Synthetic Polypeptide
MALPVTALLLPLALLLHAARPEVQLVESGGGLVQPGGSLRLSCAASGFSFSDFWMSWVRQAPGKGLEWVATISQAGSEKDYVDSVKGRFTISRDNAKKSLYLQMNSLRAEDTAVYYCASGVYSFDYRGQGTLVTVSSGTGGGGSGGGGSGGGGSEFDQIVLTQSPAIMSASPGEKVTISCSASSSVSYMYWYQQKPGSSPKPWIYRTSNLASGVPARFSGSGSGTSYSLTISNMEAEDAAAYYCQQYHSYPTTFGGGTKLEVKLEGQPKANPTVTLFPPSSEELQANKATLVCLISDFYPGAVTVAWKADGSPVKAGVETTKPSKQSNNKYAASSYLSLTPEQWKSHRSYSCQVTHEGSTVEKTVAPTECSGRADCGFTSESYQQGVLSATILYEILLGKATLYAVLVSALVLMAMVKRKDSRGRAKRSGSGVKQTLNFDLLKLAGDVESNPGPTSMDWIWRILFLVGAATGAHSFEEVQLVESGGGLVQPKGSLKLSCAASGFSFNTYAMNWVRQAPGKGLEWIAHIRSKSNNFATYYADSVKDRFSISRDASENILFLQMNNLKTEDTAMYYCVRQGGDFPMDYWGQGTSVTVSSTRASTKGPSVFPLAPSSKSTSGGTAALGCLVKDYFPEPVTVSWNSGALTSGVHTFPAVLQSSGLYSLSSVVTVPSSSLGTQTYICNVNHKPSNTKVDKRVEPKSCIPEDTFFPSPESSCDVKLVEKSFETDTNLNFQNLSVIGFRILLLKVAGFNLLMTLRLWSS

SEQ ID NO: 13938 - protein, 761 aa, Artificial Sequence
  Synthetic Polypeptide
MALPVTALLLPLALLLHAARPEVQLVESGGGLVQPGGSLRLSCAASGFSFSDFWMSWVRQAPGKGLEWVATISQAGSEKDYVDSVKGRFTISRDNAKKSLYLQMNSLRAEDTAVYYCASGVYSFDYRGQGTLVTVSSGTGGGGSGGGGSGGGGSEFDDIQMTQSSSSFSVSLGDRVTITCMASEDIYIRLAWYQQKPGNAPRLLISAATSLETGVPSRFSGSGSGKDYTLSITSLQTEDVGTYYCQQYWSSPWTFGGGTKLEINLEGQPKANPTVTLFPPSSEELQANKATLVCLISDFYPGAVTVAWKADGSPVKAGVETTKPSKQSNNKYAASSYLSLTPEQWKSHRSYSCQVTHEGSTVEKTVAPTECSGRADCGFTSESYQQGVLSATILYEILLGKATLYAVLVSALVLMAMVKRKDSRGRAKRSGSGVKQTLNFDLLKLAGDVESNPGPTSMDWIWRILFLVGAATGAHSFEDVQLQESGPGLVKPSQSLSLTCTVTGYSITSDYTWNWIRQFPGNKLEWMGYITYSGSTSYNPSLKSRNSITRDTSKNQFFLQLNSVTTEDTATYYCARLGRRYTMDYWGQGTSVTVSSTRASTKGPSVFPLAPSSKSTSGGTAALGCLVKDYFPEPVTVSWNSGALTSGVHTFPAVLQSSGLYSLSSVVTVPSSSLGTQTYICNVNHKPSNTKVDKRVEPKSCIPEDTFFPSPESSCDVKLVEKSFETDTNLNFQNLSVIGFRILLLKVAGFNLLMTLRLWSS

SEQ ID NO: 13939 - protein, 764 aa, Artificial Sequence
  Synthetic Polypeptide
MALPVTALLLPLALLLHAARPEVQLVESGGGLVQPGGSLRLSCAASGFSFSDFWMSWVRQAPGKGLEWVATISQAGSEKDYVDSVKGRFTISRDNAKKSLYLQMNSLRAEDTAVYYCASGVYSFDYRGQGTLVTVSSGTGGGGSGGGGSGGGGSEFDDIQMTQSPSSLSASVGDRVTITCRASQSISSYLNWYQQKPGKAPKLLIYDASNLETGVPSRFSGSGSGTDFTFTISSLQPEDIATYYCQQYDNLPLTFGGGTKVDIKRLEGQPKANPTVTLFPPSSEELQANKATLVCLISDFYPGAVTVAWKADGSPVKAGVETTKPSKQSNNKYAASSYLSLTPEQWKSHRSYSCQVTHEGSTVEKTVAPTECSGRADCGFTSESYQQGVLSATILYEILLGKATLYAVLVSALVLMAMVKRKDSRGRAKRSGSGVKQTLNFDLLKLAGDVESNPGPTSMDWIWRILFLVGAATGAHSFEQVQLVESGGGVVQPGRSLRLSCAASGFTFSSYAMHWVRQAPGKGLEWVAVISYDGSNKYYADSVKGRFTISRDNSKNTLYLQMNSLRAEDTAVYYCARAHNSSSWSFDYWGQGTLVTVSSTRASTKGPSVFPLAPSSKSTSGGTAALGCLVKDYFPEPVTVSWNSGALTSGVHTFPAVLQSSGLYSLSSVVTVPSSSLGTQTYICNVNHKPSNTKVDKRVEPKSCIPEDTFFPSPESSCDVKLVEKSFETDTNLNFQNLSVIGFRILLLKVAGFNLLMTLRLWSS

SEQ ID NO: 13940 - protein, 773 aa, Artificial Sequence
  Synthetic Polypeptide
MALPVTALLLPLALLLHAARPEVQLVESGGGLVQPGGSLRLSCAASGFSFSDFWMSWVRQAPGKGLEWVATISQAGSEKDYVDSVKGRFTISRDNAKKSLYLQMNSLRAEDTAVYYCASGVYSFDYRGQGTLVTVSSGTGGGGSGGGGSGGGGSEFDDVVMTQSPLSLPVSLGDQASISCRSSQRLVHSNGNTYLHWYLQKPGQSPKLLIYRVSNRFPGVPDRFSGSGSGTDFTLKISRVEAEDLGIYFCSQSTHVPYTFGGGTKLEIKRLEGQPKANPTVTLFPPSSEELQANKATLVCLISDFYPGAVTVAWKADGSPVKAGVETTKPSKQSNNKYAASSYLSLTPEQWKSHRSYSCQVTHEGSTVEKTVAPTECSGRADCGFTSESYQQGVLSATILYEILLGKATLYAVLVSALVLMAMVKRKDSRGRAKRSGSGVKQTLNFDLLKLAGDVESNPGPTSMDWIWRILFLVGAATGAHSFEEVRLQQSGPDLIKPGASVKMSCKASGYTFTGYVMHWVKQRPGQGLEWIGFINPYNDDIQSNERFRGKATLTSDKSSTTAYMELSSLTSEDSAVYYCARGAGYNFDGAYRFFDFWGQGTTLTVSSTRASTKGPSVFPLAPSSKSTSGGTAALGCLVKDYFPEPVTVSWNSGALTSGVHTFPAVLQSSGLYSLSSVVTVPSSSLGTQTYICNVNHKPSNTKVDKRVEPKSCIPEDTFFPSPESSCDVKLVEKSFETDTNLNFQNLSVIGFRILLLKVAGFNLLMTLRLWSS

SEQ ID NO: 13941 - protein, 764 aa, Artificial Sequence
  Synthetic Polypeptide
MALPVTALLLPLALLLHAARPEVQLVESGGGLVQPGGSLRLSCAASGFSFSDFWMSWVRQAPGKGLEWVATISQAGSEKDYVDSVKGRFTISRDNAKKSLYLQMNSLRAEDTAVYYCASGVYSFDYRGQGTLVTVSSGTGGGGSGGGGSGGGGSEFDSYELTQPPSVSVSPGQTATISCSGDQLGGKYGHWYQKKPGQSPVLVLYQDRKRPAGIPERFSGSSSGNTITLTISGTQAVDEADYYCQAWDTNLGGVFGGGTKVTVLGQLEGQPKANPTVTLFPPSSEELQANKATLVCLISDFYPGAVTVAWKADGSPVKAGVETTKPSKQSNNKYAASSYLSLTPEQWKSHRSYSCQVTHEGSTVEKTVAPTECSGRADCGFTSESYQQGVLSATILYEILLGKATLYAVLVSALVLMAMVKRKDSRGRAKRSGSGVKQTLNFDLLKLAGDVESNPGPTSMDWIWRILFLVGAATGAHSFEQVQLVESGAEVKKPGASVKVSCKASGYTFTGYYMHWVRQAPGQGLEWMGRINPNSGGTNYAQKFQGRVTMTRDTSISTAYMELSRLRSDDTAVYYCASPRGRGSAFDIWGQGTLVTVSSTRASTKGPSVFPLAPSSKSTSGGTAALGCLVKDYFPEPVTVSWNSGALTSGVHTFPAVLQSSGLYSLSSVVTVPSSSLGTQTYICNVNHKPSNTKVDKRVEPKSCIPEDTFFPSPESSCDVKLVEKSFETDTNLNFQNLSVIGFRILLLKVAGFNLLMTLRLWSS

SEQ ID NO: 13942 - protein, 767 aa, Artificial Sequence
  Synthetic Polypeptide
MALPVTALLLPLALLLHAARPEVQLVESGGGLVQPGGSLRLSCAASGFSFSDFWMSWVRQAPGKGLEWVATISQAGSEKDYVDSVKGRFTISRDNAKKSLYLQMNSLRAEDTAVYYCASGVYSFDYRGQGTLVTVSSGTGGGGSGGGGSGGGGSEFDNFMLTQPHSVSESPGKTVTISCTRSSGSIASKYVQWYQQRPGSSPTTVIYEDNQRPSGVPDRFSGSIDTSSNSASLTISGLRTEDEADYYCHSYDSNNHSVFGGGTKVTVLGQLEGQPKANPTVTLFPPSSEELQANKATLVCLISDFYPGAVTVAWKADGSPVKAGVETTKPSKQSNNKYAASSYLSLTPEQWKSHRSYSCQVTHEGSTVEKTVAPTECSGRADCGFTSESYQQGVLSATILYEILLGKATLYAVLVSALVLMAMVKRKDSRGRAKRSGSGVKQTLNFDLLKLAGDVESNPGPTSMDWIWRILFLVGAATGAHSFEEVQLVESGGGVVQPGGSLRLSCAASGFTFSSYAMSWVRQAPGKGLEWVSAISGSGGSTYYADSVKGRFSISRDNSKNTLYLQMNSLRAEDTAVYYCARTRSSGAFDIWGQGTLVTVSSTRASTKGPSVFPLAPSSKSTSGGTAALGCLVKDYFPEPVTVSWNSGALTSGVHTFPAVLQSSGLYSLSSVVTVPSSSLGTQTYICNVNHKPSNTKVDKRVEPKSCIPEDTFFPSPESSCDVKLVEKSFETDTNLNFQNLSVIGFRILLLKVAGFNLLMTLRLWSS

SEQ ID NO: 13943 - protein, 762 aa, Artificial Sequence
  Synthetic Polypeptide
MALPVTALLLPLALLLHAARPEVQLVESGGGLVQPGGSLRLSCAASGFSFSDFWMSWVRQAPGKGLEWVATISQAGSEKDYVDSVKGRFTISRDNAKKSLYLQMNSLRAEDTAVYYCASGVYSFDYRGQGTLVTVSSGTGGGGSGGGGSGGGGSEFDIQMNQSPSSLSASLGDTITITCHASQNINVWLSWYQQKPGNIPKLLIYKASNLHTGVPSRFSGSGSGTGFTITISSLQPEDIATYYCQQGQSYPWTFGGGTKLEIKRLEGQPKANPTVTLFPPSSEELQANKATLVCLISDFYPGAVTVAWKADGSPVKAGVETTKPSKQSNNKYAASSYLSLTPEQWKSHRSYSCQVTHEGSTVEKTVAPTECSGRADCGFTSESYQQGVLSATILYEILLGKATLYAVLVSALVLMAMVKRKDSRGRAKRSGSGVKQTLNFDLLKLAGDVESNPGPTSMDWIWRILFLVGAATGAHSFEEVQLQQSGPELVKPGASVKISCKASGYSFTGYFMNWVKQSHGKSLEYIGRFNPYNGETLYNQKFKGKATLTVDKSSSTVHMELLSVTSEDSAVYYCGRSGNDDAMDYWGQGTSVTVSSATRASTKGPSVFPLAPSSKSTSGGTAALGCLVKDYFPEPVTVSWNSGALTSGVHTFPAVLQSSGLYSLSSVVTVPSSSLGTQTYICNVNHKPSNTKVDKRVEPKSCIPEDTFFPSPESSCDVKLVEKSFETDTNLNFQNLSVIGFRILLLKVAGFNLLMTLRLWSS

SEQ ID NO: 13944 - protein, 763 aa, Artificial Sequence
  Synthetic Polypeptide
MALPVTALLLPLALLLHAARPEVQLVESGGGLVQPGGSLRLSCAASGFSFSDFWMSWVRQAPGKGLEWVATISQAGSEKDYVDSVKGRFTISRDNAKKSLYLQMNSLRAEDTAVYYCASGVYSFDYRGQGTLVTVSSGTGGGGSGGGGSGGGGSEFEIVLTQSPATLSLSPGERATLSCRASQSVRSYLAWYQQKPGQAPRLLIYDASNRATGIPARFSGSGSGTDFTLTISSLEPEDFAVYYCQQRSNWPPTFGQGTKVEIKLEGQPKANPTVTLFPPSSEELQANKATLVCLISDFYPGAVTVAWKADGSPVKAGVETTKPSKQSNNKYAASSYLSLTPEQWKSHRSYSCQVTHEGSTVEKTVAPTECSGRADCGFTSESYQQGVLSATILYEILLGKATLYAVLVSALVLMAMVKRKDSRGRAKRSGSGVKQTLNFDLLKLAGDVESNPGPTSMDWIWRILFLVGAATGAHSFEQLQVQESGPGLVKPSETLSLTCTVSGGSISNSYFSWGWIRQPPGKGLEWIGSFYYGEKTYYNPSLKSRATISIDTSKSQFSLKLSSVTAADTAVYYCPRGPTMIRGVIDSWGQGTLVTVSSTRASTKGPSVFPLAPSSKSTSGGTAALGCLVKDYFPEPVTVSWNSGALTSGVHTFPAVLQSSGLYSLSSVVTVPSSSLGTQTYICNVNHKPSNTKVDKRVEPKSCIPEDTFFPSPESSCDVKLVEKSFETDTNLNFQNLSVIGFRILLLKVAGFNLLMTLRLWSS

SEQ ID NO: 13945 - protein, 772 aa, Artificial Sequence
  Synthetic Polypeptide
MALPVTALLLPLALLLHAARPEVQLVESGGGLVQPGGSLRLSCAASGFSFSDFWMSWVRQAPGKGLEWVATISQAGSEKDYVDSVKGRFTISRDNAKKSLYLQMNSLRAEDTAVYYCASGVYSFDYRGQGTLVTVSSGTGGGGSGGGGSGGGGSEFDIVMTQTPLSLPVTPGEPASISCRSSRSLLDSDDGNTYLDWYLQKPGQSPQLLIYTLSYRASGVPDRFSGSGSGTDFTLKISRVEAEDVGVYYCMQRVEFPITFGQGTRLEIKRLEGQPKANPTVTLFPPSSEELQANKATLVCLISDFYPGAVTVAWKADGSPVKAGVETTKPSKQSNNKYAASSYLSLTPEQWKSHRSYSCQVTHEGSTVEKTVAPTECSGRADCGFTSESYQQGVLSATILYEILLGKATLYAVLVSALVLMAMVKRKDSRGRAKRSGSGVKQTLNFDLLKLAGDVESNPGPTSMDWIWRILFLVGAATGAHSFEQVQLVESGGGVVQPGRSLRLSCAASGFIFSRYGMHWVRQAPGKGLKWVAVIWYDGSNKLYADSVKGRFTISRDNSKNTLYLQMNSLRAEDTAVYYCARDYYDNSRHHWGFDYWGQGTLVTVSSTRASTKGPSVFPLAPSSKSTSGGTAALGCLVKDYFPEPVTVSWNSGALTSGVHTFPAVLQSSGLYSLSSVVTVPSSSLGTQTYICNVNHKPSNTKVDKRVEPKSCIPEDTFFPSPESSCDVKLVEKSFETDTNLNFQNLSVIGFRILLLKVAGFNLLMTLRLWSS

SEQ ID NO: 13946 - protein, 762 aa, Artificial Sequence
  Synthetic Polypeptide
MALPVTALLLPLALLLHAARPEVQLVESGGGLVQPGGSLRLSCAASGFSFSDFWMSWVRQAPGKGLEWVATISQAGSEKDYVDSVKGRFTISRDNAKKSLYLQMNSLRAEDTAVYYCASGVYSFDYRGQGTLVTVSSGTGGGGSGGGGSGGGGSEFEIQMTQSPSSMSASLGDTITITCQATQDIFKNLNWYQQKPGKPPSLLIYYATELAEGVPSRFSGSGSGSDYSLTISNLESEDFAAYYCLQFFEFPFTFGSGTKLEMKLEGQPKANPTVTLFPPSSEELQANKATLVCLISDFYPGAVTVAWKADGSPVKAGVETTKPSKQSNNKYAASSYLSLTPEQWKSHRSYSCQVTHEGSTVEKTVAPTECSGRADCGFTSESYQQGVLSATILYEILLGKATLYAVLVSALVLMAMVKRKDSRGRAKRSGSGVKQTLNFDLLKLAGDVESNPGPTSMDWIWRILFLVGAATGAHSFEQVQLQQSGAELVRPGTSVKVSCKASGYVFTNYWIEWIKQRPGQGLEWIGVMNPGSGETTYNEKFKGKATLTADKSSSTAYMQLSSLTSVDSAVYFCARDHDRDYYAMDYWGQGTSVTVSSTRASTKGPSVFPLAPSSKSTSGGTAALGCLVKDYFPEPVTVSWNSGALTSGVHTFPAVLQSSGLYSLSSVVTVPSSSLGTQTYICNVNHKPSNTKVDKRVEPKSCIPEDTFFPSPESSCDVKLVEKSFETDTNLNFQNLSVIGFRILLLKVAGFNLLMTLRLWSS

SEQ ID NO: 13947 - protein, 759 aa, Artificial Sequence
  Synthetic Polypeptide
MALPVTALLLPLALLLHAARPEVQLVESGGGLVQPGGSLRLSCAASGFSFSDFWMSWVRQAPGKGLEWVATISQAGSEKDYVDSVKGRFTISRDNAKKSLYLQMNSLRAEDTAVYYCASGVYSFDYRGQGTLVTVSSGTGGGGSGGGGSGGGGSEFDILLTQSPAILSVSPGERVSFSCRASQNIGTSIHWYQQRTNGSPRLLIKYASESVSGIPSRFSGSGSGTDFTLSINSVESEDIADYYCQHTNSWPTTFGGGTKLEIKRLEGQPKANPTVTLFPPSSEELQANKATLVCLISDFYPGAVTVAWKADGSPVKAGVETTKPSKQSNNKYAASSYLSLTPEQWKSHRSYSCQVTHEGSTVEKTVAPTECSGRADCGFTSESYQQGVLSATILYEILLGKATLYAVLVSALVLMAMVKRKDSRGRAKRSGSGVKQTLNFDLLKLAGDVESNPGPTSMDWIWRILFLVGAATGAHSFEQVQLQQSDAELVKPGASVKISCKASGYTFTDHAIHWVKQKPEQGLEWIGYFSPGNGDIKYNEKFKGKATLTADKSSSTAYMQLNSLTSEDSAVYFCKRSYGNYDYWGQGTTLTVSSTRASTKGPSVFPLAPSSKSTSGGTAALGCLVKDYFPEPVTVSWNSGALTSGVHTFPAVLQSSGLYSLSSVVTVPSSSLGTQTYICNVNHKPSNTKVDKRVEPKSCIPEDTFFPSPESSCDVKLVEKSFETDTNLNFQNLSVIGFRILLLKVAGFNLLMTLRLWSS

SEQ ID NO: 13948 - protein, 764 aa, Artificial Sequence
  Synthetic Polypeptide
MALPVTALLLPLALLLHAARPEVQLVESGGGLVQPGGSLRLSCAASGFSFSDFWMSWVRQAPGKGLEWVATISQAGSEKDYVDSVKGRFTISRDNAKKSLYLQMNSLRAEDTAVYYCASGVYSFDYRGQGTLVTVSSGTGGGGSGGGGSGGGGSEFDIVMTQSPDSLAVSLGERATINCKSSQSLLNSGDQKNYLTWYQQKPGQPPKLLIYWASTRESGVPDRFSGSGSGTDFTLTISSLQAEDVAVYYCQNDYSYPLTFGQGTKVEIKLEGQPKANPTVTLFPPSSEELQANKATLVCLISDFYPGAVTVAWKADGSPVKAGVETTKPSKQSNNKYAASSYLSLTPEQWKSHRSYSCQVTHEGSTVEKTVAPTECSGRADCGFTSESYQQGVLSATILYEILLGKATLYAVLVSALVLMAMVKRKDSRGRAKRSGSGVKQTLNFDLLKLAGDVESNPGPTSMDWIWRILFLVGAATGAHSFEQVQLVQSGAEVKKTGSSVKVSCKASGYTFTDHAIHVWRQAPGQALEWMGHFSPGNTDIKYNDKFKGRVTLTVDRSMSTAYMELSSLRSEDTAMYYCKTSTFFFDYWGQGTMVTVSSTRASTKGPSVFPLAPSSKSTSGGTAALGCLVKDYFPEPVTVSWNSGALTSGVHTFPAVLQSSGLYSLSSVVTVPSSSLGTQTYICNVNHKPSNTKVDKRVEPKSCIPEDTFFPSPESSCDVKLVEKSFETDTNLNFQNLSVIGFRILLLKVAGFNLLMTLRLWSS

SEQ ID NO: 13949 - protein, 763 aa, Artificial Sequence
  Synthetic Polypeptide
MALPVTALLLPLALLLHAARPEVQLVESGGGLVQPGGSLRLSCAASGFSFSDFWMSWVRQAPGKGLEWVATISQAGSEKDYVDSVKGRFTISRDNAKKSLYLQMNSLRAEDTAVYYCASGVYSFDYRGQGTLVTVSSGTGGGGSGGGGSGGGGSEFDIQMTQSPSSLSASVGDRVTITCKASQDVSIAVAWYQQKPGKAPKVLIYSASYRYTGVPDRFSGSGSGTDFTFTISSLQPEDIAVYYCQQHYITPLTFGGGTKVEIKLEGQPKANPTVTLFPPSSEELQANKATLVCLISDFYPGAVTVAWKADGSPVKAGVETTKPSKQSNNKYAASSYLSLTPEQWKSHRSYSCQVTHEGSTVEKTVAPTECSGRADCGFTSESYQQGVLSATILYEILLGKATLYAVLVSALVLMAMVKRKDSRGRAKRSGSGVKQTLNFDLLKLAGDVESNPGPTSMDWIWRILFLVGAATGAHSFEQIQLVQSGHEVKKPGASVKVSCKASGYTFTNYGMNWVRQAPGQGLEWMGWINTKTGEPTYAEEFKGRFVFSLETSASTAYLQISSLKAEDTAMYFCGRGGYGSSYWYFDVWGQGTTVTVSSTRASTKGPSVFPLAPSSKSTSGGTAALGCLVKDYFPEPVTVSWNSGALTSGVHTFPAVLQSSGLYSLSSVVTVPSSSLGTQTYICNVNHKPSNTKVDKRVEPKSCIPEDTFFPSPESSCDVKLVEKSFETDTNLNFQNLSVIGFRILLLKVAGFNLLMTLRLWSS

SEQ ID NO: 13950 - protein, 765 aa, Artificial Sequence
  Synthetic Polypeptide
MALPVTALLLPLALLLHAARPEVQLVESGGGLVQPGGSLRLSCAASGFSFSDFWMSWVRQAPGKGLEWVATISQAGSEKDYVDSVKGRFTISRDNAKKSLYLQMNSLRAEDTAVYYCASGVYSFDYRGQGTLVTVSSGTGGGGSGGGGSGGGGSEFDIVMTQSPDSLAVSLGERATINCRASKSVSTSGYSYMHWYQQKPGQPPKLLIYLASNLESGVPDRFSGSGSGTDFTLTISSLQAEDVAVYYCQHSRELPYTFGQGTKLEIKLEGQPKANPTVTLFPPSSEELQANKATLVCLISDFYPGAVTVAWKADGSPVKAGVETTKPSKQSNNKYAASSYLSLTPEQWKSHRSYSCQVTHEGSTVEKTVAPTECSGRADCGFTSESYQQGVLSATILYEILLGKATLYAVLVSALVLMAMVKRKDSRGRAKRSGSGVKQTLNFDLLKLAGDVESNPGPTSMDWIWRILFLVGAATGAHSFEQVQLQESGPGLVKPSETLSLTCTVSGGSISSYGVHWIRQPPGKGLEWIGVIWTSGVTDYNSALMGRVTISVDTSKNQFSLKLSSVTAADTAVYYCARDGDYDRYTMDYWGQGTLVTVSSTRASTKGPSVFPLAPSSKSTSGGTAALGCLVKDYFPEPVTVSWNSGALTSGVHTFPAVLQSSGLYSLSSVVTVPSSSLGTQTYICNVNHKPSNTKVDKRVEPKSCIPEDTFFPSPESSCDVKLVEKSFETDTNLNFQNLSVIGFRILLLKVAGFNLLMTLRLWSS

SEQ ID NO: 13951 - protein, 765 aa, Artificial Sequence
  Synthetic Polypeptide
MALPVTALLLPLALLLHAARPEVQLVESGGGLVQPGGSLRLSCAASGFSFSDFWMSWVRQAPGKGLEWVATISQAGSEKDYVDSVKGRFTISRDNAKKSLYLQMNSLRAEDTAVYYCASGVYSFDYRGQGTLVTVSSGTGGGGSGGGGSGGGGSEFDIQMTQSPSSLSASVGDRVTITCRASQSIGTSLHWYQQKPGKAPKLLIKFASRLQSGVPSRFSGSGSGTDFTLTISSLQPEDFATYYCQQSPGFPPTFGQGTKLEIKRLEGQPKANPTVTLFPPSSEELQANKATLVCLISDFYPGAVTVAWKADGSPVKAGVETTKPSKQSNNKYAASSYLSLTPEQWKSHRSYSCQVTHEGSTVEKTVAPTECSGRADCGFTSESYQQGVLSATILYEILLGKATLYAVLVSALVLMAMVKRKDSRGRAKRSGSGVKQTLNFDLLKLAGDVESNPGPTSMDWIWRILFLVGAATGAHSFEQVQLVESGGGLVKPGGSLRLSCAASGFSITTSGYYWTWIRQFPGKGLEWMGYIGYNSKTYYNPALKSRITISRDNAKNSLYLQMNSLRAEDTAVYYCARSLYGGYKDAFDSWGQGTLVTVSSTRASTKGPSVFPLAPSSKSTSGGTAALGCLVKDYFPEPVTVSWNSGALTSGVHTFPAVLQSSGLYSLSSVVTVPSSSLGTQTYICNVNHKPSNTKVDKRVEPKSCIPEDTFFPSPESSCDVKLVEKSFETDTNLNFQNLSVIGFRILLLKVAGFNLLMTLRLWSS

SEQ ID NO: 13952 - protein, 770 aa, Artificial Sequence
  Synthetic Polypeptide
MALPVTALLLPLALLLHAARPEVQLVESGGGLVQPGGSLRLSCAASGFSFSDFWMSWVRQAPGKGLEWVATISQAGSEKDYVDSVKGRFTISRDNAKKSLYLQMNSLRAEDTAVYYCASGVYSFDYRGQGTLVTVSSGTGGGGSGGGGSGGGGSEFDEIVLTQSPLSLPVTPGEPASISCRSSQSLLHSIGYNYLDWYLQKPGQSPQLLIYLGSNRASGVPDRFSGSGSGTDFTLKISRVEAEDVGVYYCMQALQTPLTFGGGTKVEIKRLEGQPKANPTVTLFPPSSEELQANKATLVCLISDFYPGAVTVAWKADGSPVKAGVETTKPSKQSNNKYAASSYLSLTPEQWKSHRSYSCQVTHEGSTVEKTVAPTECSGRADCGFTSESYQQGVLSATILYEILLGKATLYAVLVSALVLMAMVKRKDSRGRAKRSGSGVKQTLNFDLLKLAGDVESNPGPTSMDWIWRILFLVGAATGAHSFEEVQLVESGGGVVQPGRSLRLSCAASGFTFRSYGMHWVRQAPGKGLEWVAVISYDGSNKYYTDSVNGRFTISRDNSKNTLYLQMNSLRAEDTAVYYCARGGGYYETSGPDYWGQGTLVTVSSTRASTKGPSVFPLAPSSKSTSGGTAALGCLVKDYFPEPVTVSWNSGALTSGVHTFPAVLQSSGLYSLSSVVTVPSSSLGTQTYICNVNHKPSNTKVDKRVEPKSCIPEDTFFPSPESSCDVKLVEKSFETDTNLNFQNLSVIGFRILLLKVAGFNLLMTLRLWSS

SEQ ID NO: 13953 - protein, 768 aa, Artificial Sequence
  Synthetic Polypeptide
MALPVTALLLPLALLLHAARPEVQLVESGGGLVQPGGSLRLSCAASGFSFSDFWMSWVRQAPGKGLEWVATISQAGSEKDYVDSVKGRFTISRDNAKKSLYLQMNSLRAEDTAVYYCASGVYSFDYRGQGTLVTVSSGTGGGGSGGGGSGGGGSEFDDVVMTQSPLSLPVTPGEPASISCRSSQSLLHSIGYNYLHWFLQKPGQSPQLLIYLGSNRASGVPDRFSGSGSGTDFTLKISRVEAEDVGVYYCMQALQTPPTFGQGTRLEIKRLEGQPKANPTVTLFPPSSEELQANKATLVCLISDFYPGAVTVAWKADGSPVKAGVETTKPSKQSNNKYAASSYLSLTPEQWKSHRSYSCQVTHEGSTVEKTVAPTECSGRADCGFTSESYQQGVLSATILYEILLGKATLYAVLVSALVLMAMVKRKDSRGRAKRSGSGVKQTLNFDLLKLAGDVESNPGPTSMDWIWRILFLVGAATGAHSFEQLQLQESGPGLVKPSGTLSLTCAVSGGSISSSNWWSWVRQPPGKGLEWIGEIYHSGSTNYNPSLKSRVTISVDKSKNQFSLKLSSVTAADTAVYYCVGSPYGDYVLDYWGQGTLVTVSSTRASTKGPSVFPLAPSSKSTSGGTAALGCLVKDYFPEPVTVSWNSGALTSGVHTFPAVLQSSGLYSLSSVVTVPSSSLGTQTYICNVNHKPSNTKVDKRVEPKSCIPEDTFFPSPESSCDVKLVEKSFETDTNLNFQNLSVIGFRILLLKVAGFNLLMTLRLWSS

SEQ ID NO: 13954 - protein, 766 aa, Artificial Sequence
  Synthetic Polypeptide
MALPVTALLLPLALLLHAARPEVQLVESGGGLVQPGGSLRLSCAASGFSFSDFWMSWVRQAPGKGLEWVATISQAGSEKDYVDSVKGRFTISRDNAKKSLYLQMNSLRAEDTAVYYCASGVYSFDYRGQGTLVTVSSGTGGGGSGGGGSGGGGSEFDEIVLTQSPGTLSLSLGERATLSCRASQSISSSFLAWYQQKPGQAPKLLIYAASTRATGIPDRFSGSGSGTDFTLTISRLEPEDFAVYYCQQYGRSLSFGGGTKVEVKLEGQPKANPTVTLFPPSSEELQANKATLVCLISDFYPGAVTVAWKADGSPVKAGVETTKPSKQSNNKYAASSYLSLTPEQWKSHRSYSCQVTHEGSTVEKTVAPTECSGRADCGFTSESYQQGVLSATILYEILLGKATLYAVLVSALVLMAMVKRKDSRGRAKRSGSGVKQTLNFDLLKLAGDVESNPGPTSMDWIWRILFLVGAATGAHSFEQVQLQQSGPGLVKPSQTLSLTCAISGDSVSGNSATWNWIRQSPSRGLEWLGRTYYRSKWNHDYAESVKSRITINPDTSKNQFSLQLNSVTPEDTAVYYCARGDSSSWYAFDYWGQGTLVTVSSTRASTKGPSVFPLAPSSKSTSGGTAALGCLVKDYFPEPVTVSWNSGALTSGVHTFPAVLQSSGLYSLSSVVTVPSSSLGTQTYICNVNHKPSNTKVDKRVEPKSCIPEDTFFPSPESSCDVKLVEKSFETDTNLNFQNLSVIGFRILLLKVAGFNLLMTLRLWSS

SEQ ID NO: 13955 - protein, 765 aa, Artificial Sequence
  Synthetic Polypeptide
MALPVTALLLPLALLLHAARPEVQLVESGGGLVQPGGSLRLSCAASGFSFSDFWMSWVRQAPGKGLEWVATISQAGSEKDYVDSVKGRFTISRDNAKKSLYLQMNSLRAEDTAVYYCASGVYSFDYRGQGTLVTVSSGTGGGGSGGGGSGGGGSEFDQSVVTQPPSVSVAPGKTARITCGRNNIGSKSVHWYQQKPGQAPVLVVYDDSDRPSGIPERFSGSNSGNTATLTISRVEAGDEADYYCQVWDSSSDHVVFGGGTKLTVLGLEGQPKANPTVTLFPPSSEELQANKATLVCLISDFYPGAVTVAWKADGSPVKAGVETTKPSKQSNNKYAASSYLSLTPEQWKSHRSYSCQVTHEGSTVEKTVAPTECSGRADCGFTSESYQQGVLSATILYEILLGKATLYAVLVSALVLMAMVKRKDSRGRAKRSGSGVKQTLNFDLLKLAGDVESNPGPTSMDWIWRILFLVGAATGAHSFEVQLVQSGGGVMRPGGSLRLSCAASGFTFDDYGMSWVRQAPGKGLEWVSGINWNGGSTGYADSVRGRFTISRDNAKNSLYLQMNSLRAEDTALYYCARERGYGYHDPHDYWGQGTLVTVSSTRASTKGPSVFPLAPSSKSTSGGTAALGCLVKDYFPEPVTVSWNSGALTSGVHTFPAVLQSSGLYSLSSVVTVPSSSLGTQTYICNVNHKPSNTKVDKRVEPKSCIPEDTFFPSPESSCDVKLVEKSFETDTNLNFQNLSVIGFRILLLKVAGFNLLMTLRLWSS

SEQ ID NO: 13956 - protein, 778 aa, Artificial Sequence
  Synthetic Polypeptide
MALPVTALLLPLALLLHAARPEVQLVESGGGLVQPGGSLRLSCAASGFSFSDFWMSWVRQAPGKGLEWVATISQAGSEKDYVDSVKGRFTISRDNAKKSLYLQMNSLRAEDTAVYYCASGVYSFDYRGQGTLVTVSSGTGGGGSGGGGSGGGGSEFEQKLISEEDLEFQAVVTQPPSASGTPGQRVTISCSGSSSNIGSNTVNWYQQVPGTAPKLLIYSNNQRPSGVPDRFSGSKSGTSASLAISGLQSEDEADYYCAAWDDSLNGWVFGGGTKLTVLLEGQPKANPTVTLFPPSSEELQANKATLVCLISDFYPGAVTVAWKADGSPVKAGVETTKPSKQSNNKYAASSYLSLTPEQWKSHRSYSCQVTHEGSTVEKTVAPTECSGRADCGFTSESYQQGVLSATILYEILLGKATLYAVLVSALVLMAMVKRKDSRGRAKRSGSGVKQTLNFDLLKLAGDVESNPGPTSMDWIWRILFLVGAATGAHSFEQMQLVQSGAEVKEPGESLRISCKGSGYSFTNFWISWVRQMPGKGLEWMGRVDPGYSYSTYSPSFQGHVTISADKSTSTAYLQWNSLKASDTAMYYCARVQYSGYYDWFDPWGQGTLVTVSSTRASTKGPSVFPLAPSSKSTSGGTAALGCLVKDYFPEPVTVSWNSGALTSGVHTFPAVLQSSGLYSLSSVVTVPSSSLGTQTYICNVNHKPSNTKVDKRVEPKSCIPEDTFFPSPESSCDVKLVEKSFETDTNLNFQNLSVIGFRILLLKVAGFNLLMTLRLWSS

SEQ ID NO: 13957 - protein, 772 aa, Artificial Sequence
  Synthetic Polypeptide
MALPVTALLLPLALLLHAARPEVQLVESGGGLVQPGGSLRLSCAASGFSFSDFWMSWVRQAPGKGLEWVATISQAGSEKDYVDSVKGRFTISRDNAKKSLYLQMNSLRAEDTAVYYCASGVYSFDYRGQGTLVTVSSGTGGGGSGGGGSGGGGSEFEQKLISEEDLEFDIQMTQSPSTLSASVGDRVTITCRASQNINKWLAWYQQRPGKAPQLLIYKASSLESGVPSRFSGSGSGTEYTLTISSLQPDDFATYYCQQYNSYATFGQGTKVEIKRLEGQPKANPTVTLFPPSSEELQANKATLVCLISDFYPGAVTVAWKADGSPVKAGVETTKPSKQSNNKYAASSYLSLTPEQWKSHRSYSCQVTHEGSTVEKTVAPTECSGRADCGFTSESYQQGVLSATILYEILLGKATLYAVLVSALVLMAMVKRKDSRGRAKRSGSGVKQTLNFDLLKLAGDVESNPGPTSMDWIWRILFLVGAATGAHSFEQVQLVQSGAEVKKPGESLKISCKGSGYNFSNKWIGWVRQLPGRGLEWIAIIYPGYSDITYSPSFQGRVTISADTSINTAYLHWHSLKASDTAMYYCVRHTALAGFDYWGLGTLVTVSSTRASTKGPSVFPLAPSSKSTSGGTAALGCLVKDYFPEPVTVSWNSGALTSGVHTFPAVLQSSGLYSLSSVVTVPSSSLGTQTYICNVNHKPSNTKVDKRVEPKSCIPEDTFFPSPESSCDVKLVEKSFETDTNLNFQNLSVIGFRILLLKVAGFNLLMTLRLWSS

SEQ ID NO: 13958 - protein, 764 aa, Artificial Sequence
  Synthetic Polypeptide
MALPVTALLLPLALLLHAARPEVQLVESGGGLVQPGGSLRLSCAASGFSFSDFWMSWVRQAPGKGLEWVATISQAGSEKDYVDSVKGRFTISRDNAKKSLYLQMNSLRAEDTAVYYCASGVYSFDYRGQGTLVTVSSGTGGGGSGGGGSGGGGSEFDIVLTQSPASLAVSLGQRATISCRASESVDNYGNTFMHWYQQKPGQPPKLLIYRASNLESGIPARFSGSGSRTDFTLTINPVEADDVATYYCQQSNEDPPTFGAGTKLELKLEGQPKANPTVTLFPPSSEELQANKATLVCLISDFYPGAVTVAWKADGSPVKAGVETTKPSKQSNNKYAASSYLSLTPEQWKSHRSYSCQVTHEGSTVEKTVAPTECSGRADCGFTSESYQQGVLSATILYEILLGKATLYAVLVSALVLMAMVKRKDSRGRAKRSGSGVKQTLNFDLLKLAGDVESNPGPTSMDWIWRILFLVGAATGAHSFEQIQLVQSGPELKKPGETVKISCKASGYIFTNYGMNWVKQAPGKSFKWMGWINTYTGESTYSADFKGRFAFSLETSASTAYLHINDLKNEDTATYFCARSGGYDPMDYWGQGTSVTVSSTRASTKGPSVFPLAPSSKSTSGGTAALGCLVKDYFPEPVTVSWNSGALTSGVHTFPAVLQSSGLYSLSSVVTVPSSSLGTQTYICNVNHKPSNTKVDKRVEPKSCIPEDTFFPSPESSCDVKLVEKSFETDTNLNFQNLSVIGFRILLLKVAGFNLLMTLRLWSS

SEQ ID NO: 13959 - protein, 763 aa, Artificial Sequence
  Synthetic Polypeptide
MALPVTALLLPLALLLHAARPEVQLVESGGGLVQPGGSLRLSCAASGFSFSDFWMSWVRQAPGKGLEWVATISQAGSEKDYVDSVKGRFTISRDNAKKSLYLQMNSLRAEDTAVYYCASGVYSFDYRGQGTLVTVSSGTGGGGSGGGGSGGGGSEFDEIVLTQSPGTLSLSPGERATLSCRASQSVSNTYLAWYHQRPGQAPRLLIYGASSRATGIPDRFSGSGSGTDFALTISSLEPEDFAVYYCQQYSNSWTFGQGTKVEIKRLEGQPKANPTVTLFPPSSEELQANKATLVCLISDFYPGAVTVAWKADGSPVKAGVETTKPSKQSNNKYAASSYLSLTPEQWKSHRSYSCQVTHEGSTVEKTVAPTECSGRADCGFTSESYQQGVLSATILYEILLGKATLYAVLVSALVLMAMVKRKDSRGRAKRSGSGVKQTLNFDLLKLAGDVESNPGPTSMDWIWRILFLVGAATGAHSFEQVQLVESGGGVVQPGRSLRLSCAASGFTFSSYDMHWVRQAPGKGLEWVAVISYDGTNEYYADSVKGRFTISRDTSKNTLYLQMNSLRAEDTAVYYCARERYFDWSFDYWGQGTLVSVSSTRASTKGPSVFPLAPSSKSTSGGTAALGCLVKDYFPEPVTVSWNSGALTSGVHTFPAVLQSSGLYSLSSVVTVPSSSLGTQTYICNVNHKPSNTKVDKRVEPKSCIPEDTFFPSPESSCDVKLVEKSFETDTNLNFQNLSVIGFRILLLKVAGFNLLMTLRLWSS

SEQ ID NO: 13960 - protein, 762 aa, Artificial Sequence
  Synthetic Polypeptide
MALPVTALLLPLALLLHAARPEVQLVESGGGLVQPGGSLRLSCAASGFSFSDFWMSWVRQAPGKGLEWVATISQAGSEKDYVDSVKGRFTISRDNAKKSLYLQMNSLRAEDTAVYYCASGVYSFDYRGQGTLVTVSSGTGGGGSGGGGSGGGGSEFDELTQDPAVSVALGQTVRITCQGDSLRSNYANWYQQKPGQAPVLVIYGQNNRPSGIPDRFSGSSSGNTASLTITGAQAADEADYYCDSRVSTGNHVVFGGGTKLTVLGQLEGQPKANPTVTLFPPSSEELQANKATLVCLISDFYPGAVTVAWKADGSPVKAGVETTKPSKQSNNKYAASSYLSLTPEQWKSHRSYSCQVTHEGSTVEKTVAPTECSGRADCGFTSESYQQGVLSATILYEILLGKATLYAVLVSALVLMAMVKRKDSRGRAKRSGSGVKQTLNFDLLKLAGDVESNPGPTSMDWIWRILFLVGAATGAHSFEEVQLVQSGAEVKKPGASVKVSCKASGYTFTSYAMHWVRQAPGQRLEWMGWINAGNGNTKYSQKFQGRVTITRDTSASTAYMELSSLRSEDTAVYYCARDISYGSFDYWGQGTLVTVSSTRASTKGPSVFPLAPSSKSTSGGTAALGCLVKDYFPEPVTVSWNSGALTSGVHTFPAVLQSSGLYSLSSVVTVPSSSLGTQTYICNVNHKPSNTKVDKRVEPKSCIPEDTFFPSPESSCDVKLVEKSFETDTNLNFQNLSVIGFRILLLKVAGFNLLMTLRLWSS

SEQ ID NO: 13961 - protein, 764 aa, Artificial Sequence
  Synthetic Polypeptide
MALPVTALLLPLALLLHAARPEVQLVESGGGLVQPGGSLRLSCAASGFSFSDFWMSWVRQAPGKGLEWVATISQAGSEKDYVDSVKGRFTISRDNAKKSLYLQMNSLRAEDTAVYYCASGVYSFDYRGQGTLVTVSSGTGGGGSGGGGSGGGGSEFDDIVLTQTPATLSVTPGDSVSLSCRASQSISNNLHWYQQKSHESPRLLIKNASQSISGIPSKFSGSGSGTDFTLRINSVETEDFGMYFCQQSNSWPYTFGSGTKLEIKLEGQPKANPTVTLFPPSSEELQANKATLVCLISDFYPGAVTVAWKADGSPVKAGVETTKPSKQSNNKYAASSYLSLTPEQWKSHRSYSCQVTHEGSTVEKTVAPTECSGRADCGFTSESYQQGVLSATILYEILLGKATLYAVLVSALVLMAMVKRKDSRGRAKRSGSGVKQTLNFDLLKLAGDVESNPGPTSMDWIWRILFLVGAATGAHSFEQVKLQQSGPELVKPGASVKISCKASGYSFTGYYMHWVKQSHGNILDWIGYIYPYNGVSSYNQKFKGKATLTVDKSSSTAYMELRSLTSEDSAVYYCARERGLYQLRAMDYWGQGTSVTVSSTRASTKGPSVFPLAPSSKSTSGGTAALGCLVKDYFPEPVTVSWNSGALTSGVHTFPAVLQSSGLYSLSSVVTVPSSSLGTQTYICNVNHKPSNTKVDKRVEPKSCIPEDTFFPSPESSCDVKLVEKSFETDTNLNFQNLSVIGFRILLLKVAGFNLLMTLRLWSS

SEQ ID NO: 13962 - protein, 755 aa, Artificial Sequence
  Synthetic Polypeptide
MALPVTALLLPLALLLHAARPEVQLVESGGGLVQPGGSLRLSCAASGFSFSDFWMSWVRQAPGKGLEWVATISQAGSEKDYVDSVKGRFTISRDNAKKSLYLQMNSLRAEDTAVYYCASGVYSFDYRGQGTLVTVSSGTGGGGSGGGGSGGGGSEFDDIVMTQTPAIMSASPGQKVTITCSASSSVNYMHWYQQKLGSSPKLWIYDTSKLAPGVPARFSGSGSGTSYSLTISSMEAEDAASYFCHQWSSYPYTFGSGTKLEIKLEGQPKANPTVTLFPPSSEELQANKATLVCLISDFYPGAVTVAWKADGSPVKAGVETTKPSKQSNNKYAASSYLSLTPEQWKSHRSYSCQVTHEGSTVEKTVAPTECSGRADCGFTSESYQQGVLSATILYEILLGKATLYAVLVSALVLMAMVKRKDSRGRAKRSGSGVKQTLNFDLLKLAGDVESNPGPTSMDWIWRILFLVGAATGAHSFEEVQLQESGPDLVKPSQSLSLTCTVTGYSITSGYGWHWIRQFPGNKLEWMGYIHYSGSTTYNPSLKSRISISRDTSKNQFFLQLNSVTTEDTATYYCARSLRYWGQGTTLTVSSTRASTKGPSVFPLAPSSKSTSGGTAALGCLVKDYFPEPVTVSWNSGALTSGVHTFPAVLQSSGLYSLSSVVTVPSSSLGTQTYICNVNHKPSNTKVDKRVEPKSCIPEDTFFPSPESSCDVKLVEKSFETDTNLNFQNLSVIGFRILLLKVAGFNLLMTLRLWSS

SEQ ID NO: 13963 - protein, 758 aa, Artificial Sequence
  Synthetic Polypeptide
MALPVTALLLPLALLLHAARPEVQLVESGGGLVQPGGSLRLSCAASGFSFSDFWMSWVRQAPGKGLEWVATISQAGSEKDYVDSVKGRFTISRDNAKKSLYLQMNSLRAEDTAVYYCASGVYSFDYRGQGTLVTVSSGTGGGGSGGGGSGGGGSEFDDIQMTQSPSSLSASVGDRVTITCSATSSISYMHWYQQKPGKAPKGWIYDTSKLAHGVPSRFSGSGSGTDFTLTISSLQPEDFATYYCHQRRSYPFTFGQGTKVEIKLEGQPKANPTVTLFPPSSEELQANKATLVCLISDFYPGAVTVAWKADGSPVKAGVETTKPSKQSNNKYAASSYLSLTPEQWKSHRSYSCQVTHEGSTVEKTVAPTECSGRADCGFTSESYQQGVLSATILYEILLGKATLYAVLVSALVLMAMVKRKDSRGRAKRSGSGVKQTLNFDLLKLAGDVESNPGPTSMDWIWRILFLVGAATGAHSFEEVQLVQSGAEVKKPGASVKVSCKASGYTFTNFWIHWVRQAPGQGLEWIGEIDPSDSYTNYNQKFKGRVTITRDTSTSTAYLELSSLRSEDTAVYYCAREITTVDYWGQGTLVTVSSTRASTKGPSVFPLAPSSKSTSGGTAALGCLVKDYFPEPVTVSWNSGALTSGVHTFPAVLQSSGLYSLSSVVTVPSSSLGTQTYICNVNHKPSNTKVDKRVEPKSCIPEDTFFPSPESSCDVKLVEKSFETDTNLNFQNLSVIGFRILLLKVAGFNLLMTLRLWSS

SEQ ID NO: 13964 - protein, 765 aa, Artificial Sequence
  Synthetic Polypeptide
MALPVTALLLPLALLLHAARPEVQLVESGGGLVQPGGSLRLSCAASGFSFSDFWMSWVRQAPGKGLEWVATISQAGSEKDYVDSVKGRFTISRDNAKKSLYLQMNSLRAEDTAVYYCASGVYSFDYRGQGTLVTVSSGTGGGGSGGGGSGGGGSEFDDIQMTQSPSSLSASVGDRVTITCKASQGFNKYVAWYQQKPGKAPKLLIYYTSTLQPGVPSRFSGSGSGRDYTLTISSLQPEDFATYYCLQYGNLLYAFGQGTKVEIKRLEGQPKANPTVTLFPPSSEELQANKATLVCLISDFYPGAVTVAWKADGSPVKAGVETTKPSKQSNNKYAASSYLSLTPEQWKSHRSYSCQVTHEGSTVEKTVAPTECSGRADCGFTSESYQQGVLSATILYEILLGKATLYAVLVSALVLMAMVKRKDSRGRAKRSGSGVKQTLNFDLLKLAGDVESNPGPTSMDWIWRILFLVGAATGAHSFEEVQLVQSGAEVKKPGASVKVSCKASGYTFTSYWIGWVRQAPGQGLEWIGDIYPGGGYTNYNEKFKGRVTITRDTSTSTAYLELSSLRSEDTAVYYCARLDGSSYRGAMDSWGQGTLVTVSSTRASTKGPSVFPLAPSSKSTSGGTAALGCLVKDYFPEPVTVSWNSGALTSGVHTFPAVLQSSGLYSLSSVVTVPSSSLGTQTYICNVNHKPSNTKVDKRVEPKSCIPEDTFFPSPESSCDVKLVEKSFETDTNLNFQNLSVIGFRILLLKVAGFNLLMTLRLWSS

SEQ ID NO: 13965 - protein, 761 aa, Artificial Sequence
  Synthetic Polypeptide
MALPVTALLLPLALLLHAARPEVQLVESGGGLVQPGGSLRLSCAASGFSFSDFWMSWVRQAPGKGLEWVATISQAGSEKDYVDSVKGRFTISRDNAKKSLYLQMNSLRAEDTAVYYCASGVYSFDYRGQGTLVTVSSGTGGGGSGGGGSGGGGSEFDDIQMTQSPSSLSASVGDRVTITCRASQDIRYYLNWYQQKPGKAPKLLIYVASSLQSGVPSRFSGSGSGTEFTLTVSSLQPEDFATYYCLQVYSTPRTFGQGTKVEIKLEGQPKANPTVTLFPPSSEELQANKATLVCLISDFYPGAVTVAWKADGSPVKAGVETTKPSKQSNNKYAASSYLSLTPEQWKSHRSYSCQVTHEGSTVEKTVAPTECSGRADCGFTSESYQQGVLSATILYEILLGKATLYAVLVSALVLMAMVKRKDSRGRAKRSGSGVKQTLNFDLLKLAGDVESNPGPTSMDWIWRILFLVGAATGAHSFEEVQLVESGGGLAKPGGSLRLSCAASGFRFTFNNYYMDWVRQAPGQGLEWVSRISSSGDPTWYADSVKGRFTISRENAKNTLFLQMNSLRAEDTAVYYCASLTTGSDSWGQGVLVTVSSTRASTKGPSVFPLAPSSKSTSGGTAALGCLVKDYFPEPVTVSWNSGALTSGVHTFPAVLQSSGLYSLSSVVTVPSSSLGTQTYICNVNHKPSNTKVDKRVEPKSCIPEDTFFPSPESSCDVKLVEKSFETDTNLNFQNLSVIGFRILLLKVAGFNLLMTLRLWSS

SEQ ID NO: 13966 - protein, 761 aa, Artificial Sequence
  Synthetic Polypeptide
MALPVTALLLPLALLLHAARPEVQLVESGGGLVQPGGSLRLSCAASGFSFSDFWMSWVRQAPGKGLEWVATISQAGSEKDYVDSVKGRFTISRDNAKKSLYLQMNSLRAEDTAVYYCASGVYSFDYRGQGTLVTVSSGTGGGGSGGGGSGGGGSEFEIVMTQSPATLSVSPGERATLSCRASQSVSRNLAWYQQKPGQAPRLLIYGASTRATGIPARFSGSGSGTEFTLTIGSLQSEDFAVYYCQQYKTWPRTFGQGTNVEIKLEGQPKANPTVTLFPPSSEELQANKATLVCLISDFYPGAVTVAWKADGSPVKAGVETTKPSKQSNNKYAASSYLSLTPEQWKSHRSYSCQVTHEGSTVEKTVAPTECSGRADCGFTSESYQQGVLSATILYEILLGKATLYAVLVSALVLMAMVKRKDSRGRAKRSGSGVKQTLNFDLLKLAGDVESNPGPTSMDWIWRILFLVGAATGAHSFEQVQLQQWGAGLLKPSETLSLTCAVFGGSFSGYYWSWIRQPPGKGLEWIGEINHRGNTNDNPSLKSRVTISVDTSKNQFALKLSSVTAADTAVYYCARERGYTYGNFDHWGQGTLVTVSSTRASTKGPSVFPLAPSSKSTSGGTAALGCLVKDYFPEPVTVSWNSGALTSGVHTFPAVLQSSGLYSLSSVVTVPSSSLGTQTYICNVNHKPSNTKVDKRVEPKSCIPEDTFFPSPESSCDVKLVEKSFETDTNLNFQNLSVIGFRILLLKVAGFNLLMTLRLWSS

SEQ ID NO: 13967 - protein, 762 aa, Artificial Sequence
  Synthetic Polypeptide
MALPVTALLLPLALLLHAARPEVQLVESGGGLVQPGGSLRLSCAASGFSFSDFWMSWVRQAPGKGLEWVATISQAGSEKDYVDSVKGRFTISRDNAKKSLYLQMNSLRAEDTAVYYCASGVYSFDYRGQGTLVTVSSGTGGGGSGGGGSGGGGSEFEIVMTPSSATLSVSPGERATLSCRASQSVSRNLAWYQQKPGQAPRLLIYGASTRATGIPARFSGSGSGTEFTLTISSLQSEDFAVYYCHQYSNWMCSFGQGTKLEIKLEGQPKANPTVTLFPPSSEELQANKATLVCLISDFYPGAVTVAWKADGSPVKAGVETTKPSKQSNNKYAASSYLSLTPEQWKSHRSYSCQVTHEGSTVEKTVAPTECSGRADCGFTSESYQQGVLSATILYEILLGKATLYAVLVSALVLMAMVKRKDSRGRAKRSGSGVKQTLNFDLLKLAGDVESNPGPTSMDWIWRILFLVGAATGAHSFEEVQLLESGGGLVQPGGSLRLSCAASGFTFSRYAMNWVRQAPGKGLEWVSGISGSGGRTYYADSVKGRFTISRDNSKNTLYLQMNSLRAEDTAVYYCAKDRDFWSGPFDYWGQGTLVTVSSTRASTKGPSVFPLAPSSKSTSGGTAALGCLVKDYFPEPVTVSWNSGALTSGVHTFPAVLQSSGLYSLSSVVTVPSSSLGTQTYICNVNHKPSNTKVDKRVEPKSCIPEDTFFPSPESSCDVKLVEKSFETDTNLNFQNLSVIGFRILLLKVAGFNLLMTLRLWSS

SEQ ID NO: 13968 - protein, 767 aa, Artificial Sequence
  Synthetic Polypeptide
MALPVTALLLPLALLLHAARPEVQLVESGGGLVQPGGSLRLSCAASGFSFSDFWMSWVRQAPGKGLEWVATISQAGSEKDYVDSVKGRFTISRDNAKKSLYLQMNSLRAEDTAVYYCASGVYSFDYRGQGTLVTVSSGTGGGGSGGGGSGGGGSEFDIQMTQSPSSLSASVGDRVTITCKASKNIRSYLAWYQQKPGKAPKLLIYSGSTLHSGVPSRFSGSGSGTDFTLTISSLQPEDFATYYCQQHHEYPLTFGQGTKVEIKRLEGQPKANPTVTLFPPSSEELQANKATLVCLISDFYPGAVTVAWKADGSPVKAGVETTKPSKQSNNKYAASSYLSLTPEQWKSHRSYSCQVTHEGSTVEKTVAPTECSGRADCGFTSESYQQGVLSATILYEILLGKATLYAVLVSALVLMAMVKRKDSRGRAKRSGSGVKQTLNFDLLKLAGDVESNPGPTSMDWIWRILFLVGAATGAHSFEQVQLQESGPGLVKPSETLSLTCTVSGYTITSGYDWSWIRQPPGKGLEWIGYINYGGSTNYKPSLGSRVTISVDTSKNQFSLKLSSVTAADTAVYYCARYNEYKSYIYDWYFDFWGQGTLVTVSSTRASTKGPSVFPLAPSSKSTSGGTAALGCLVKDYFPEPVTVSWNSGALTSGVHTFPAVLQSSGLYSLSSVVTVPSSSLGTQTYICNVNHKPSNTKVDKRVEPKSCIPEDTFFPSPESSCDVKLVEKSFETDTNLNFQNLSVIGFRILLLKVAGFNLLMTLRLWSS

SEQ ID NO: 13969 - protein, 769 aa, Artificial Sequence
  Synthetic Polypeptide
MALPVTALLLPLALLLHAARPEVQLVESGGGLVQPGGSLRLSCAASGFSFSDFWMSWVRQAPGKGLEWVATISQAGSEKDYVDSVKGRFTISRDNAKKSLYLQMNSLRAEDTAVYYCASGVYSFDYRGQGTLVTVSSGTGGGGSGGGGSGGGGSEFQSVVTQPPSVSAAPGQKVTISCSGSSSNIGNNYVSWYQQLPGTAPKLLIYDNNKRPSGIPDRFSGSKSGTSATLGITGLQTGDEADYYCGTWDGSLYTMLFGGGTKLTVLLEGQPKANPTVTLFPPSSEELQANKATLVCLISDFYPGAVTVAWKADGSPVKAGVETTKPSKQSNNKYAASSYLSLTPEQWKSHRSYSCQVTHEGSTVEKTVAPTECSGRADCGFTSESYQQGVLSATILYEILLGKATLYAVLVSALVLMAMVKRKDSRGRAKRSGSGVKQTLNFDLLKLAGDVESNPGPTSMDWIWRILFLVGAATGAHSFEEVQLVESGGGLVKPGGSLRLSCAASGFTFSNAWMSWVRQAPGKGLEWVGFIRSKAYGGTTEYAASVKGRFTISRDDSKSIAYLQMNNLKTEDTAVYYCARDGLYSSSWYDSDYWGQGTLVTVSSTRASTKGPSVFPLAPSSKSTSGGTAALGCLVKDYFPEPVTVSWNSGALTSGVHTFPAVLQSSGLYSLSSVVTVPSSSLGTQTYICNVNHKPSNTKVDKRVEPKSCIPEDTFFPSPESSCDVKLVEKSFETDTNLNFQNLSVIGFRILLLKVAGFNLLMTLRLWSS

SEQ ID NO: 13970 - protein, 774 aa, Artificial Sequence
  Synthetic Polypeptide
MALPVTALLLPLALLLHAARPEVQLVESGGGLVQPGGSLRLSCAASGFSFSDFWMSWVRQAPGKGLEWVATISQAGSEKDYVDSVKGRFTISRDNAKKSLYLQMNSLRAEDTAVYYCASGVYSFDYRGQGTLVTVSSGTGGGGSGGGGSGGGGSEFQSVLTQPPSVSGAPGQRVTISCTGSSSNIGAGYDVHWYQQLPGTAPKLLIFGNSNRPSGVPDRFSGFKSGTSASLAITGLQAEDEADYFCQSYDSSLSGSGVFGTGTKVTVLGLEGQPKANPTVTLFPPSSEELQANKATLVCLISDFYPGAVTVAWKADGSPVKAGVETTKPSKQSNNKYAASSYLSLTPEQWKSHRSYSCQVTHEGSTVEKTVAPTECSGRADCGFTSESYQQGVLSATILYEILLGKATLYAVLVSALVLMAMVKRKDSRGRAKRSGSGVKQTLNFDLLKLAGDVESNPGPTSMDWIWRILFLVGAATGAHSFEQMQLVQSGGGLVQPGRSLRLSCAASGFTFDDYAMHWVRQAPGKGLEWVSGISWNSGSIGYADSVKGRFTISRDNAKNSLYLQMNSLRAEDTALYYCAKDIHSGSYYGLLYYAMDVWGQGTTVTVSSTRASTKGPSVFPLAPSSKSTSGGTAALGCLVKDYFPEPVTVSWNSGALTSGVHTFPAVLQSSGLYSLSSVVTVPSSSLGTQTYICNVNHKPSNTKVDKRVEPKSCIPEDTFFPSPESSCDVKLVEKSFETDTNLNFQNLSVIGFRILLLKVAGFNLLMTLRLWSS

SEQ ID NO: 13971 - protein, 774 aa, Artificial Sequence
  Synthetic Polypeptide
MALPVTALLLPLALLLHAARPEVQLVESGGGLVQPGGSLRLSCAASGFSFSDFWMSWVRQAPGKGLEWVATISQAGSEKDYVDSVKGRFTISRDNAKKSLYLQMNSLRAEDTAVYYCASGVYSFDYRGQGTLVTVSSGTGGGGSGGGGSGGGGSEFLPVLTQPPSASGTPGQRVTISCSGRSSNIGSNSVNWYRQLPGAAPKLLIYSNNQRPPGVPVRFSGSKSGTSASLAISGLQSEDEATYYCATWDDNLNVHYVFGTGTKVTVLGSRLEGQPKANPTVTLFPPSSEELQANKATLVCLISDFYPGAVTVAWKADGSPVKAGVETTKPSKQSNNKYAASSYLSLTPEQWKSHRSYSCQVTHEGSTVEKTVAPTECSGRADCGFTSESYQQGVLSATILYEILLGKATLYAVLVSALVLMAMVKRKDSRGRAKRSGSGVKQTLNFDLLKLAGDVESNPGPTSMDWIWRILFLVGAATGAHSFELEMAQVQLVQSGAEVKKPGSSVKVSCKASGGTFSSYAISWVRQAPGQGLEWMGRIIPILGIANYAQKFQGRVTITADKSTSTAYMELSSLRSEDTAVYYCARGGYYSHDMWSEDWGQGTLVTVSSTRASTKGPSVFPLAPSSKSTSGGTAALGCLVKDYFPEPVTVSWNSGALTSGVHTFPAVLQSSGLYSLSSVVTVPSSSLGTQTYICNVNHKPSNTKVDKRVEPKSCIPEDTFFPSPESSCDVKLVEKSFETDTNLNFQNLSVIGFRILLLKVAGFNLLMTLRLWSS

SEQ ID NO: 13972 - protein, 768 aa, Artificial Sequence
  Synthetic Polypeptide
MALPVTALLLPLALLLHAARPEVQLVESGGGLVQPGGSLRLSCAASGFSFSDFWMSWVRQAPGKGLEWVATISQAGSEKDYVDSVKGRFTISRDNAKKSLYLQMNSLRAEDTAVYYCASGVYSFDYRGQGTLVTVSSGTGGGGSGGGGSGGGGSEFDFVMTQSPDSLAVSLGERVTMSCKSSQSLLNSGNQKNYLTWYQQKPGQPPKLLIYWASTRESGVPDRFSGSGSGTDFTLTISSLQAEDVAVYYCQNDYSYPYTFGQGTKLEIKLEGQPKANPTVTLFPPSSEELQANKATLVCLISDFYPGAVTVAWKADGSPVKAGVETTKPSKQSNNKYAASSYLSLTPEQWKSHRSYSCQVTHEGSTVEKTVAPTECSGRADCGFTSESYQQGVLSATILYEILLGKATLYAVLVSALVLMAMVKRKDSRGRAKRSGSGVKQTLNFDLLKLAGDVESNPGPTSMDWIWRILFLVGAATGAHSFEEVQLVQSGAELKKPGASVKVSCKASGYTFTDYYMKWVRQAPGQGLEWIGDIIPSNGATFYNQKFKGRVTITVDKSTSTAYMELSSLRSEDTAVYYCARSHLLRASWFAYWGQGTLVTVSSTRASTKGPSVFPLAPSSKSTSGGTAALGCLVKDYFPEPVTVSWNSGALTSGVHTFPAVLQSSGLYSLSSVVTVPSSSLGTQTYICNVNHKPSNTKVDKRVEPKSCIPEDTFFPSPESSCDVKLVEKSFETDTNLNFQNLSVIGFRILLLKVAGFNLLMTLRLWSS

SEQ ID NO: 13973 - protein, 768 aa, Artificial Sequence
  Synthetic Polypeptide
MALPVTALLLPLALLLHAARPEVQLVESGGGLVQPGGSLRLSCAASGFSFSDFWMSWVRQAPGKGLEWVATISQAGSEKDYVDSVKGRFTISRDNAKKSLYLQMNSLRAEDTAVYYCASGVYSFDYRGQGTLVTVSSGTGGGGSGGGGSGGGGSEFDFVMTQSPDSLAVSLGERVTMSCKSSQSLLNSGNQKNYLTWYQQKPGQPPKLLIYWASTRESGVPDRFSGSGSGTDFTLTISSLQAEDVAVYYCQNDYSYPYTFGQGTKLEIKLEGQPKANPTVTLFPPSSEELQANKATLVCLISDFYPGAVTVAWKADGSPVKAGVETTKPSKQSNNKYAASSYLSLTPEQWKSHRSYSCQVTHEGSTVEKTVAPTECSGRADCGFTSESYQQGVLSATILYEILLGKATLYAVLVSALVLMAMVKRKDSRGRAKRSGSGVKQTLNFDLLKLAGDVESNPGPTSMDWIWRILFLVGAATGAHSFEQVQLVQSGAELKKPGASVKVSCKASGYTFTDYYMKWVRQAPGQGLEWIGDIIPSNGATFYNQKFKGRVTITVDKSTSTAYMELSSLRSEDTAVYYCARSHLLRASWFAYWGQGTLVTVSSTRASTKGPSVFPLAPSSKSTSGGTAALGCLVKDYFPEPVTVSWNSGALTSGVHTFPAVLQSSGLYSLSSVVTVPSSSLGTQTYICNVNHKPSNTKVDKRVEPKSCIPEDTFFPSPESSCDVKLVEKSFETDTNLNFQNLSVIGFRILLLKVAGFNLLMTLRLWSS

SEQ ID NO: 13974 - protein, 758 aa, Artificial Sequence
  Synthetic Polypeptide
MALPVTALLLPLALLLHAARPEVQLVESGGGLVQPGGSLRLSCAASGFSFSDFWMSWVRQAPGKGLEWVATISQAGSEKDYVDSVKGRFTISRDNAKKSLYLQMNSLRAEDTAVYYCASGVYSFDYRGQGTLVTVSSGTGGGGSGGGGSGGGGSEFDVQITQSPSYLAASPGETITINCRASKSISKDLAWYQEKPGKTNKLLIYSGSTLQSGIPSRFSGSGSGTDFTLTISSLEPEDFAMYYCQQHNKYPYTFGGGTKLEIKRLEGQPKANPTVTLFPPSSEELQANKATLVCLISDFYPGAVTVAWKADGSPVKAGVETTKPSKQSNNKYAASSYLSLTPEQWKSHRSYSCQVTHEGSTVEKTVAPTECSGRADCGFTSESYQQGVLSATILYEILLGKATLYAVLVSALVLMAMVKRKDSRGRAKRSGSGVKQTLNFDLLKLAGDVESNPGPTSMDWIWRILFLVGAATGAHSFEQVQLQQPGAELVRPGASVKLSCKASGYTFTSYWMNWVKQRPDQGLEWIGRIDPYDSETHYNQKFKDKAILTVDKSSSTAYMQLSSLTSEDSAVYYCARGNWDDYWGQGTTLTVSSTRASTKGPSVFPLAPSSKSTSGGTAALGCLVKDYFPEPVTVSWNSGALTSGVHTFPAVLQSSGLYSLSSVVTVPSSSLGTQTYICNVNHKPSNTKVDKRVEPKSCIPEDTFFPSPESSCDVKLVEKSFETDTNLNFQNLSVIGFRILLLKVAGFNLLMTLRLWSS

SEQ ID NO: 13975 - protein, 760 aa, Artificial Sequence
  Synthetic Polypeptide
MALPVTALLLPLALLLHAARPEVQLVESGGGLVQPGGSLRLSCAASGFSFSDFWMSWVRQAPGKGLEWVATISQAGSEKDYVDSVKGRFTISRDNAKKSLYLQMNSLRAEDTAVYYCASGVYSFDYRGQGTLVTVSSGTGGGGSGGGGSGGGGSEFEIVLTQSPTSMTASPGEQVTITCRASSSINYMHWYQQKPGASPRPWIYETSKLASGVPDRFSGSASGTSYSLTINNMEAEDAATYYCQQWNYPSWTFGGGTKLELKLEGQPKANPTVTLFPPSSEELQANKATLVCLISDFYPGAVTVAWKADGSPVKAGVETTKPSKQSNNKYAASSYLSLTPEQWKSHRSYSCQVTHEGSTVEKTVAPTECSGRADCGFTSESYQQGVLSATILYEILLGKATLYAVLVSALVLMAMVKRKDSRGRAKRSGSGVKQTLNFDLLKLAGDVESNPGPTSMDWIWRILFLVGAATGAHSFEEVQLVESGGGLVQPGRSLKLSCAASGFTFSDYNMAWVRQAPKKGLEWVATILYDGGRTYYRGSVKGRFTISRDNAKSTLYLRMDSLRSEDTATYYCATHSRGTDYFDYWGQGVMVTVSSTRASTKGPSVFPLAPSSKSTSGGTAALGCLVKDYFPEPVTVSWNSGALTSGVHTFPAVLQSSGLYSLSSVVTVPSSSLGTQTYICNVNHKPSNTKVDKRVEPKSCIPEDTFFPSPESSCDVKLVEKSFETDTNLNFQNLSVIGFRILLLKVAGFNLLMTLRLWSS

SEQ ID NO: 13976 - protein, 769 aa, Artificial Sequence
  Synthetic Polypeptide
MALPVTALLLPLALLLHAARPEVQLVESGGGLVQPGGSLRLSCAASGFSFSDFWMSWVRQAPGKGLEWVATISQAGSEKDYVDSVKGRFTISRDNAKKSLYLQMNSLRAEDTAVYYCASGVYSFDYRGQGTLVTVSSGTGGGGSGGGGSGGGGSEFDIVMTQSPSSLAVSEGETVTINCKSSQSFLSSGDGKNYVAWYQYKPGQSPKLLIYWASTRQSGVPDRFIGSGSGTDFTLTISTVQAEDLAIYYCQQYYDTPLTFGSGTKLEIKLEGQPKANPTVTLFPPSSEELQANKATLVCLISDFYPGAVTVAWKADGSPVKAGVETTKPSKQSNNKYAASSYLSLTPEQWKSHRSYSCQVTHEGSTVEKTVAPTECSGRADCGFTSESYQQGVLSATILYEILLGKATLYAVLVSALVLMAMVKRKDSRGRAKRSGSGVKQTLNFDLLKLAGDVESNPGPTSMDWIWRILFLVGAATGAHSFEEVKLQESGPSLVQSSQTLSLTCTVSGFSLTSYHIHWVRQTPGKGLEWMGVMWSDGDTSYNSALKSRLSISRDTSQSQVFLKMNSLQTEDTATYYCARGYYSSYLYLWFAYWGQGTLVTVSSTRASTKGPSVFPLAPSSKSTSGGTAALGCLVKDYFPEPVTVSWNSGALTSGVHTFPAVLQSSGLYSLSSVVTVPSSSLGTQTYICNVNHKPSNTKVDKRVEPKSCIPEDTFFPSPESSCDVKLVEKSFETDTNLNFQNLSVIGFRILLLKVAGFNLLMTLRLWSS

SEQ ID NO: 13977 - protein, 773 aa, Artificial Sequence
  Synthetic Polypeptide
MALPVTALLLPLALLLHAARPEVQLVESGGGLVQPGGSLRLSCAASGFSFSDFWMSWVRQAPGKGLEWVATISQAGSEKDYVDSVKGRFTISRDNAKKSLYLQMNSLRAEDTAVYYCASGVYSFDYRGQGTLVTVSSGTGGGGSGGGGSGGGGSEFDVLMTQTPVSLPVSLGGQVSISCRSSQSLVHSDGDTYLHWYLQKPGQSPQLLIYRVSNRFSGVPDRFSGSGSGTDFTLKISRVEPEDLGLYYCLQTTHFPPWTFGGGTKLEMKLEGQPKANPTVTLFPPSSEELQANKATLVCLISDFYPGAVTVAWKADGSPVKAGVETTKPSKQSNNKYAASSYLSLTPEQWKSHRSYSCQVTHEGSTVEKTVAPTECSGRADCGFTSESYQQGVLSATILYEILLGKATLYAVLVSALVLMAMVKRKDSRGRAKRSGSGVKQTLNFDLLKLAGDVESNPGPTSMDWIWRILFLVGAATGAHSFEQVQLQQSGPELRRPGSSVRLSCKASGYRIKDFLIHWIKNRPEHGLEWIGWIDPEDGETKYAQKFQTKATLTADTSSNTAYMQLSSLTSEDTATYFCARWGDVYYGLMRGHVMDAWGQGTSVTVSSTRASTKGPSVFPLAPSSKSTSGGTAALGCLVKDYFPEPVTVSWNSGALTSGVHTFPAVLQSSGLYSLSSVVTVPSSSLGTQTYICNVNHKPSNTKVDKRVEPKSCIPEDTFFPSPESSCDVKLVEKSFETDTNLNFQNLSVIGFRILLLKVAGFNLLMTLRLWSS

SEQ ID NO: 13978 - protein, 768 aa, Artificial Sequence
  Synthetic Polypeptide
MALPVTALLLPLALLLHAARPEVQLVESGGGLVQPGGSLRLSCAASGFSFSDFWMSWVRQAPGKGLEWVATISQAGSEKDYVDSVKGRFTISRDNAKKSLYLQMNSLRAEDTAVYYCASGVYSFDYRGQGTLVTVSSGTGGGGSGGGGSGGGGSEFDIVMTQSPATLSLSPGERATLSCRSSKSLQNVNGNTYLYWFQQKPGQSPQLLIYRMSNLNSGVPDRFSGSGSGTEFTLTISSLEPEDFAVYYCMQHLEYPITFGAGTKLEIKLEGQPKANPTVTLFPPSSEELQANKATLVCLISDFYPGAVTVAWKADGSPVKAGVETTKPSKQSNNKYAASSYLSLTPEQWKSHRSYSCQVTHEGSTVEKTVAPTECSGRADCGFTSESYQQGVLSATILYEILLGKATLYAVLVSALVLMAMVKRKDSRGRAKRSGSGVKQTLNFDLLKLAGDVESNPGPTSMDWIWRILFLVGAATGAHSFEEVQLVESGGGLVKPGGSLKLSCAASGYTFTSYVMHWVRQAPGKGLEWIGYINPYNDGTKYNEKFQGRVTISSDKSISTAYMELSSLRSEDTAMYYCARGTYYYGTRVFDYWGQGTLVTVSSTRASTKGPSVFPLAPSSKSTSGGTAALGCLVKDYFPEPVTVSWNSGALTSGVHTFPAVLQSSGLYSLSSVVTVPSSSLGTQTYICNVNHKPSNTKVDKRVEPKSCIPEDTFFPSPESSCDVKLVEKSFETDTNLNFQNLSVIGFRILLLKVAGFNLLMTLRLWSS

SEQ ID NO: 13979 - protein, 764 aa, Artificial Sequence
  Synthetic Polypeptide
MALPVTALLLPLALLLHAARPEVQLVESGGGLVQPGGSLRLSCAASGFSFSDFWMSWVRQAPGKGLEWVATISQAGSEKDYVDSVKGRFTISRDNAKKSLYLQMNSLRAEDTAVYYCASGVYSFDYRGQGTLVTVSSGTGGGGSGGGGSGGGGSEFDIQMTQSPSSLSASVGDRVTITCKASDHINNWLAWYQQKPGQAPKLLIYGATTLETGVPSRFSGSGSGTDYTLTISSLQPEDFATYYCQQSWNTPWTFGQGTKLEIKRLEGQPKANPTVTLFPPSSEELQANKATLVCLISDFYPGAVTVAWKADGSPVKAGVETTKPSKQSNNKYAASSYLSLTPEQWKSHRSYSCQVTHEGSTVEKTVAPTECSGRADCGFTSESYQQGVLSATILYEILLGKATLYAVLVSALVLMAMVKRKDSRGRAKRSGSGVKQTLNFDLLKLAGDVESNPGPTSMDWIWRILFLVGAATGAHSFEQVQLQQPGAELVKPGASVKMSCKASGYAFSSYWINWMKQKPGQGLEWIGQIYPGDGDTNYNGKFKGRATLTADTSSSTAYMQLSSLTSEDSAVYFCARSITTVVGCAMDYWGQGTSVTVSSTRASTKGPSVFPLAPSSKSTSGGTAALGCLVKDYFPEPVTVSWNSGALTSGVHTFPAVLQSSGLYSLSSVVTVPSSSLGTQTYICNVNHKPSNTKVDKRVEPKSCIPEDTFFPSPESSCDVKLVEKSFETDTNLNFQNLSVIGFRILLLKVAGFNLLMTLRLWSS

SEQ ID NO: 13980 - protein, 766 aa, Artificial Sequence
  Synthetic Polypeptide
MALPVTALLLPLALLLHAARPEVQLVESGGGLVQPGGSLRLSCAASGFSFSDFWMSWVRQAPGKGLEWVATISQAGSEKDYVDSVKGRFTISRDNAKKSLYLQMNSLRAEDTAVYYCASGVYSFDYRGQGTLVTVSSGTGGGGSGGGGSGGGGSEFQIVLSQSPAILSASPGEKVTMTCRASSSVSYMHWYQQKPGSSPKPWIYATSNLASGVPARFSGSGSGTSYSFTISRVEAEDAATYYCQQWTFNPPTFGGGTRLEIKRTVAALEGQPKANPTVTLFPPSSEELQANKATLVCLISDFYPGAVTVAWKADGSPVKAGVETTKPSKQSNNKYAASSYLSLTPEQWKSHRSYSCQVTHEGSTVEKTVAPTECSGRADCGFTSESYQQGVLSATILYEILLGKATLYAVLVSALVLMAMVKRKDSRGRAKRSGSGVKQTLNFDLLKLAGDVESNPGPTSMDWIWRILFLVGAATGAHSFEQAYLQQSGAELVRPGASVKMSCKASGYTFTSYNMHWVKQTPRQGLEWIGGIYPGNGDTSYNQKFKGKATLTVGKSSSTAYMQLSSLTSEDSAVYFCARYDYNYAMDYWGQGTSVTVSSASTRASTKGPSVFPLAPSSKSTSGGTAALGCLVKDYFPEPVTVSWNSGALTSGVHTFPAVLQSSGLYSLSSVVTVPSSSLGTQTYICNVNHKPSNTKVDKRVEPKSCIPEDTFFPSPESSCDVKLVEKSFETDTNLNFQNLSVIGFRILLLKVAGFNLLMTLRLWSS

SEQ ID NO: 13981 - protein, 764 aa, Artificial Sequence
  Synthetic Polypeptide
MALPVTALLLPLALLLHAARPEVQLVESGGGLVQPGGSLRLSCAASGFSFSDFWMSWVRQAPGKGLEWVATISQAGSEKDYVDSVKGRFTISRDNAKKSLYLQMNSLRAEDTAVYYCASGVYSFDYRGQGTLVTVSSGTGGGGSGGGGSGGGGSEFEIVLTQSPATLSLSPGERATLSCRASQSVSSYLAWYQQKPGQAPRLLIYDASNRATGIPARFSGSGSGTDFTLTISSLEPEDFAVYYCQQRSNWPITFGQGTRLEIKLEGQPKANPTVTLFPPSSEELQANKATLVCLISDFYPGAVTVAWKADGSPVKAGVETTKPSKQSNNKYAASSYLSLTPEQWKSHRSYSCQVTHEGSTVEKTVAPTECSGRADCGFTSESYQQGVLSATILYEILLGKATLYAVLVSALVLMAMVKRKDSRGRAKRSGSGVKQTLNFDLLKLAGDVESNPGPTSMDWIWRILFLVGAATGAHSFEEVQLVESGGGLVQPDRSLRLSCAASGFTFHDYAMHWVRQAPGKGLEWVSTISWNSGTIGYADSVKGRFTISRDNAKNSLYLQMNSLRAEDTALYYCAKDIQYGNYYYGMDVWGQGTTVTVSSTRASTKGPSVFPLAPSSKSTSGGTAALGCLVKDYFPEPVTVSWNSGALTSGVHTFPAVLQSSGLYSLSSVVTVPSSSLGTQTYICNVNHKPSNTKVDKRVEPKSCIPEDTFFPSPESSCDVKLVEKSFETDTNLNFQNLSVIGFRILLLKVAGFNLLMTLRLWSS

SEQ ID NO: 13982 - protein, 759 aa, Artificial Sequence
  Synthetic Polypeptide
MALPVTALLLPLALLLHAARPEVQLVESGGGLVQPGGSLRLSCAASGFSFSDFWMSWVRQAPGKGLEWVATISQAGSEKDYVDSVKGRFTISRDNAKKSLYLQMNSLRAEDTAVYYCASGVYSFDYRGQGTLVTVSSGTGGGGSGGGGSGGGGSEFDIQMTQSPSSLSASVGDRVTINCKASQDINSYLSWFQQKPGKAPKTLIYRANRLVDGVPSRFSGSGSGQDYTLTISSLQPEDFATYYCLQYDEFPLTFGGGTKVEIKLEGQPKANPTVTLFPPSSEELQANKATLVCLISDFYPGAVTVAWKADGSPVKAGVETTKPSKQSNNKYAASSYLSLTPEQWKSHRSYSCQVTHEGSTVEKTVAPTECSGRADCGFTSESYQQGVLSATILYEILLGKATLYAVLVSALVLMAMVKRKDSRGRAKRSGSGVKQTLNFDLLKLAGDVESNPGPTSMDWIWRILFLVGAATGAHSFEQVQLVQSGAEVKKPGASVKVSCKASGYTFTNYDINWVRQAPGQGLEWIGWIYPGDGSTKYNEKFKAKATLTADTSTSTAYMELRSLRSDDTAVYYCASGYEDAMDYWGQGTTVTVSSTRASTKGPSVFPLAPSSKSTSGGTAALGCLVKDYFPEPVTVSWNSGALTSGVHTFPAVLQSSGLYSLSSVVTVPSSSLGTQTYICNVNHKPSNTKVDKRVEPKSCIPEDTFFPSPESSCDVKLVEKSFETDTNLNFQNLSVIGFRILLLKVAGFNLLMTLRLWSS

SEQ ID NO: 13983 - protein, 761 aa, Artificial Sequence
  Synthetic Polypeptide
MALPVTALLLPLALLLHAARPEVQLVESGGGLVQPGGSLRLSCAASGFSFSDFWMSWVRQAPGKGLEWVATISQAGSEKDYVDSVKGRFTISRDNAKKSLYLQMNSLRAEDTAVYYCASGVYSFDYRGQGTLVTVSSGTGGGGSGGGGSGGGGSEFDIVMTQTPLSLSVTPGQPASISCKSSQSLLDGDGKTYLNWLLQKPGQSPQRLIYLVSKLDSGVPDRFSGSGSGTDFTLKISRVEAEDVGVYYCWQGTHFPRTFGQGTKLEIKLEGQPKANPTVTLFPPSSEELQANKATLVCLISDFYPGAVTVAWKADGSPVKAGVETTKPSKQSNNKYAASSYLSLTPEQWKSHRSYSCQVTHEGSTVEKTVAPTECSGRADCGFTSESYQQGVLSATILYEILLGKATLYAVLVSALVLMAMVKRKDSRGRAKRSGSGVKQTLNFDLLKLAGDVESNPGPTSMDWIWRILFLVGAATGAHSFEQVQLVQSGAEVKKPGASVKVSCKASGYTFKDTYIHWVRQAPGQGLEWMGRIDPANGNTKYDPKFQGRVTMTRDTSISTAYMELSRLRSDDTAVYYCARRGGVDWGQGTLVTVSSTRASTKGPSVFPLAPSSKSTSGGTAALGCLVKDYFPEPVTVSWNSGALTSGVHTFPAVLQSSGLYSLSSVVTVPSSSLGTQTYICNVNHKPSNTKVDKRVEPKSCIPEDTFFPSPESSCDVKLVEKSFETDTNLNFQNLSVIGFRILLLKVAGFNLLMTLRLWSS

SEQ ID NO: 13984 - protein, 762 aa, Artificial Sequence
  Synthetic Polypeptide
MALPVTALLLPLALLLHAARPEVQLVESGGGLVQPGGSLRLSCAASGFSFSDFWMSWVRQAPGKGLEWVATISQAGSEKDYVDSVKGRFTISRDNAKKSLYLQMNSLRAEDTAVYYCASGVYSFDYRGQGTLVTVSSGTGGGGSGGGGSGGGGSEFDIQMTQSPSSLSASVGDRVTITCKASQDVSTAVAWFQQKPGKAPKLLIYSPSYRYTGVPSRFSGSGSGTDFTLTISSLQPEDFTYYCQQLYSTPYTFGQGTKVEIKLEGQPKANPTVTLFPPSSEELQANKATLVCLISDFYPGAVTVAWKADGSPVKAGVETTKPSKQSNNKYAASSYLSLTPEQWKSHRSYSCQVTHEGSTVEKTVAPTECSGRADCGFTSESYQQGVLSATILYEILLGKATLYAVLVSALVLMAMVKRKDSRGRAKRSGSGVKQTLNFDLLKLAGDVESNPGPTSMDWIWRILFLVGAATGAHSFEEVQLVQSGAEVKKPGASVKVSCKASGYTFTDYYLDVVVRQAPGQGLEWIGRVNPYNGGTIYNQKFKGRVTLTRDTSTSTAYLELSSLRSEDTAVYYCARDHYRYDPLLDYWGQGTLVTVSSTRASTKGPSVFPLAPSSKSTSGGTAALGCLVKDYFPEPVTVSWNSGALTSGVHTFPAVLQSSGLYSLSSVVTVPSSSLGTQTYICNVNHKPSNTKVDKRVEPKSCIPEDTFFPSPESSCDVKLVEKSFETDTNLNFQNLSVIGFRILLLKVAGFNLLMTLRLWSS

SEQ ID NO: 13985 - protein, 768 aa, Artificial Sequence
  Synthetic Polypeptide
MALPVTALLLPLALLLHAARPEVQLVESGGGLVQPGGSLRLSCAASGFSFSDFWMSWVRQAPGKGLEWVATISQAGSEKDYVDSVKGRFTISRDNAKKSLYLQMNSLRAEDTAVYYCASGVYSFDYRGQGTLVTVSSGTGGGGSGGGGSGGGGSEFDIQMTQSPSSLSASVGDRVTITCRASQSVSTSSYNYMHWYQQKPGKPPKLLIKYASNLESGVPSRFSGSGSGTDFTLTISSLQPEDFATYYCQHSWEIPLTFGQGTKVEIKLEGQPKANPTVTLFPPSSEELQANKATLVCLISDFYPGAVTVAWKADGSPVKAGVETTKPSKQSNNKYAASSYLSLTPEQWKSHRSYSCQVTHEGSTVEKTVAPTECSGRADCGFTSESYQQGVLSATILYEILLGKATLYAVLVSALVLMAMVKRKDSRGRAKRSGSGVKQTLNFDLLKLAGDVESNPGPTSMDWIWRILFLVGAATGAHSFEEVQLVQSGAEVKKPGASVKVSCKASGYSFTDYYMHWVRQAPGQGLEWIGRINPYNGAAFYSQNFKDRVTLTVDTSTSTAYLELSSLRSEDTAVYYCAIERGADLEGYAMDYWGQGTLVTVSSTRASTKGPSVFPLAPSSKSTSGGTAALGCLVKDYFPEPVTVSWNSGALTSGVHTFPAVLQSSGLYSLSSVVTVPSSSLGTQTYICNVNHKPSNTKVDKRVEPKSCIPEDTFFPSPESSCDVKLVEKSFETDTNLNFQNLSVIGFRILLLKVAGFNLLMTLRLWSS

SEQ ID NO: 13986 - protein, 766 aa, Artificial Sequence
  Synthetic Polypeptide
MALPVTALLLPLALLLHAARPEVQLVESGGGLVQPGGSLRLSCAASGFSFSDFWMSWVRQAPGKGLEWVATISQAGSEKDYVDSVKGRFTISRDNAKKSLYLQMNSLRAEDTAVYYCASGVYSFDYRGQGTLVTVSSGTGGGGSGGGGSGGGGSEFEIVLTQSPATLSASPGERVTLTCRASSNVISSYVHWYQQKPGSSPRLFLYSTSNLASGVPSRFSGSGSGTDFTFTISSLEAEDAATYYCQQYSGYPLTFGQGTRLEIKLEGQPKANPTVTLFPPSSEELQANKATLVCLISDFYPGAVTVAWKADGSPVKAGVETTKPSKQSNNKYAASSYLSLTPEQWKSHRSYSCQVTHEGSTVEKTVAPTECSGRADCGFTSESYQQGVLSATILYEILLGKATLYAVLVSALVLMAMVKRKDSRGRAKRSGSGVKQTLNFDLLKLAGDVESNPGPTSMDWIWRILFLVGAATGAHSFEQVQLQESGPGLVKPSETLSLTCAVSGYSITSAYYWNWIRQPPGKGLEWIGYISYDGRNNYNPSLKNRITINPDTSKNQFSLQLNSVTPEDTAVYYCAREGDYDVGNYYAMDYWGQGTLVTVSSTRASTKGPSVFPLAPSSKSTSGGTAALGCLVKDYFPEPVTVSWNSGALTSGVHTFPAVLQSSGLYSLSSVVTVPSSSLGTQTYICNVNHKPSNTKVDKRVEPKSCIPEDTFFPSPESSCDVKLVEKSFETDTNLNFQNLSVIGFRILLLKVAGFNLLMTLRLWSS

SEQ ID NO: 13987 - protein, 766 aa, Artificial Sequence
  Synthetic Polypeptide
MALPVTALLLPLALLLHAARPEVQLVESGGGLVQPGGSLRLSCAASGFSFSDFWMSWVRQAPGKGLEWVATISQAGSEKDYVDSVKGRFTISRDNAKKSLYLQMNSLRAEDTAVYYCASGVYSFDYRGQGTLVTVSSGTGGGGSGGGGSGGGGSEFEIVLTQSPATLSLSPGERATLSCRASSNVISSYVHWYQQKPGQAPRLLIYSTSNLASGIPARFSGSGSGTDFTLTISSLEPEDFAVYYCQQYSGYPLTFGQGTRLEIKLEGQPKANPTVTLFPPSSEELQANKATLVCLISDFYPGAVTVAWKADGSPVKAGVETTKPSKQSNNKYAASSYLSLTPEQWKSHRSYSCQVTHEGSTVEKTVAPTECSGRADCGFTSESYQQGVLSATILYEILLGKATLYAVLVSALVLMAMVKRKDSRGRAKRSGSGVKQTLNFDLLKLAGDVESNPGPTSMDWIWRILFLVGAATGAHSFEEVQLVESGGGLVQPGRSLRLSCAASGYSITSAYYWNWVRQAPGKGLEWVSYISYDGRNNYNPSLKNRFTISRDNAKKSLYLQMNSLRAEDTALYYCAKEGDYDVGNYYAMDYWGQGTTVTVSSTRASTKGPSVFPLAPSSKSTSGGTAALGCLVKDYFPEPVTVSWNSGALTSGVHTFPAVLQSSGLYSLSSVVTVPSSSLGTQTYICNVNHKPSNTKVDKRVEPKSCIPEDTFFPSPESSCDVKLVEKSFETDTNLNFQNLSVIGFRILLLKVAGFNLLMTLRLWSS

SEQ ID NO: 13988 - protein, 765 aa, Artificial Sequence
  Synthetic Polypeptide
MALPVTALLLPLALLLHAARPEVQLVESGGGLVQPGGSLRLSCAASGFSFSDFWMSWVRQAPGKGLEWVATISQAGSEKDYVDSVKGRFTISRDNAKKSLYLQMNSLRAEDTAVYYCASGVYSFDYRGQGTLVTVSSGTGGGGSGGGGSGGGGSEFDVVMTQTPLSLPVSLGDQASISCRSSQSLVHSNGNTYLRWYLQKPGQSPKVLIYKVSNRVSGVPDRFSGSGSGTDFTLKINRVEAEDLGVYFCSQSTHVPWTFGGGTKLEIKLEGQPKANPTVTLFPPSSEELQANKATLVCLISDFYPGAVTVAWKADGSPVKAGVETTKPSKQSNNKYAASSYLSLTPEQWKSHRSYSCQVTHEGSTVEKTVAPTECSGRADCGFTSESYQQGVLSATILYEILLGKATLYAVLVSALVLMAMVKRKDSRGRAKRSGSGVKQTLNFDLLKLAGDVESNPGPTSMDWIWRILFLVGAATGAHSFEGVKLDETGGGLVQPGGAMKLSCVTSGFTFGHYWMNWVRQSPEKGLEWVAQFRNKPYNYETYYSDSVKGRFTISRDDSKSSVYLQMNNLRVEDTGIYYCTGASYGMEYLGQGTSVTVSTTRASTKGPSVFPLAPSSKSTSGGTAALGCLVKDYFPEPVTVSWNSGALTSGVHTFPAVLQSSGLYSLSSVVTVPSSSLGTQTYICNVNHKPSNTKVDKRVEPKSCIPEDTFFPSPESSCDVKLVEKSFETDTNLNFQNLSVIGFRILLLKVAGFNLLMTLRLWSS

SEQ ID NO: 13989 - protein, 771 aa, Artificial Sequence
  Synthetic Polypeptide
MALPVTALLLPLALLLHAARPEVQLVESGGGLVQPGGSLRLSCAASGFSFSDFWMSWVRQAPGKGLEWVATISQAGSEKDYVDSVKGRFTISRDNAKKSLYLQMNSLRAEDTAVYYCASGVYSFDYRGQGTLVTVSSGTGGGGSGGGGSGGGGSEFQVQLVESGGNLVQPGGSLRLSCAASGFTFGSFSMSWVRQAPGGGLEWVAGLSARSSLTHYADSVKGRFTISRDNAKNSVYLQMNSLRVEDTAVYYCARRSYDSSGYWGHFYSYMDVWGQGTLVTVSLEGQPKANPTVTLFPPSSEELQANKATLVCLISDFYPGAVTVAWKADGSPVKAGVETTKPSKQSNNKYAASSYLSLTPEQWKSHRSYSCQVTHEGSTVEKTVAPTECSGRADCGFTSESYQQGVLSATILYEILLGKATLYAVLVSALVLMAMVKRKDSRGRAKRSGSGVKQTLNFDLLKLAGDVESNPGPTSMDWIWRILFLVGAATGAHSFESVLTQPSSVSAAPGQKVTISCSGSTSNIGNNYVSWYQQHPGKAPKLMIYDVSKRPSGVPDRFSGSKSGNSASLDISGLQSEDEADYYCAAWDDSLSEFLFGTGTKLTVLGTRASTKGPSVFPLAPSSKSTSGGTAALGCLVKDYFPEPVTVSWNSGALTSGVHTFPAVLQSSGLYSLSSVVTVPSSSLGTQTYICNVNHKPSNTKVDKRVEPKSCIPEDTFFPSPESSCDVKLVEKSFETDTNLNFQNLSVIGFRILLLKVAGFNLLMTLRLWSS

SEQ ID NO: 13990 - protein, 766 aa, Artificial Sequence
  Synthetic Polypeptide
MALPVTALLLPLALLLHAARPEVQLVESGGGLVQPGGSLRLSCAASGFSFSDFWMSWVRQAPGKGLEWVATISQAGSEKDYVDSVKGRFTISRDNAKKSLYLQMNSLRAEDTAVYYCASGVYSFDYRGQGTLVTVSSGTGGGGSGGGGSGGGGSEFDVVMTQSPSSLSASVGDRVTITCQSSLDISHYLNWYQQKPGKAPKLLIYDASNLETGVPSRFSGSGSGTHFTFTISSLQPEDFATYYCQQYDNLPLTFGGGTKLEIKRLEGQPKANPTVTLFPPSSEELQANKATLVCLISDFYPGAVTVAWKADGSPVKAGVETTKPSKQSNNKYAASSYLSLTPEQWKSHRSYSCQVTHEGSTVEKTVAPTECSGRADCGFTSESYQQGVLSATILYEILLGKATLYAVLVSALVLMAMVKRKDSRGRAKRSGSGVKQTLNFDLLKLAGDVESNPGPTSMDWIWRILFLVGAATGAHSFEQVQLVQSGGGVVQPGGSLRVSCAASGVTLSDYGMHWVRQAPGKGLEWVAFIRNDGSDKYYADSVKGRFTISRDNSEKTVSLQMSSLRAEDTAVYYCAKNGESGPLDYWYLDLWGRGTLVTVSSTRASTKGPSVFPLAPSSKSTSGGTAALGCLVKDYFPEPVTVSWNSGALTSGVHTFPAVLQSSGLYSLSSVVTVPSSSLGTQTYICNVNHKPSNTKVDKRVEPKSCIPEDTFFPSPESSCDVKLVEKSFETDTNLNFQNLSVIGFRILLLKVAGFNLLMTLRLWSS

SEQ ID NO: 13991 - protein, 770 aa, Artificial Sequence
  Synthetic Polypeptide
MALPVTALLLPLALLLHAARPEVQLVESGGGLVQPGGSLRLSCAASGFSFSDFWMSWVRQAPGKGLEWVATISQAGSEKDYVDSVKGRFTISRDNAKKSLYLQMNSLRAEDTAVYYCASGVYSFDYRGQGTLVTVSSGTGGGGSGGGGSGGGGSEFSYELTQPPSVSGTPGQRVAISCSGSSSNIGTRMVTWYQHVPGTAPKLLIFNNNQRPSGVPDRFSASKSGTSASLAIIGLQSDDEADYYCATWDDNVKSYVFGTGTKVTVLGSRLEGQPKANPTVTLFPPSSEELQANKATLVCLISDFYPGAVTVAWKADGSPVKAGVETTKPSKQSNNKYAASSYLSLTPEQWKSHRSYSCQVTHEGSTVEKTVAPTECSGRADCGFTSESYQQGVLSATILYEILLGKATLYAVLVSALVLMAMVKRKDSRGRAKRSGSGVKQTLNFDLLKLAGDVESNPGPTSMDWIWRILFLVGAATGAHSFELEMAQVQLQQWGAGLLKPSETLSLTCAVYGGSFSGYYWSWIRQPPGKGLEWIGEINHSGSTNYNPSLKSRVTISVDTSKNQFSLKLSSVTAADTAVYYCARAPQSWYVGDVWGQGTLVTVSSTRASTKGPSVFPLAPSSKSTSGGTAALGCLVKDYFPEPVTVSWNSGALTSGVHTFPAVLQSSGLYSLSSVVTVPSSSLGTQTYICNVNHKPSNTKVDKRVEPKSCIPEDTFFPSPESSCDVKLVEKSFETDTNLNFQNLSVIGFRILLLKVAGFNLLMTLRLWSS

SEQ ID NO: 13992 - protein, 767 aa, Artificial Sequence
  Synthetic Polypeptide
MALPVTALLLPLALLLHAARPEVQLVESGGGLVQPGGSLRLSCAASGFSFSDFWMSWVRQAPGKGLEWVATISQAGSEKDYVDSVKGRFTISRDNAKKSLYLQMNSLRAEDTAVYYCASGVYSFDYRGQGTLVTVSSGTGGGGSGGGGSGGGGSEFQSVLTQPPSLSVAPGKTASITCGGNNIGMKSVHWYQQRPGQAPVLVIYYDSDRPSGIPGRFSGSNSGNTATLTISRVEAGDEADYYCQVWDTTGDHPGYVFGTGTKVTVLLEGQPKANPTVTLFPPSSEELQANKATLVCLISDFYPGAVTVAWKADGSPVKAGVETTKPSKQSNNKYAASSYLSLTPEQWKSHRSYSCQVTHEGSTVEKTVAPTECSGRADCGFTSESYQQGVLSATILYEILLGKATLYAVLVSALVLMAMVKRKDSRGRAKRSGSGVKQTLNFDLLKLAGDVESNPGPTSMDWIWRILFLVGAATGAHSFEQVQLVQSGAEVKKPGSSVKVSCKASGGTFSSYAISWVRQAPGQGLEWMGGIIPIFGTANYAQKFQGRVTITADESTSTAYMELSSLRSEDTAVYYCARGVYGYSGSAPYDEWGQGTLVTVSSTRASTKGPSVFPLAPSSKSTSGGTAALGCLVKDYFPEPVTVSWNSGALTSGVHTFPAVLQSSGLYSLSSVVTVPSSSLGTQTYICNVNHKPSNTKVDKRVEPKSCIPEDTFFPSPESSCDVKLVEKSFETDTNLNFQNLSVIGFRILLLKVAGFNLLMTLRLWSS

SEQ ID NO: 13993 - protein, 765 aa, Artificial Sequence
  Synthetic Polypeptide
MALPVTALLLPLALLLHAARPEVQLVESGGGLVQPGGSLRLSCAASGFSFSDFWMSWVRQAPGKGLEWVATISQAGSEKDYVDSVKGRFTISRDNAKKSLYLQMNSLRAEDTAVYYCASGVYSFDYRGQGTLVTVSSGTGGGGSGGGGSGGGGSEFEVQLVESGGGLVQPGRSLRLSCAASGFTFDDYAMHWVRQAPGKGLEWVSGISWNSGSIGYADSVKGRFTISRDNAKNSLYLQMNSLRAEDTALYYCAKDKGGGYYDFWSGSDYWGQGTLVTVSSLEGQPKANPTVTLFPPSSEELQANKATLVCLISDFYPGAVTVAWKADGSPVKAGVETTKPSKQSNNKYAASSYLSLTPEQWKSHRSYSCQVTHEGSTVEKTVAPTECSGRADCGFTSESYQQGVLSATILYEILLGKATLYAVLVSALVLMAMVKRKDSRGRAKRSGSGVKQTLNFDLLKLAGDVESNPGPTSMDWIWRILFLVGAATGAHSFESSELTQDPAVSVALGQTVRITCQGDSLRSYYASWYQQKPGQAPVLVIYGKNNRPSGIPDRFSGSSSGNTASLTITGAQAEDEADYYCNSRDSSGWVFGGGTKLTVLTRASTKGPSVFPLAPSSKSTSGGTAALGCLVKDYFPEPVTVSWNSGALTSGVHTFPAVLQSSGLYSLSSVVTVPSSSLGTQTYICNVNHKPSNTKVDKRVEPKSCIPEDTFFPSPESSCDVKLVEKSFETDTNLNFQNLSVIGFRILLLKVAGFNLLMTLRLWSS

SEQ ID NO: 13994 - protein, 774 aa, Artificial Sequence
  Synthetic Polypeptide
MALPVTALLLPLALLLHAARPEVQLVESGGGLVQPGGSLRLSCAASGFSFSDFWMSWVRQAPGKGLEWVATISQAGSEKDYVDSVKGRFTISRDNAKKSLYLQMNSLRAEDTAVYYCASGVYSFDYRGQGTLVTVSSGTGGGGSGGGGSGGGGSEFEVQLQQSGPGLVKPSQTLSLTCAISGDSVLSNSDTWNWIRQSPSRGLEWLGRTYHRSTWYDDYASSVRGRVSINVDTSKNQYSLQLNAVTPEDTGVYYCARDRLQDGNSWSDAFDVWGQGTMVTVSSLEGQPKANPTVTLFPPSSEELQANKATLVCLISDFYPGAVTVAWKADGSPVKAGVETTKPSKQSNNKYAASSYLSLTPEQWKSHRSYSCQVTHEGSTVEKTVAPTECSGRADCGFTSESYQQGVLSATILYEILLGKATLYAVLVSALVLMAMVKRKDSRGRAKRSGSGVKQTLNFDLLKLAGDVESNPGPTSMDWIWRILFLVGAATGAHSFEQSALTQPASVSGSPGQSITISCTGTSSDVGGYNYVSWYQQHPGKAPKLMIYDVSNRPSGVSNRFSGSKSGNTASLTISGLQAEDEADYYCSSYTSSSTLVYVFGTGTKVTVLTRASTKGPSVFPLAPSSKSTSGGTAALGCLVKDYFPEPVTVSWNSGALTSGVHTFPAVLQSSGLYSLSSVVTVPSSSLGTQTYICNVNHKPSNTKVDKRVEPKSCIPEDTFFPSPESSCDVKLVEKSFETDTNLNFQNLSVIGFRILLLKVAGFNLLMTLRLWSS

SEQ ID NO: 13995 - protein, 752 aa, Artificial Sequence
  Synthetic Polypeptide
MALPVTALLLPLALLLHAARPEVQLVESGGGLVQPGGSLRLSCAASGFSFSDFWMSWVRQAPGKGLEWVATISQAGSEKDYVDSVKGRFTISRDNAKKSLYLQMNSLRAEDTAVYYCASGVYSFDYRGQGTLVTVSSGTGGGGSGGGGSGGGGSEFQVQLVQSGAEVKKPGASVKVSCKASGYTFTSYDINWVRQATGQGLEWMGWMNPNSGNTGYAQKFQGRVTMTRNTSISTAYMELSSLRSEDTAVYYCARGDSTKVEIKLEGQPKANPTVTLFPPSSEELQANKATLVCLISDFYPGAVTVAWKADGSPVKAGVETTKPSKQSNNKYAASSYLSLTPEQWKSHRSYSCQVTHEGSTVEKTVAPTECSGRADCGFTSESYQQGVLSATILYEILLGKATLYAVLVSALVLMAMVKRKDSRGRAKRSGSGVKQTLNFDLLKLAGDVESNPGPTSMDWIWRILFLVGAATGAHSFEQSVLTQPRSVSGSPGQSVTISCTGTSSDVGGYNYVSWYQQHPGEAPKLIIYDADKRPSGISNRFSSGKSGNTASLTISGLQVEDEADYYCCSYAGGSTWVFGGGTKVTVLTRASTKGPSVFPLAPSSKSTSGGTAALGCLVKDYFPEPVTVSWNSGALTSGVHTFPAVLQSSGLYSLSSVVTVPSSSLGTQTYICNVNHKPSNTKVDKRVEPKSCIPEDTFFPSPESSCDVKLVEKSFETDTNLNFQNLSVIGFRILLLKVAGFNLLMTLRLWSS

SEQ ID NO: 13996 - protein, 774 aa, Artificial Sequence
  Synthetic Polypeptide
MALPVTALLLPLALLLHAARPEVQLVESGGGLVQPGGSLRLSCAASGFSFSDFWMSWVRQAPGKGLEWVATISQAGSEKDYVDSVKGRFTISRDNAKKSLYLQMNSLRAEDTAVYYCASGVYSFDYRGQGTLVTVSSGTGGGGSGGGGSGGGGSEFEVQLQQSGPGLVKPSQTLSLTCAISGDSVSSNSAAWNWIRQSPSRGLEWLGRTYYRSKWYSDYAVSVKSRITINPDTSKNQFSLQLNSVTPEDTAVYYCARDPYDFWSGYPDAFDIWGQGTMVTVSSLEGQPKANPTVTLFPPSSEELQANKATLVCLISDFYPGAVTVAWKADGSPVKAGVETTKPSKQSNNKYAASSYLSLTPEQWKSHRSYSCQVTHEGSTVEKTVAPTECSGRADCGFTSESYQQGVLSATILYEILLGKATLYAVLVSALVLMAMVKRKDSRGRAKRSGSGVKQTLNFDLLKLAGDVESNPGPTSMDWIWRILFLVGAATGAHSFEQSALTQPASVSGSPGQSITISCTGTSSDVGGYNYVSWYQQHPGKAPKVIISEVNNRPSGVSHRFSGSKSGNTASLTISGLQAEDEADYFCSSYTSGRTLYVFGTGSKVTVLGTRASTKGPSVFPLAPSSKSTSGGTAALGCLVKDYFPEPVTVSWNSGALTSGVHTFPAVLQSSGLYSLSSVVTVPSSSLGTQTYICNVNHKPSNTKVDKRVEPKSCIPEDTFFPSPESSCDVKLVEKSFETDTNLNFQNLSVIGFRILLLKVAGFNLLMTLRLWSS

SEQ ID NO: 13997 - protein, 773 aa, Artificial Sequence
  Synthetic Polypeptide
MALPVTALLLPLALLLHAARPEVQLVESGGGLVQPGGSLRLSCAASGFSFSDFWMSWVRQAPGKGLEWVATISQAGSEKDYVDSVKGRFTISRDNAKKSLYLQMNSLRAEDTAVYYCASGVYSFDYRGQGTLVTVSSGTGGGGSGGGGSGGGGSEFQSALTQPASASGSPGQSVTISCTGTSSDVGGYNYVSWYQQHPGKAPKLMIYDVSNRPSGVSNRFSGSKSGNTASLTISGLQAEDEADYYCSSYTSSSTLYVFGTGTQLTVLLEGQPKANPTVTLFPPSSEELQANKATLVCLISDFYPGAVTVAWKADGSPVKAGVETTKPSKQSNNKYAASSYLSLTPEQWKSHRSYSCQVTHEGSTVEKTVAPTECSGRADCGFTSESYQQGVLSATILYEILLGKATLYAVLVSALVLMAMVKRKDSRGRAKRSGSGVKQTLNFDLLKLAGDVESNPGPTSMDWIWRILFLVGAATGAHSFEEVQLQQSGPGLVKPSQTLSLTCAISGDSMLSNSDTWNWIRQSPSRGLEWLGRTYHRSTWYDDYASSVRGRVSINVDTSKNQYSLQLNAVTPEDTGVYYCARVRLQDGNSWSDAFDVWGQGTMVTVSSTRASTKGPSVFPLAPSSKSTSGGTAALGCLVKDYFPEPVTVSWNSGALTSGVHTFPAVLQSSGLYSLSSVVTVPSSSLGTQTYICNVNHKPSNTKVDKRVEPKSCIPEDTFFPSPESSCDVKLVEKSFETDTNLNFQNLSVIGFRILLLKVAGFNLLMTLRLWSS

SEQ ID NO: 13998 - protein, 773 aa, Artificial Sequence
  Synthetic Polypeptide
MALPVTALLLPLALLLHAARPEVQLVESGGGLVQPGGSLRLSCAASGFSFSDFWMSWVRQAPGKGLEWVATISQAGSEKDYVDSVKGRFTISRDNAKKSLYLQMNSLRAEDTAVYYCASGVYSFDYRGQGTLVTVSSGTGGGGSGGGGSGGGGSEFDVMLTQTPLSLPVSLGDQASISCRSSQSILHSTGDTYLEWYLQKPGQSPKLLINKVSNRLSGVPDRFSGSGSGTDFTLKISRVEAEDLGVYYCFQGSHVPWTFGGGTKLEIKRADAAPTVSIFPLEGQPKANPTVTLFPPSSEELQANKATLVCLISDFYPGAVTVAWKADGSPVKAGVETTKPSKQSNNKYAASSYLSLTPEQWKSHRSYSCQVTHEGSTVEKTVAPTECSGRADCGFTSESYQQGVLSATILYEILLGKATLYAVLVSALVLMAMVKRKDSRGRAKRSGSGVKQTLNFDLLKLAGDVESNPGPTSMDWIWRILFLVGAATGAHSFEQVKLQQSGPSLVKPGASVKMSCKASGYTFTDFYMKWVKQSHGKSLEWIGDINPNIGDTFYNQKFKGKATLTVDKSSSTAYMQLNSLTSEDSAVYFCSVGYFDVWGAGTTVTVSSTRASTKGPSVFPLAPSSKSTSGGTAALGCLVKDYFPEPVTVSWNSGALTSGVHTFPAVLQSSGLYSLSSVVTVPSSSLGTQTYICNVNHKPSNTKVDKRVEPKSCIPEDTFFPSPESSCDVKLVEKSFETDTNLNFQNLSVIGFRILLLKVAGFNLLMTLRLWSS

SEQ ID NO: 13999 - protein, 769 aa, Artificial Sequence
  Synthetic Polypeptide
MALPVTALLLPLALLLHAARPEVQLVESGGGLVQPGGSLRLSCAASGFSFSDFWMSWVRQAPGKGLEWVATISQAGSEKDYVDSVKGRFTISRDNAKKSLYLQMNSLRAEDTAVYYCASGVYSFDYRGQGTLVTVSSGTGGGGSGGGGSGGGGSEFEIVLTQSPATLSLSPGERATLSCRASQSVSIYLAWYQQKPGQAPRLLIYDASNRATGIPARFSGSGSGTDFTLTISSLEPEDFAVYYCQQRSNWPPFTFGPGTKVDIKLEGQPKANPTVTLFPPSSEELQANKATLVCLISDFYPGAVTVAWKADGSPVKAGVETTKPSKQSNNKYAASSYLSLTPEQWKSHRSYSCQVTHEGSTVEKTVAPTECSGRADCGFTSESYQQGVLSATILYEILLGKATLYAVLVSALVLMAMVKRKDSRGRAKRSGSGVKQTLNFDLLKLAGDVESNPGPTSMDWIWRILFLVGAATGAHSFEQVQLVESGGGVVQPGRSLRLSCAASGFTFSSYGMHWVRQAPGKGLEWVAVIWDDGSNKYYVDSVKGRFTISRDNSKNTLYLQMNSLRAEDTAVYYCARDDYYGSGSFNSYYGTDVWGQGTTVTVSSTRASTKGPSVFPLAPSSKSTSGGTAALGCLVKDYFPEPVTVSWNSGALTSGVHTFPAVLQSSGLYSLSSVVTVPSSSLGTQTYICNVNHKPSNTKVDKRVEPKSCIPEDTFFPSPESSCDVKLVEKSFETDTNLNFQNLSVIGFRILLLKVAGFNLLMTLRLWSS

SEQ ID NO: 14000 - protein, 754 aa, Artificial Sequence
  Synthetic Polypeptide
MALPVTALLLPLALLLHAARPEVQLVESGGGLVQPGGSLRLSCAASGFSFSDFWMSWVRQAPGKGLEWVATISQAGSEKDYVDSVKGRFTISRDNAKKSLYLQMNSLRAEDTAVYYCASGVYSFDYRGQGTLVTVSSGTGGGGSGGGGSGGGGSEFDIQMTQSPSSLSASVGDRVTITCRASQGISSWLAWYQQKPEKAPKSLIYAASSLQSGVPSRFSGSGSGTDFTLTISSLQPEDFATYYCQQYNSYPYTFGQGTKLEIKLEGQPKANPTVTLFPPSSEELQANKATLVCLISDFYPGAVTVAWKADGSPVKAGVETTKPSKQSNNKYAASSYLSLTPEQWKSHRSYSCQVTHEGSTVEKTVAPTECSGRADCGFTSESYQQGVLSATILYEILLGKATLYAVLVSALVLMAMVKRKDSRGRAKRSGSGVKQTLNFDLLKLAGDVESNPGPTSMDWIWRILFLVGAATGAHSFEEVQLVQSGGGLVHPGGSLRLSCAGSGFTFSTYLMYWVRQAPGKTLEWVSAIGSGGDTYYADSVKGRFTISRDNAKNSLYLQMNSLRAEDMAVYYCARGLGYWGQGTLVTVSSTRASTKGPSVFPLAPSSKSTSGGTAALGCLVKDYFPEPVTVSWNSGALTSGVHTFPAVLQSSGLYSLSSVVTVPSSSLGTQTYICNVNHKPSNTKVDKRVEPKSCIPEDTFFPSPESSCDVKLVEKSFETDTNLNFQNLSVIGFRILLLKVAGFNLLMTLRLWSS

SEQ ID NO: 14001 - protein, 773 aa, Artificial Sequence
  Synthetic Polypeptide
MALPVTALLLPLALLLHAARPEVQLVESGGGLVQPGGSLRLSCAASGFSFSDFWMSWVRQAPGKGLEWVATISQAGSEKDYVDSVKGRFTISRDNAKKSLYLQMNSLRAEDTAVYYCASGVYSFDYRGQGTLVTVSSGTGGGGSGGGGSGGGGSEFLPVLTQPPSVSVAPGKTARITCGGNNIGSKSVHWYQQKPGQAPVLVVYDDSDRPSGIPERFSGSNSGNTATLTISRVEAGDEADYYCQVWDSSSDYVVFGGGTKLTVLLEGQPKANPTVTLFPPSSEELQANKATLVCLISDFYPGAVTVAWKADGSPVKAGVETTKPSKQSNNKYAASSYLSLTPEQWKSHRSYSCQVTHEGSTVEKTVAPTECSGRADCGFTSESYQQGVLSATILYEILLGKATLYAVLVSALVLMAMVKRKDSRGRAKRSGSGVKQTLNFDLLKLAGDVESNPGPTSMDWIWRILFLVGAATGAHSFEEVQLVQSGAEVKKPGESLKISCKGSGYSFTSYWIGWVRQMPGKGLEWMGIIYPGDSDTRYSPSFQGQVTISADKSISTAYLQWSSLKASDTAMYYCARQVWGWQGGMYPRSNWWYNLDSWGQGTLVTVSSTRASTKGPSVFPLAPSSKSTSGGTAALGCLVKDYFPEPVTVSWNSGALTSGVHTFPAVLQSSGLYSLSSVVTVPSSSLGTQTYICNVNHKPSNTKVDKRVEPKSCIPEDTFFPSPESSCDVKLVEKSFETDTNLNFQNLSVIGFRILLLKVAGFNLLMTLRLWSS

SEQ ID NO: 14002 - protein, 766 aa, Artificial Sequence
  Synthetic Polypeptide
MALPVTALLLPLALLLHAARPEVQLVESGGGLVQPGGSLRLSCAASGFSFSDFWMSWVRQAPGKGLEWVATISQAGSEKDYVDSVKGRFTISRDNAKKSLYLQMNSLRAEDTAVYYCASGVYSFDYRGQGTLVTVSSGTGGGGSGGGGSGGGGSEFELVMTQSPASLAVSLGQRATISCRASESVDSYGKSFMHWYQLKPGQPPKLLIYRASNLESGVPARFSGSGSRTDFTLTIDPVEADDAATYYCQQNNEDPWTFGGGTKLEIKLEGQPKANPTVTLFPPSSEELQANKATLVCLISDFYPGAVTVAWKADGSPVKAGVETTKPSKQSNNKYAASSYLSLTPEQWKSHRSYSCQVTHEGSTVEKTVAPTECSGRADCGFTSESYQQGVLSATILYEILLGKATLYAVLVSALVLMAMVKRKDSRGRAKRSGSGVKQTLNFDLLKLAGDVESNPGPTSMDWIWRILFLVGAATGAHSFEEVQLEQSGPELVKPGASVKMSCKASGYTFTNYYMKWVKQSHGKSLEWIGDLNPNNGDTFYNQKFKGKATLTVDKSSNTAYMQLNSLTSEDSAVYYCARTGRYEENAMDYWGQGTSVTVSSTRASTKGPSVFPLAPSSKSTSGGTAALGCLVKDYFPEPVTVSWNSGALTSGVHTFPAVLQSSGLYSLSSVVTVPSSSLGTQTYICNVNHKPSNTKVDKRVEPKSCIPEDTFFPSPESSCDVKLVEKSFETDTNLNFQNLSVIGFRILLLKVAGFNLLMTLRLWSS

SEQ ID NO: 14003 - protein, 760 aa, Artificial Sequence
  Synthetic Polypeptide
MALPVTALLLPLALLLHAARPEVQLVESGGGLVQPGGSLRLSCAASGFSFSDFWMSWVRQAPGKGLEWVATISQAGSEKDYVDSVKGRFTISRDNAKKSLYLQMNSLRAEDTAVYYCASGVYSFDYRGQGTLVTVSSGTGGGGSGGGGSGGGGSEFDVVMTQSPSSLSASVGDRVTITCMASEDIYIRLAWYQQKPGNAPKLLIYAATSLETGVPSRFSGSGSGTDFTLTISSLQPEDFATYYCQQYWSSPWTFGGGTKVEIKLEGQPKANPTVTLFPPSSEELQANKATLVCLISDFYPGAVTVAWKADGSPVKAGVETTKPSKQSNNKYAASSYLSLTPEQWKSHRSYSCQVTHEGSTVEKTVAPTECSGRADCGFTSESYQQGVLSATILYEILLGKATLYAVLVSALVLMAMVKRKDSRGRAKRSGSGVKQTLNFDLLKLAGDVESNPGPTSMDWIWRILFLVGAATGAHSFEQVQLQESGPGLVKPSQTLSLTCTVSGYSITSDYTWNWIRQPPGNGLEWIGYITYSGSTSYNPSLKSRVLISVDTSKNQVSLKLSSVTAADTAVYYCARLGRRYTMDYWGQGTTVTVSSTRASTKGPSVFPLAPSSKSTSGGTAALGCLVKDYFPEPVTVSWNSGALTSGVHTFPAVLQSSGLYSLSSVVTVPSSSLGTQTYICNVNHKPSNTKVDKRVEPKSCIPEDTFFPSPESSCDVKLVEKSFETDTNLNFQNLSVIGFRILLLKVAGFNLLMTLRLWSS

SEQ ID NO: 14004 - protein, 764 aa, Artificial Sequence; identical to SEQ ID NO: 13867
  Synthetic Polypeptide

SEQ ID NO: 14005 - protein, 764 aa, Artificial Sequence
  Synthetic Polypeptide
MALPVTALLLPLALLLHAARPEVQLVESGGGLVQPGGSLRLSCAASGFSFSDFWMSWVRQAPGKGLEWVATISQAGSEKDYVDSVKGRFTISRDNAKKSLYLQMNSLRAEDTAVYYCASGVYSFDYRGQGTLVTVSSGTGGGGSGGGGSGGGGSEFDIVLTQSPATLSLSPGDRATLSCRASESVTILGSHLIYWYQQKPGQAPRLLIQLASNVQTGIPARFSGSGSRTDFTLTISSLEPEDFAVYYCLQSRTIPRTFGQGTKLEIKRLEGQPKANPTVTLFPPSSEELQANKATLVCLISDFYPGAVTVAWKADGSPVKAGVETTKPSKQSNNKYAASSYLSLTPEQWKSHRSYSCQVTHEGSTVEKTVAPTECSGRADCGFTSESYQQGVLSATILYEILLGKATLYAVLVSALVLMAMVKRKDSRGRAKRSGSGVKQTLNFDLLKLAGDVESNPGPTSMDWIWRILFLVGAATGAHSFEQVQLVQSGSELKKPGESVKISCKASGYTFTHYSMNWVRQAPGQGLEWMGRINTETGEPLYADDFKGRFVFSLDTSASTAYLQISSLKAEDTAVYYCSNDYLYSLDYWGQGTLVTVSSTRASTKGPSVFPLAPSSKSTSGGTAALGCLVKDYFPEPVTVSWNSGALTSGVHTFPAVLQSSGLYSLSSVVTVPSSSLGTQTYICNVNHKPSNTKVDKRVEPKSCIPEDTFFPSPESSCDVKLVEKSFETDTNLNFQNLSVIGFRILLLKVAGFNLLMTLRLWSS

SEQ ID NO: 14006 - protein, 765 aa, Artificial Sequence
  Synthetic Polypeptide
MALPVTALLLPLALLLHAARPEVQLVESGGGLVQPGGSLRLSCAASGFSFSDFWMSWVRQAPGKGLEWVATISQAGSEKDYVDSVKGRFTISRDNAKKSLYLQMNSLRAEDTAVYYCASGVYSFDYRGQGTLVTVSSGTGGGGSGGGGSGGGGSEFDIQLTQSPSFLSASVGDRVTITCRASQGISTDLNWYQQKPGKAPKLLIYAASNLESGVPSRFSGSGSGTEFTLTISSLQPEDFATYYCQQSYNWPYTFGGGTKVEIKRLEGQPKANPTVTLFPPSSEELQANKATLVCLISDFYPGAVTVAWKADGSPVKAGVETTKPSKQSNNKYAASSYLSLTPEQWKSHRSYSCQVTHEGSTVEKTVAPTECSGRADCGFTSESYQQGVLSATILYEILLGKATLYAVLVSALVLMAMVKRKDSRGRAKRSGSGVKQTLNFDLLKLAGDVESNPGPTSMDWIWRILFLVGAATGAHSFEEVQLVESGGGLVKPGGSLRLSCAASGFTFSNFEMNWVRQAPGKGLEWVSGISSNGRYINYADSVKGRFTISRDNAKNSLYLQMNSLRAEDTAVYYCARVVDFDQDYNGFDYWGQGTLVTVSSTRASTKGPSVFPLAPSSKSTSGGTAALGCLVKDYFPEPVTVSWNSGALTSGVHTFPAVLQSSGLYSLSSVVTVPSSSLGTQTYICNVNHKPSNTKVDKRVEPKSCIPEDTFFPSPESSCDVKLVEKSFETDTNLNFQNLSVIGFRILLLKVAGFNLLMTLRLWSS

SEQ ID NO: 14007 - protein, 763 aa, Artificial Sequence
  Synthetic Polypeptide
MALPVTALLLPLALLLHAARPEVQLVESGGGLVQPGGSLRLSCAASGFSFSDFWMSWVRQAPGKGLEWVATISQAGSEKDYVDSVKGRFTISRDNAKKSLYLQMNSLRAEDTAVYYCASGVYSFDYRGQGTLVTVSSGTGGGGSGGGGSGGGGSEFDIQLTQSPSFLSASVGDRVTITCSLSLGISTWRDWFPPRLGRGLEPLTYAASTLQSGVPSRFSGSGSGTEFTLTISSLQPEDFATYYCQQLNSYPLTFGGGTKVEIKRLEGQPKANPTVTLFPPSSEELQANKATLVCLISDFYPGAVTVAWKADGSPVKAGVETTKPSKQSNNKYAASSYLSLTPEQWKSHRSYSCQVTHEGSTVEKTVAPTECSGRADCGFTSESYQQGVLSATILYEILLGKATLYAVLVSALVLMAMVKRKDSRGRAKRSGSGVKQTLNFDLLKLAGDVESNPGPTSMDWIWRILFLVGAATGAHSFEEVQLVESGGGLVKPGGSLRLSCAASGFTFSTYGMSWVRQAPGKGLEWVAYINNGSGYIYYADSVKGRFTISRDNAKNSLYLQMNSLRAEDTAVYYCARGQWWSGGDFDYWGQGTLVTVSSTRASTKGPSVFPLAPSSKSTSGGTAALGCLVKDYFPEPVTVSWNSGALTSGVHTFPAVLQSSGLYSLSSVVTVPSSSLGTQTYICNVNHKPSNTKVDKRVEPKSCIPEDTFFPSPESSCDVKLVEKSFETDTNLNFQNLSVIGFRILLLKVAGFNLLMTLRLWSS

SEQ ID NO: 14008 - protein, 764 aa, Artificial Sequence
  Synthetic Polypeptide
MALPVTALLLPLALLLHAARPEVQLVESGGGLVQPGGSLRLSCAASGFSFSDFWMSWVRQAPGKGLEWVATISQAGSEKDYVDSVKGRFTISRDNAKKSLYLQMNSLRAEDTAVYYCASGVYSFDYRGQGTLVTVSSGTGGGGSGGGGSGGGGSEFEIVLTQSPATLSLSPGERATLSCSASSSVSYMYWYQQKPGQAPRLLIYRTSNLASGIPARFSGSGSGTDFTLTISSLEPEDFAVYYCQQYHSYPTTFGQGTKVEIKRTVLEGQPKANPTVTLFPPSSEELQANKATLVCLISDFYPGAVTVAWKADGSPVKAGVETTKPSKQSNNKYAASSYLSLTPEQWKSHRSYSCQVTHEGSTVEKTVAPTECSGRADCGFTSESYQQGVLSATILYEILLGKATLYAVLVSALVLMAMVKRKDSRGRAKRSGSGVKQTLNFDLLKLAGDVESNPGPTSMDWIWRILFLVGAATGAHSFEEVQLVESGGGLVQPGGSLRLSCAASGFSFNTYAMNWVRQAPGKGLEWVSHIRSKSNNFATYYADSVKDRFTISRDNAKNSLYLQMNSLRAEDTAVYYCARQGGDFPMDYWGQGTLVTVSSTRASTKGPSVFPLAPSSKSTSGGTAALGCLVKDYFPEPVTVSWNSGALTSGVHTFPAVLQSSGLYSLSSVVTVPSSSLGTQTYICNVNHKPSNTKVDKRVEPKSCIPEDTFFPSPESSCDVKLVEKSFETDTNLNFQNLSVIGFRILLLKVAGFNLLMTLRLWSS

SEQ ID NO: 14009 - protein, 760 aa, Artificial Sequence
  Synthetic Polypeptide
MALPVTALLLPLALLLHAARPEVQLVESGGGLVQPGGSLRLSCAASGFSFSDFWMSWVRQAPGKGLEWVATISQAGSEKDYVDSVKGRFTISRDNAKKSLYLQMNSLRAEDTAVYYCASGVYSFDYRGQGTLVTVSSGTGGGGSGGGGSGGGGSEFDVVMTQSPSSLSASVGDRVTITCKASEDIYIRLAWYQQKPGKAPKLLIYAATSLETGVPSRFSGSGSGTDFTLTISSLQPEDFATYYCQQYWTTPWTFGGGTKVEIKLEGQPKANPTVTLFPPSSEELQANKATLVCLISDFYPGAVTVAWKADGSPVKAGVETTKPSKQSNNKYAASSYLSLTPEQWKSHRSYSCQVTHEGSTVEKTVAPTECSGRADCGFTSESYQQGVLSATILYEILLGKATLYAVLVSALVLMAMVKRKDSRGRAKRSGSGVKQTLNFDLLKLAGDVESNPGPTSMDWIWRILFLVGAATGAHSFEQVQLQESGPGLVKPSQTLSLTCTVSGYSITIDYTWNWIRQPPGKGLEWIGYITYSGSTDYNPSLKSRVLISVDTSKNQVSLKLSSVTAADTAVYYCARLGRRYALDYWGQGTTVTVSSTRASTKGPSVFPLAPSSKSTSGGTAALGCLVKDYFPEPVTVSWNSGALTSGVHTFPAVLQSSGLYSLSSVVTVPSSSLGTQTYICNVNHKPSNTKVDKRVEPKSCIPEDTFFPSPESSCDVKLVEKSFETDTNLNFQNLSVIGFRILLLKVAGFNLLMTLRLWSS

SEQ ID NO: 14010 - protein, 764 aa, Artificial Sequence
  Synthetic Polypeptide
MALPVTALLLPLALLLHAARPEVQLVESGGGLVQPGGSLRLSCAASGFSFSDFWMSWVRQAPGKGLEWVATISQAGSEKDYVDSVKGRFTISRDNAKKSLYLQMNSLRAEDTAVYYCASGVYSFDYRGQGTLVTVSSGTGGGGSGGGGSGGGGSEFDIQMTQTTSSLSASLGDRVTISCRASQDISNYLNWYQQKPDGTVKLLIYYTSILHSGVPSRFSGSGSGTDYSLTISNLEQEDFATYFCQQGNTLPWTFGGGTKLEIKALEGQPKANPTVTLFPPSSEELQANKATLVCLISDFYPGAVTVAWKADGSPVKAGVETTKPSKQSNNKYAASSYLSLTPEQWKSHRSYSCQVTHEGSTVEKTVAPTECSGRADCGFTSESYQQGVLSATILYEILLGKATLYAVLVSALVLMAMVKRKDSRGRAKRSGSGVKQTLNFDLLKLAGDVESNPGPTSMDWIWRILFLVGAATGAHSFEVQLVESGGGLVKPGGSLKLSCAASGFAFSIYDMSWVRQTPEKRLEWVAYISSGGGTYYPDTVKGRFTISRDNAKNTLYLQMSSLKSEDTAMYYCARHSGYGTHWGVLFAYWGQGTLVTVSATRASTKGPSVFPLAPSSKSTSGGTAALGCLVKDYFPEPVTVSWNSGALTSGVHTFPAVLQSSGLYSLSSVVTVPSSSLGTQTYICNVNHKPSNTKVDKRVEPKSCIPEDTFFPSPESSCDVKLVEKSFETDTNLNFQNLSVIGFRILLLKVAGFNLLMTLRLWSS

SEQ ID NO: 14011 - protein, 775 aa, Artificial Sequence
  Synthetic Polypeptide
MALPVTALLLPLALLLHAARPEVQLVESGGGLVQPGGSLRLSCAASGFSFSDFWMSWVRQAPGKGLEWVATISQAGSEKDYVDSVKGRFTISRDNAKKSLYLQMNSLRAEDTAVYYCASGVYSFDYRGQGTLVTVSSGTGGGGSGGGGSGGGGSEFDIVMTQSPDSLAVSLGERATINCKSSQSLLYRSNQKNYLAWYQQKPGQPPKLLIYWASTRESGVPDRFSGSGSGTDFTLTISSLQAEDVAVYYCQQYYNYPRTFGQGTKVEIKRTVLEGQPKANPTVTLFPPSSEELQANKATLVCLISDFYPGAVTVAWKADGSPVKAGVETTKPSKQSNNKYAASSYLSLTPEQWKSHRSYSCQVTHEGSTVEKTVAPTECSGRADCGFTSESYQQGVLSATILYEILLGKATLYAVLVSALVLMAMVKRKDSRGRAKRSGSGVKQTLNFDLLKLAGDVESNPGPTSMDWIWRILFLVGAATGAHSFEEVQLLESGGGLVQPGGSLRLSCAASGYSITSDYAWNWVRQAPGKGLEWVSYISNSGSTSYNPSLKSRFTISRDNSKNTLYLQMNSLRAEDTAVYYCAKERNYDYDDYYYAMDYWGQGTLVTVSSTRASTKGPSVFPLAPSSKSTSGGTAALGCLVKDYFPEPVTVSWNSGALTSGVHTFPAVLQSSGLYSLSSVVTVPSSSLGTQTYICNVNHKPSNTKVDKRVEPKSCIPEDTFFPSPESSCDVKLVEKSFETDTNLNFQNLSVIGFRILLLKVAGFNLLMTLRLWSS

SEQ ID NO: 14012 - protein, 768 aa, Artificial Sequence
  Synthetic Polypeptide
MALPVTALLLPLALLLHAARPEVQLVESGGGLVQPGGSLRLSCAASGFSFSDFWMSWVRQAPGKGLEWVATISQAGSEKDYVDSVKGRFTISRDNAKKSLYLQMNSLRAEDTAVYYCASGVYSFDYRGQGTLVTVSSGTGGGGSGGGGSGGGGSEFDVVMTQSPLSLPVTLGQPASISCRSSQSLLHSSGNTYLEWYQQRPGQSPRPLIYKISTRFSGVPDRFSGSGSGTDFTLKISRVEAEDVGVYYCFQGSHVPYTFGGGTKVEIKRLEGQPKANPTVTLFPPSSEELQANKATLVCLISDFYPGAVTVAWKADGSPVKAGVETTKPSKQSNNKYAASSYLSLTPEQWKSHRSYSCQVTHEGSTVEKTVAPTECSGRADCGFTSESYQQGVLSATILYEILLGKATLYAVLVSALVLMAMVKRKDSRGRAKRSGSGVKQTLNFDLLKLAGDVESNPGPTSMDWIWRILFLVGAATGAHSFEQVQLVQSGAEVKKPGASVKVSCKASGLTIEDYYMHWVRQAPGQGLEWMGWIDPENGDTEYGPKFQGRVTMTRDTSINTAYMELSRLRSDDTAVYYCAVHNAHYGTWFAYWGQGTLVTVSSTRASTKGPSVFPLAPSSKSTSGGTAALGCLVKDYFPEPVTVSWNSGALTSGVHTFPAVLQSSGLYSLSSVVTVPSSSLGTQTYICNVNHKPSNTKVDKRVEPKSCIPEDTFFPSPESSCDVKLVEKSFETDTNLNFQNLSVIGFRILLLKVAGFNLLMTLRLWSS

SEQ ID NO: 14013 - protein, 760 aa, Artificial Sequence
  Synthetic Polypeptide
MALPVTALLLPLALLLHAARPEVQLVESGGGLVQPGGSLRLSCAASGFSFSDFWMSWVRQAPGKGLEWVATISQAGSEKDYVDSVKGRFTISRDNAKKSLYLQMNSLRAEDTAVYYCASGVYSFDYRGQGTLVTVSSGTGGGGSGGGGSGGGGSEFDIQMTQSPSSLSASVGDRVTITCRASENIYSNLAWYQQKPGKAPKLLIYAATNLADGVPSRFSGSGSGTDFTLTISSLQPEDFATYYCQHFWGTPTFGQGTKVEIKRTVLEGQPKANPTVTLFPPSSEELQANKATLVCLISDFYPGAVTVAWKADGSPVKAGVETTKPSKQSNNKYAASSYLSLTPEQWKSHRSYSCQVTHEGSTVEKTVAPTECSGRADCGFTSESYQQGVLSATILYEILLGKATLYAVLVSALVLMAMVKRKDSRGRAKRSGSGVKQTLNFDLLKLAGDVESNPGPTSMDWIWRILFLVGAATGAHSFEEVQLVESGGGLVQPGGSLRLSCAASGFSLTNYGVHWVRQAPGKGLEWVSVIWSGGSTDYNAAFISRFTISADTSKNTAYLQMNSLRAEDTAVYYCARELIHAMDNWGQGTLVTVSSTRASTKGPSVFPLAPSSKSTSGGTAALGCLVKDYFPEPVTVSWNSGALTSGVHTFPAVLQSSGLYSLSSVVTVPSSSLGTQTYICNVNHKPSNTKVDKRVEPKSCIPEDTFFPSPESSCDVKLVEKSFETDTNLNFQNLSVIGFRILLLKVAGFNLLMTLRLWSS

SEQ ID NO: 14014 - protein, 767 aa, Artificial Sequence
  Synthetic Polypeptide
MALPVTALLLPLALLLHAARPEVQLVESGGGLVQPGGSLRLSCAASGFSFSDFWMSWVRQAPGKGLEWVATISQAGSEKDYVDSVKGRFTISRDNAKKSLYLQMNSLRAEDTAVYYCASGVYSFDYRGQGTLVTVSSGTGGGGSGGGGSGGGGSEFDFVMTQSPLSLPVTPGEPASISCRSSQSIVHSNGNTYLEWYLQKPGQSPQLLIYKVSNRFSGVPDRFSGSGSGTDFTLKISRVEAEDVGVYYCFQGSHVPLTFGQGTKLEIKRLEGQPKANPTVTLFPPSSEELQANKATLVCLISDFYPGAVTVAWKADGSPVKAGVETTKPSKQSNNKYAASSYLSLTPEQWKSHRSYSCQVTHEGSTVEKTVAPTECSGRADCGFTSESYQQGVLSATILYEILLGKATLYAVLVSALVLMAMVKRKDSRGRAKRSGSGVKQTLNFDLLKLAGDVESNPGPTSMDWIWRILFLVGAATGAHSFEEVQLVESGAEVKKPGASVKVSCKASGYTFTSYWIHWVRQAPGQGLEWMGENDPSNGRTNYNEKFKNRVTLTVDTSISTAYMELSRLRSDDTAVYYCARGPNYFYSMDYWGQGTMVTVSSTRASTKGPSVFPLAPSSKSTSGGTAALGCLVKDYFPEPVTVSWNSGALTSGVHTFPAVLQSSGLYSLSSVVTVPSSSLGTQTYICNVNHKPSNTKVDKRVEPKSCIPEDTFFPSPESSCDVKLVEKSFETDTNLNFQNLSVIGFRILLLKVAGFNLLMTLRLWSS

SEQ ID NO: 14015 - protein, 760 aa, Artificial Sequence
  Synthetic Polypeptide
MALPVTALLLPLALLLHAARPEVQLVESGGGLVQPGGSLRLSCAASGFSFSDFWMSWVRQAPGKGLEWVATISQAGSEKDYVDSVKGRFTISRDNAKKSLYLQMNSLRAEDTAVYYCASGVYSFDYRGQGTLVTVSSGTGGGGSGGGGSGGGGSEFDIQLTQSPSFLSASVGDRVTITCSARSSISFMYWYQQKPGKAPKLLIYDTSNLASGVPSRFSGSGSGTEFTLTISSLEAEDAATYYCQQWSSYPLTFGQGTKLEIKLEGQPKANPTVTLFPPSSEELQANKATLVCLISDFYPGAVTVAWKADGSPVKAGVETTKPSKQSNNKYAASSYLSLTPEQWKSHRSYSCQVTHEGSTVEKTVAPTECSGRADCGFTSESYQQGVLSATILYEILLGKATLYAVLVSALVLMAMVKRKDSRGRAKRSGSGVKQTLNFDLLKLAGDVESNPGPTSMDWIWRILFLVGAATGAHSFEQVQLVQSGAEVKKPGASVKVSCKASGYTFTGSWMNWVRQAPGQGLEWIGRIYPGDGETNYNGKFKDRVTITADKSTSTAYMELSSLRSEDTAVYYCARIYGNNVYFDVWGQGTTVTVSSTRASTKGPSVFPLAPSSKSTSGGTAALGCLVKDYFPEPVTVSWNSGALTSGVHTFPAVLQSSGLYSLSSVVTVPSSSLGTQTYICNVNHKPSNTKVDKRVEPKSCIPEDTFFPSPESSCDVKLVEKSFETDTNLNFQNLSVIGFRILLLKVAGFNLLMTLRLWSS

SEQ ID NO: 14016 - protein, 768 aa, Artificial Sequence
  Synthetic Polypeptide
MALPVTALLLPLALLLHAARPEVQLVESGGGLVQPGGSLRLSCAASGFSFSDFWMSWVRQAPGKGLEWVATISQAGSEKDYVDSVKGRFTISRDNAKKSLYLQMNSLRAEDTAVYYCASGVYSFDYRGQGTLVTVSSGTGGGGSGGGGSGGGGSEFQLVLTQSPSASASLGSSVKLTCTLSSGHKTDTIDWYQQQPGKAPRYLMKLEGSGSYNKGSGVPDRFSGSSSGADWYLTISSLQSEDEADYYCGTDYPGNYLFGGGTQLTVLGLEGQPKANPTVTLFPPSSEELQANKATLVCLISDFYPGAVTVAWKADGSPVKAGVETTKPSKQSNNKYAASSYLSLTPEQWKSHRSYSCQVTHEGSTVEKTVAPTECSGRADCGFTSESYQQGVLSATILYEILLGKATLYAVLVSALVLMAMVKRKDSRGRAKRSGSGVKQTLNFDLLKLAGDVESNPGPTSMDWIWRILFLVGAATGAHSFEQEQLVESGGGLVQPGGSLRLSCAASGFTFSDYYMSWIRQAPGKGLEWVATIYPSSGKTYYADSAKGRLTISSDNAKDSLYLQMNSLRAEDTAVYYCTRDSYADDAALFDIWGQGTTVTVSSTRASTKGPSVFPLAPSSKSTSGGTAALGCLVKDYFPEPVTVSWNSGALTSGVHTFPAVLQSSGLYSLSSVVTVPSSSLGTQTYICNVNHKPSNTKVDKRVEPKSCIPEDTFFPSPESSCDVKLVEKSFETDTNLNFQNLSVIGFRILLLKVAGFNLLMTLRLWSS

SEQ ID NO: 14017 - protein, 736 aa, Artificial Sequence
  Synthetic Polypeptide
MALPVTALLLPLALLLHAARPEVQLVESGGGLVQPGGSLRLSCAASGFSFSDFWMSWVRQAPGKGLEWVATISQAGSEKDYVDSVKGRFTISRDNAKKSLYLQMNSLRAEDTAVYYCASGVYSFDYRGQGTLVTVSSGTGGGGSGGGGSGGGGSEFEIVLTQSPDTLSLSPGEKATLSCRASQSVSSSFLAWYQQKPGQAPSLLIYVASRRAAGIPDRFSGSGSGTDFTLTISRLEPEDFGMFYCQHYGRTPFTFGPGTKVDIKRASRDSLRPILPHCSLQAAKNSRPTRPHLCASPTSTLGLQWLGRPMDLLKPAWKPPSHPSRATTNTPPAPTAHLSSGSPTDPTAAKPTKAAPWKRQWPLQSAAAEPIAALPARATSRACAPPSCTRSCWARPPCTPCWCLPWCWLWSSGRTAGDAPREADLASRPISTCSWLATWNPTQALLVWTGFGASFSLSALLPARIPSNRSSWWNQGAVWCSRVGADCHAWRLASHSRTTACTGCDRPPERVWSGSPSGTTDLMSITEILREGSPSPATIAKICSTCKTHSGRMIRRSTIALAQGLLWPAHSITGDRVPWQYQARVPLQRDPPCFLWLPAASLQAEEQPLWAAWSRITFPSLPCPGIAEHQAACTPFQPCCKAAACTLAAWSQCLALAWAPRPTSAMTTSLATPRWTREWNPRAVSPRTHSSQAPRAAATSWWKRASRQTPTTSRTASASESCCKWPALTCPCGCGP

SEQ ID NO: 14018 - protein, 770 aa, Artificial Sequence
  Synthetic Polypeptide
MALPVTALLLPLALLLHAARPEVQLVESGGGLVQPGGSLRLSCAASGFSFSDFWMSWVRQAPGKGLEWVATISQAGSEKDYVDSVKGRFTISRDNAKKSLYLQMNSLRAEDTAVYYCASGVYSFDYRGQGTLVTVSSGTGGGGSGGGGSGGGGSEFDIQMTQSPSSLSASLGDRVTITCRASQGIRNDLGWYQQKPGKAPKRLIYASSTLQSGVPSRFSGSGSGTEFTLTISSLQPEDFATYYCLQHNNFPWTFGQGTKVEIKRLEGQPKANPTVTLFPPSSEELQANKATLVCLISDFYPGAVTVAWKADGSPVKAGVETTKPSKQSNNKYAASSYLSLTPEQWKSHRSYSCQVTHEGSTVEKTVAPTECSGRADCGFTSESYQQGVLSATILYEILLGKATLYAVLVSALVLMAMVKRKDSRGRAKRSGSGVKQTLNFDLLKLAGDVESNPGPTSMDWIWRILFLVGAATGAHSFEQVTLKESGPVLVKPTETLTLTCTVSGFSLINARMGVSWIRQPPGKALEWLAHIFSNAEKSYRTSLKSRLTISKDTSKSQVVLTMTNMDPVDTATYYCARIPGYGGNGDYHYYGMDVWGQGTTVTVSSTRASTKGPSVFPLAPSSKSTSGGTAALGCLVKDYFPEPVTVSWNSGALTSGVHTFPAVLQSSGLYSLSSVVTVPSSSLGTQTYICNVNHKPSNTKVDKRVEPKSCIPEDTFFPSPESSCDVKLVEKSFETDTNLNFQNLSVIGFRILLLKVAGFNLLMTLRLWSS

SEQ ID NO: 14019 - protein, 763 aa, Artificial Sequence
  Synthetic Polypeptide
MALPVTALLLPLALLLHAARPEVQLVESGGGLVQPGGSLRLSCAASGFSFSDFWMSWVRQAPGKGLEWVATISQAGSEKDYVDSVKGRFTISRDNAKKSLYLQMNSLRAEDTAVYYCASGVYSFDYRGQGTLVTVSSGTGGGGSGGGGSGGGGSEFDIVLTQSPPSLAMSLGKRATISCRASESVTILGSHLIHWYQQKPGQPPTLLIQLASNVQTGVPARFSGSGSRTDFTLTIDPVEEDDVAVYYCLQSRTIPRTFGGGTKLEIKLEGQPKANPTVTLFPPSSEELQANKATLVCLISDFYPGAVTVAWKADGSPVKAGVETTKPSKQSNNKYAASSYLSLTPEQWKSHRSYSCQVTHEGSTVEKTVAPTECSGRADCGFTSESYQQGVLSATILYEILLGKATLYAVLVSALVLMAMVKRKDSRGRAKRSGSGVKQTLNFDLLKLAGDVESNPGPTSMDWIWRILFLVGAATGAHSFEQIQLVQSGPELKKPGETVKISCKASGYTFTDYSINWVKRAPGKGLKWMGWINTETREPAYAYDFRGRFAFSLETSASTAYLQINNLKYEDTATYFCALDYSYAMDYWGQGTSVTVSSTRASTKGPSVFPLAPSSKSTSGGTAALGCLVKDYFPEPVTVSWNSGALTSGVHTFPAVLQSSGLYSLSSVVTVPSSSLGTQTYICNVNHKPSNTKVDKRVEPKSCIPEDTFFPSPESSCDVKLVEKSFETDTNLNFQNLSVIGFRILLLKVAGFNLLMTLRLWSS

SEQ ID NO: 14020 - protein, 765 aa, Artificial Sequence
  Synthetic Polypeptide
MALPVTALLLPLALLLHAARPEVQLVESGGGLVQPGGSLRLSCAASGFSFSDFWMSWVRQAPGKGLEWVATISQAGSEKDYVDSVKGRFTISRDNAKKSLYLQMNSLRAEDTAVYYCASGVYSFDYRGQGTLVTVSSGTGGGGSGGGGSGGGGSEFDIQLTQSPSSLSASVGDRVSFTCQASQDINNFLNWYQQKPGKAPKLLIYDASNLETGVPSRFSGSGSGTDFTFTISSLQPEDIATYYCQQYGNLPFTFGGGTKVEIKRLEGQPKANPTVTLFPPSSEELQANKATLVCLISDFYPGAVTVAWKADGSPVKAGVETTKPSKQSNNKYAASSYLSLTPEQWKSHRSYSCQVTHEGSTVEKTVAPTECSGRADCGFTSESYQQGVLSATILYEILLGKATLYAVLVSALVLMAMVKRKDSRGRAKRSGSGVKQTLNFDLLKLAGDVESNPGPTSMDWIWRILFLVGAATGAHSFEQVQLQESGPGLVKPSETLSLTCTVSGGSISSYYWSWIRQPPGKGLEWIGYIYYSGSTNYNPSLKSRVTISVDTSKNQFSLKLSSVTAADTAVYYCVSLVYCGGDCYSGFDYWGQGTLVTVSSTRASTKGPSVFPLAPSSKSTSGGTAALGCLVKDYFPEPVTVSWNSGALTSGVHTFPAVLQSSGLYSLSSVVTVPSSSLGTQTYICNVNHKPSNTKVDKRVEPKSCIPEDTFFPSPESSCDVKLVEKSFETDTNLNFQNLSVIGFRILLLKVAGFNLLMTLRLWSS

SEQ ID NO: 14021 - protein, 767 aa, Artificial Sequence
  Synthetic Polypeptide
MALPVTALLLPLALLLHAARPEVQLVESGGGLVQPGGSLRLSCAASGFSFSDFWMSWVRQAPGKGLEWVATISQAGSEKDYVDSVKGRFTISRDNAKKSLYLQMNSLRAEDTAVYYCASGVYSFDYRGQGTLVTVSSGTGGGGSGGGGSGGGGSEFDIQLTQSPSSLSASVGDRVSFTCQASQDINNFLNWYQQKPGKAPKLLIYDASNLETGVPSRFSGSGSGTDFTFTISSLQPEDIATYYCQQYGNLPFTFGGGTKVEIKRLEGQPKANPTVTLFPPSSEELQANKATLVCLISDFYPGAVTVAWKADGSPVKAGVETTKPSKQSNNKYAASSYLSLTPEQWKSHRSYSCQVTHEGSTVEKTVAPTECSGRADCGFTSESYQQGVLSATILYEILLGKATLYAVLVSALVLMAMVKRKDSRGRAKRSGSGVKQTLNFDLLKLAGDVESNPGPTSMDWIWRILFLVGAATGAHSFEQVQLQESGPGLVKPSQTLSLTCTVSGGSISSGGFYWSWIRQHPGKGLEWIGYIHHSGSTHYNPSLKSRVTISIDTSKNLFSLRLSSVTAADTAVYYCASLVYCGGDCYSGFDYWGQGTLVTVSSTRASTKGPSVFPLAPSSKSTSGGTAALGCLVKDYFPEPVTVSWNSGALTSGVHTFPAVLQSSGLYSLSSVVTVPSSSLGTQTYICNVNHKPSNTKVDKRVEPKSCIPEDTFFPSPESSCDVKLVEKSFETDTNLNFQNLSVIGFRILLLKVAGFNLLMTLRLWSS

SEQ ID NO: 14022 - protein, 763 aa, Artificial Sequence
  Synthetic Polypeptide
MALPVTALLLPLALLLHAARPEVQLVESGGGLVQPGGSLRLSCAASGFSFSDFWMSWVRQAPGKGLEWVATISQAGSEKDYVDSVKGRFTISRDNAKKSLYLQMNSLRAEDTAVYYCASGVYSFDYRGQGTLVTVSSGTGGGGSGGGGSGGGGSEFDIQMTQSPSSLSASVGDRVTITCKSSQSVLYSSNQKNYLAWFQQKPGKAPKLLIYWASTRESGVPSRFSGSGSGTDFTLTISSLQPEDFATYFCHQYLSSYTFGQGTKVEIKRLEGQPKANPTVTLFPPSSEELQANKATLVCLISDFYPGAVTVAWKADGSPVKAGVETTKPSKQSNNKYAASSYLSLTPEQWKSHRSYSCQVTHEGSTVEKTVAPTECSGRADCGFTSESYQQGVLSATILYEILLGKATLYAVLVSALVLMAMVKRKDSRGRAKRSGSGVKQTLNFDLLKLAGDVESNPGPTSMDWIWRILFLVGAATGAHSFEEVQLVESGGGLVQPGGSLRLSCAASGYTFTTYWMHWVRQAPGKGLEWVGYIRPSTGYTEYNQKFKDRFTISADTSKNTAYLQMNSLRAEDTAVYYCARSRWLLDYWGQGTLVTVSTRASTKGPSVFPLAPSSKSTSGGTAALGCLVKDYFPEPVTVSWNSGALTSGVHTFPAVLQSSGLYSLSSVVTVPSSSLGTQTYICNVNHKPSNTKVDKRVEPKSCIPEDTFFPSPESSCDVKLVEKSFETDTNLNFQNLSVIGFRILLLKVAGFNLLMTLRLWSS

SEQ ID NO: 14023 - protein, 760 aa, Artificial Sequence
  Synthetic Polypeptide
MALPVTALLLPLALLLHAARPEVQLVESGGGLVQPGGSLRLSCAASGFSFSDFWMSWVRQAPGKGLEWVATISQAGSEKDYVDSVKGRFTISRDNAKKSLYLQMNSLRAEDTAVYYCASGVYSFDYRGQGTLVTVSSGTGGGGSGGGGSGGGGSEFDIQMTQSPSSLSASVGDRVTITCRASQDISNYLNWYQQKPGKAPKLLIYYTSRLHSGVPSRFSGSGSGTDFTLTISSLQPEDFATYYCQQGNTLPYTFGQGTKVEIKRLEGQPKANPTVTLFPPSSEELQANKATLVCLISDFYPGAVTVAWKADGSPVKAGVETTKPSKQSNNKYAASSYLSLTPEQWKSHRSYSCQVTHEGSTVEKTVAPTECSGRADCGFTSESYQQGVLSATILYEILLGKATLYAVLVSALVLMAMVKRKDSRGRAKRSGSGVKQTLNFDLLKLAGDVESNPGPTSMDWIWRILFLVGAATGAHSFEEVQLVESGGGLVQPGGSLRLSCAASGFTFSDYFMSWVRQAPGKGLEWVATISNGGTYTYYPDSVKGRFTISRDNSKNTLYLQMNSLRAEDTAVYYCARFDGYIFDYWGQGTLVTVSSTRASTKGPSVFPLAPSSKSTSGGTAALGCLVKDYFPEPVTVSWNSGALTSGVHTFPAVLQSSGLYSLSSVVTVPSSSLGTQTYICNVNHKPSNTKVDKRVEPKSCIPEDTFFPSPESSCDVKLVEKSFETDTNLNFQNLSVIGFRILLLKVAGFNLLMTLRLWSS

SEQ ID NO: 14024 - protein, 898 aa, Artificial Sequence
  Synthetic Polypeptide
MALPVTALLLPLALLLHAARPEVQLVESGGGLVQPGGSLRLSCAASGFSFSDFWMSWVRQAPGKGLEWVATISQAGSEKDYVDSVKGRFTISRDNAKKSLYLQMNSLRAEDTAVYYCASGVYSFDYRGQGTLVTVSSGTGGGGSGGGGSGGGGSEFDIQMTQTTSSLSASLGDRVTISCRASQDISKYLNWYQQKPDGTVKLLIYHTSRLHSGVPSRFSGSGSGTDYSLTISNLEQEDIATYFCQQGNTLPYTFGGGTKLEITLEGQPKANPTVTLFPPSSEELQANKATLVCLISDFYPGAVTVAWKADGSPVKAGVETTKPSKQSNNKYAASSYLSLTPEQWKSHRSYSCQVTHEGSTVEKTVAPTECSGRADCGFTSESYQQGVLSATILYEILLGKATLYAVLVSALVLMAMVKRKDSRGRAKRSGSGVKQTLNFDLLKLAGDVESNPGPTSMDWIWRILFLVGAATGAHSGPQLQLQESGPGLVKPSETLSLTCTVSGDSISSGDYYWGWIRQPPGKGLEWIGHIYYSGVTYYNPSLKSRVTISVDTSRNQFSLKLSSVTAADTAVYYCTREDSSNWRSRGQGTLVTVSSGSGGGGSGGGGSGGGGSFEVKLQESGPGLVAPSQSLSVTCTVSGVSLPDYGVSWIRQPPRKGLEWLGVIWGSETTYYNSALKSRLTIIKDNSKSQVFLKMNSLQTDDTAIYYCAKHYYYGGSYAMDYWGQGTSVTVSSTRASTKGPSVFPLAPSSKSTSGGTAALGCLVKDYFPEPVTVSWNSGALTSGVHTFPAVLQSSGLYSLSSVVTVPSSSLGTQTYICNVNHKPSNTKVDKRVEPKSCIPEDTFFPSPESSCDVKLVEKSFETDTNLNFQNLSVIGFRILLLKVAGFNLLMTLRLWSS

SEQ ID NO: 14025 - protein, 899 aa, Artificial Sequence
  Synthetic Polypeptide
MALPVTALLLPLALLLHAARPEVQLVESGGGLVQPGGSLRLSCAASGFSFSDFWMSWVRQAPGKGLEWVATISQAGSEKDYVDSVKGRFTISRDNAKKSLYLQMNSLRAEDTAVYYCASGVYSFDYRGQGTLVTVSSGTGGGGSGGGGSGGGGSEFEIVMTQSPATLSLSPGERATLSCRASQDISKYLNWYQQKPGQAPRLLIYHTSRLHSGIPARFSGSGSGTDYTLTISSLQPEDFAVYFCQQGNTLPYTFGQGTKLEIKLEGQPKANPTVTLFPPSSEELQANKATLVCLISDFYPGAVTVAWKADGSPVKAGVETTKPSKQSNNKYAASSYLSLTPEQWKSHRSYSCQVTHEGSTVEKTVAPTECSGRADCGFTSESYQQGVLSATILYEILLGKATLYAVLVSALVLMAMVKRKDSRGRAKRSGSGVKQTLNFDLLKLAGDVESNPGPTSMDWIWRILFLVGAATGAHSGPQLQLQESGPGLVKPSETLSLTCTVSGDSISSGDYYWGWIRQPPGKGLEWIGHIYYSGVTYYNPSLKSRVTISVDTSRNQFSLKLSSVTAADTAVYYCTREDSSNWRSRGQGTLVTVSSGSGGGGSGGGGSGGGGSFEQVQLQESGPGLVKPSETLSLTCTVSGVSLPDYGVSWIRQPPGKGLEWIGVIWGSETTYYNSSLKSRVTISKDNSKNQVSLKLSSVTAADTAVYYCAKHYYYGGSYAMDYWGQGTLVTVSSTRASTKGPSVFPLAPSSKSTSGGTAALGCLVKDYFPEPVTVSWNSGALTSGVHTFPAVLQSSGLYSLSSVVTVPSSSLGTQTYICNVNHKPSNTKVDKRVEPKSCIPEDTFFPSPESSCDVKLVEKSFETDTNLNFQNLSVIGFRILLLKVAGFNLLMTLRLWSS

SEQ ID NO: 14026 - protein, 900 aa, Artificial Sequence
  Synthetic Polypeptide
MALPVTALLLPLALLLHAARPEVQLVESGGGLVQPGGSLRLSCAASGFSFSDFWMSWVRQAPGKGLEWVATISQAGSEKDYVDSVKGRFTISRDNAKKSLYLQMNSLRAEDTAVYYCASGVYSFDYRGQGTLVTVSSGTGGGGSGGGGSGGGGSEFDEIVLTQSPATLSLSPGERATLSCSASSSVSYMHWYQQKPGQAPRLLIYDTSKLASGIPARFSGSGSGTDFTLTISSLEPEDVAVYYCFQGSVYPFTFGQGTKLEIKRLEGQPKANPTVTLFPPSSEELQANKATLVCLISDFYPGAVTVAWKADGSPVKAGVETTKPSKQSNNKYAASSYLSLTPEQWKSHRSYSCQVTHEGSTVEKTVAPTECSGRADCGFTSESYQQGVLSATILYEILLGKATLYAVLVSALVLMAMVKRKDSRGRAKRSGSGVKQTLNFDLLKLAGDVESNPGPTSMDWIWRILFLVGAATGAHSGPQLQLQESGPGLVKPSETLSLTCTVSGDSISSGDYYWGWIRQPPGKGLEWIGHIYYSGVTYYNPSLKSRVTISVDTSRNQFSLKLSSVTAADTAVYYCTREDSSNWRSRGQGTLVTVSSGSGGGGSGGGGSGGGGSFEQVQLQESGPGLVKPSQTLSLTCTVSGGSISTSGMGVGWIRQHPGKGLEWIGHIWWDDDKRYNPALKSRVTISVDTSKNQFSLKLSSVTAADTAVYYCARMELWSYYFDYWGQGTLVTVSSTRASTKGPSVFPLAPSSKSTSGGTAALGCLVKDYFPEPVTVSWNSGALTSGVHTFPAVLQSSGLYSLSSVVTVPSSSLGTQTYICNVNHKPSNTKVDKRVEPKSCIPEDTFFPSPESSCDVKLVEKSFETDTNLNFQNLSVIGFRILLLKVAGFNLLMTLRLWSS

SEQ ID NO: 14027 - protein, 898 aa, Artificial Sequence
  Synthetic Polypeptide
MALPVTALLLPLALLLHAARPEVQLVESGGGLVQPGGSLRLSCAASGFSFSDFWMSWVRQAPGKGLEWVATISQAGSEKDYVDSVKGRFTISRDNAKKSLYLQMNSLRAEDTAVYYCASGVYSFDYRGQGTLVTVSSGTGGGGSGGGGSGGGGSEFDYIHVTQSPSSLSVSIGDRVTINCQTSQGVGSDLHWYQHKPGRAPKLLIHHASSVEDGVPSRFSGTGFHTSFNLTINDLQADDIGTYYCQVLQSFGRGSRLDTKLEGQPKANPTVTLFPPSSEELQANKATLVCLISDFYPGAVTVAWKADGSPVKAGVETTKPSKQSNNKYAASSYLSLTPEQWKSHRSYSCQVTHEGSTVEKTVAPTECSGRADCGFTSESYQQGVLSATILYEILLGKATLYAVLVSALVLMAMVKRKDSRGRAKRSGSGVKQTLNFDLLKLAGDVESNPGPTSMDWIWRILFLVGAATGAHSGPQLQLQESGPGLVKPSETLSLTCTVSGDSISSGDYYWGWIRQPPGKGLEWIGHIYYSGVTYYNPSLKSRVTISVDTSRNQFSLKLSSVTAADTAVYYCTREDSSNWRSRGQGTLVTVSSGSGGGGSGGGGSGGGGSFERAHLVQSGTAMKKPGASVRVSCQTSGYTFTAHILFWFRQAPGRGLEWVGWIKPQYGAVNFGGGFRDRVTLTRDVYREIAYMDIRGLKPDDTAVYYCARDRSYGDSSWALDAWGQGTTVVVSATRASTKGPSVFPLAPSSKSTSGGTAALGCLVKDYFPEPVTVSWNSGALTSGVHTFPAVLQSSGLYSLSSVVTVPSSSLGTQTYICNVNHKPSNTKVDKRVEPKSCIPEDTFFPSPESSCDVKLVEKSFETDTNLNFQNLSVIGFRILLLKVAGFNLLMTLRLWSS

SEQ ID NO: 14028 - protein, 908 aa, Artificial Sequence
  Synthetic Polypeptide
MALPVTALLLPLALLLHAARPEVQLVESGGGLVQPGGSLRLSCAASGFSFSDFWMSWVRQAPGKGLEWVATISQAGSEKDYVDSVKGRFTISRDNAKKSLYLQMNSLRAEDTAVYYCASGVYSFDYRGQGTLVTVSSGTGGGGSGGGGSGGGGSEFDVQMIQTPDSLAVSLGQRATISCRASESVDNYGISFMHWYQQKPGQSPKLLIYRASNLESGIPARFSGSGSRTDFTLTINPVETDDVATYYCQQNNKDPPTFGGGTKLEIKLEGQPKANPTVTLFPPSSEELQANKATLVCLISDFYPGAVTVAWKADGSPVKAGVETTKPSKQSNNKYAASSYLSLTPEQWKSHRSYSCQVTHEGSTVEKTVAPTECSGRADCGFTSESYQQGVLSATILYEILLGKATLYAVLVSALVLMAMVKRKDSRGRAKRSGSGVKQTLNFDLLKLAGDVESNPGPTSMDWIWRILFLVGAATGAHSGPQLQLQESGPGLVKPSETLSLTCTVSGDSISSGDYYWGWIRQPPGKGLEWIGHIYYSGVTYYNPSLKSRVTISVDTSRNQFSLKLSSVTAADTAVYYCTREDSSNWRSRGQGTLVTVSSGSGGGGSGGGGSGGGGSFEGGGGSQVQLQQSGAELVKPGASVKISCKASGYAFSSYWMNWVKQRPGKGLEWIGQIYPGDGDTTYNGKFKGKATLTADKSSSTVYMQLNSLTSEDSAVYFCVRYYYGSSGYFDYWGQGTTLTVSSTRASTKGPSVFPLAPSSKSTSGGTAALGCLVKDYFPEPVTVSWNSGALTSGVHTFPAVLQSSGLYSLSSVVTVPSSSLGTQTYICNVNHKPSNTKVDKRVEPKSCIPEDTFFPSPESSCDVKLVEKSFETDTNLNFQNLSVIGFRILLLKVAGFNLLMTLRLWSS

SEQ ID NO: 14029 - protein, 899 aa, Artificial Sequence
  Synthetic Polypeptide
MALPVTALLLPLALLLHAARPEVQLVESGGGLVQPGGSLRLSCAASGFSFSDFWMSWVRQAPGKGLEWVATISQAGSEKDYVDSVKGRFTISRDNAKKSLYLQMNSLRAEDTAVYYCASGVYSFDYRGQGTLVTVSSGTGGGGSGGGGSGGGGSEFDVQMIQTPSSLSASLGDRVTISCRASQDIGNYLNWYQQKPDGTVKLLIYYTSRLHSGVPSRFSGSGSGTEYSLTISNLEQEDIATYFCQQGSALPPTFGGGTKLEINLEGQPKANPTVTLFPPSSEELQANKATLVCLISDFYPGAVTVAWKADGSPVKAGVETTKPSKQSNNKYAASSYLSLTPEQWKSHRSYSCQVTHEGSTVEKTVAPTECSGRADCGFTSESYQQGVLSATILYEILLGKATLYAVLVSALVLMAMVKRKDSRGRAKRSGSGVKQTLNFDLLKLAGDVESNPGPTSMDWIWRILFLVGAATGAHSGPQLQLQESGPGLVKPSETLSLTCTVSGDSISSGDYYWGWIRQPPGKGLEWIGHIYYSGVTYYNPSLKSRVTISVDTSRNQFSLKLSSVTAADTAVYYCTREDSSNWRSRGQGTLVTVSSGSGGGGSGGGGSGGGGSFEALQLQQSGAELVRPGASVTLSCKASGYTFTDYEMHWVKQTPVHGLEWIGAIDPETGGTAYNQKFEGKAILTADKSSSTAYMELRSLTSEDSPVYYCARRRYYGSSSFDYWGQGTTLTVSSTRASTKGPSVFPLAPSSKSTSGGTAALGCLVKDYFPEPVTVSWNSGALTSGVHTFPAVLQSSGLYSLSSVVTVPSSSLGTQTYICNVNHKPSNTKVDKRVEPKSCIPEDTFFPSPESSCDVKLVEKSFETDTNLNFQNLSVIGFRILLLKVAGFNLLMTLRLWSS

SEQ ID NO: 14030 - protein, 903 aa, Artificial Sequence
  Synthetic Polypeptide
MALPVTALLLPLALLLHAARPEVQLVESGGGLVQPGGSLRLSCAASGFSFSDFWMSWVRQAPGKGLEWVATISQAGSEKDYVDSVKGRFTISRDNAKKSLYLQMNSLRAEDTAVYYCASGVYSFDYRGQGTLVTVSSGTGGGGSGGGGSGGGGSEFDIVLTQSPASLAVSLGQRATISCRASKSVSTSGYSYLHWYQQKPGQPPKLLIYLASNLESGVPARFSGSGSGTDFTLNIHPVEEEDAATYYCQHSRELPFTFGSGTKLEIKLEGQPKANPTVTLFPPSSEELQANKATLVCLISDFYPGAVTVAWKADGSPVKAGVETTKPSKQSNNKYAASSYLSLTPEQWKSHRSYSCQVTHEGSTVEKTVAPTECSGRADCGFTSESYQQGVLSATILYEILLGKATLYAVLVSALVLMAMVKRKDSRGRAKRSGSGVKQTLNFDLLKLAGDVESNPGPTSMDWIWRILFLVGAATGAHSGPQLQLQESGPGLVKPSETLSLTCTVSGDSISSGDYYWGWIRQPPGKGLEWIGHIYYSGVTYYNPSLKSRVTISVDTSRNQFSLKLSSVTAADTAVYYCTREDSSNWRSRGQGTLVTVSSGSGGGGSGGGGSGGGGSFEQVQLVESGGGLVQPGGSLKLSCAASGFDFSRYWMSWVRQAPGKGLEWIGEINPTSSTINFTPSLKDKVFISRDNAKNTLYLQMSKVRSEDTALYYCARGNYYRYGDAMDYWGQGTSVTVSTRASTKGPSVFPLAPSSKSTSGGTAALGCLVKDYFPEPVTVSWNSGALTSGVHTFPAVLQSSGLYSLSSVVTVPSSSLGTQTYICNVNHKPSNTKVDKRVEPKSCIPEDTFFPSPESSCDVKLVEKSFETDTNLNFQNLSVIGFRILLLKVAGFNLLMTLRLWSS

SEQ ID NO: 14031 - protein, 901 aa, Artificial Sequence
  Synthetic Polypeptide
MALPVTALLLPLALLLHAARPEVQLVESGGGLVQPGGSLRLSCAASGFSFSDFWMSWVRQAPGKGLEWVATISQAGSEKDYVDSVKGRFTISRDNAKKSLYLQMNSLRAEDTAVYYCASGVYSFDYRGQGTLVTVSSGTGGGGSGGGGSGGGGSEFDIQMTQSPSSLSASVGDRVTITCSASQDISNYLNWYQQKPGKAPKLLIYYTSNLHSGVPSRFSGSGSGTDFTLTISSLQPEDFATYYCQQYRKLPWTFGQGTKLEIKRLEGQPKANPTVTLFPPSSEELQANKATLVCLISDFYPGAVTVAWKADGSPVKAGVETTKPSKQSNNKYAASSYLSLTPEQWKSHRSYSCQVTHEGSTVEKTVAPTECSGRADCGFTSESYQQGVLSATILYEILLGKATLYAVLVSALVLMAMVKRKDSRGRAKRSGSGVKQTLNFDLLKLAGDVESNPGPTSMDWIWRILFLVGAATGAHSGPQLQLQESGPGLVKPSETLSLTCTVSGDSISSGDYYWGWIRQPPGKGLEWIGHIYYSGVTYYNPSLKSRVTISVDTSRNQFSLKLSSVTAADTAVYYCTREDSSNWRSRGQGTLVTVSSGSGGGGSGGGGSGGGGSFEQVQLVQSGAEVKKPGSSVKVSCKASGGTFSNYWMHWVRQAPGQGLEWMGATYRGHSDTYYNQKFKGRVTITADKSTSTAYMELSSLRSEDTAVYYCARGAIYDGYDVLDNWGQGTLVTVSSTRASTKGPSVFPLAPSSKSTSGGTAALGCLVKDYFPEPVTVSWNSGALTSGVHTFPAVLQSSGLYSLSSVVTVPSSSLGTQTYICNVNHKPSNTKVDKRVEPKSCIPEDTFFPSPESSCDVKLVEKSFETDTNLNFQNLSVIGFRILLLKVAGFNLLMTLRLWSS

SEQ ID NO: 14032 - protein, 901 aa, Artificial Sequence
  Synthetic Polypeptide
MALPVTALLLPLALLLHAARPEVQLVESGGGLVQPGGSLRLSCAASGFSFSDFWMSWVRQAPGKGLEWVATISQAGSEKDYVDSVKGRFTISRDNAKKSLYLQMNSLRAEDTAVYYCASGVYSFDYRGQGTLVTVSSGTGGGGSGGGGSGGGGSEFDIVLTQSPATLSLSPGDRATISCRASESVTILGSHLIYWYQQKPGQPPRLLIQLASNVQTGVPARFSGSGSRTDFTLTISSVEPEDFAVYYCLQSRTIPRTFGQGTKLEIKRLEGQPKANPTVTLFPPSSEELQANKATLVCLISDFYPGAVTVAWKADGSPVKAGVETTKPSKQSNNKYAASSYLSLTPEQWKSHRSYSCQVTHEGSTVEKTVAPTECSGRADCGFTSESYQQGVLSATILYEILLGKATLYAVLVSALVLMAMVKRKDSRGRAKRSGSGVKQTLNFDLLKLAGDVESNPGPTSMDWIWRILFLVGAATGAHSGPQLQLQESGPGLVKPSETLSLTCTVSGDSISSGDYYWGWIRQPPGKGLEWIGHIYYSGVTYYNPSLKSRVTISVDTSRNQFSLKLSSVTAADTAVYYCTREDSSNWRSRGQGTLVTVSSGSGGGGSGGGGSGGGGSFEQVQLVQSGPEVKKPGESVKISCKASGYTFRHYSMNWVKQAPGQGLKWMGRINTESGVPIYADDFKGRFSFTVDTSASTAYLEISSLTSEDTAVYFCSNDYLYSLDFWGQGTTLTVSSTRASTKGPSVFPLAPSSKSTSGGTAALGCLVKDYFPEPVTVSWNSGALTSGVHTFPAVLQSSGLYSLSSVVTVPSSSLGTQTYICNVNHKPSNTKVDKRVEPKSCIPEDTFFPSPESSCDVKLVEKSFETDTNLNFQNLSVIGFRILLLKVAGFNLLMTLRLWSS

SEQ ID NO: 14033 - protein, 902 aa, Artificial Sequence
  Synthetic Polypeptide
MALPVTALLLPLALLLHAARPEVQLVESGGGLVQPGGSLRLSCAASGFSFSDFWMSWVRQAPGKGLEWVATISQAGSEKDYVDSVKGRFTISRDNAKKSLYLQMNSLRAEDTAVYYCASGVYSFDYRGQGTLVTVSSGTGGGGSGGGGSGGGGSEFQSVLTQPPSVSGAPGQRVTISCTGSSSNIGAGFDVHWYQQLPGTAPKLLIYGNSNRPSGVPDRFSGSKSGTSASLAITGLQAEDEADYYCQSYDSSLSGYVFGTGTKVTVLGLEGQPKANPTVTLFPPSSEELQANKATLVCLISDFYPGAVTVAWKADGSPVKAGVETTKPSKQSNNKYAASSYLSLTPEQWKSHRSYSCQVTHEGSTVEKTVAPTECSGRADCGFTSESYQQGVLSATILYEILLGKATLYAVLVSALVLMAMVKRKDSRGRAKRSGSGVKQTLNFDLLKLAGDVESNPGPTSMDWIWRILFLVGAATGAHSGPQLQLQESGPGLVKPSETLSLTCTVSGDSISSGDYYWGWIRQPPGKGLEWIGHIYYSGVTYYNPSLKSRVTISVDTSRNQFSLKLSSVTAADTAVYYCTREDSSNWRSRGQGTLVTVSSGSGGGGSGGGGSGGGGSFEQVQLVQSGAEVKKPGASVKVSCKASGYTFTDYYMHWVRQAPGQRLEWMGWINPNSGGTNYAQKFQDRITVTRDTSSNTGYMELTRLRSDDTAVYYCARSPYSGVLDKWGQGTLVTVSSTRASTKGPSVFPLAPSSKSTSGGTAALGCLVKDYFPEPVTVSWNSGALTSGVHTFPAVLQSSGLYSLSSVVTVPSSSLGTQTYICNVNHKPSNTKVDKRVEPKSCIPEDTFFPSPESSCDVKLVEKSFETDTNLNFQNLSVIGFRILLLKVAGFNLLMTLRLWSS

SEQ ID NO: 14034 - protein, 899 aa, Artificial Sequence
  Synthetic Polypeptide
MALPVTALLLPLALLLHAARPEVQLVESGGGLVQPGGSLRLSCAASGFSFSDFWMSWVRQAPGKGLEWVATISQAGSEKDYVDSVKGRFTISRDNAKKSLYLQMNSLRAEDTAVYYCASGVYSFDYRGQGTLVTVSSGTGGGGSGGGGSGGGGSEFQAVLTQPPSASGTPGQRVTISCSGSSSNIGSYTVSWYQQLPGTAPKFLIYSNNQRPSGVPDRFSGSKSGTSASLAISGLQSEDEADYYCAAWDDSLNGYVFGTGTKVTVLGLEGQPKANPTVTLFPPSSEELQANKATLVCLISDFYPGAVTVAWKADGSPVKAGVETTKPSKQSNNKYAASSYLSLTPEQWKSHRSYSCQVTHEGSTVEKTVAPTECSGRADCGFTSESYQQGVLSATILYEILLGKATLYAVLVSALVLMAMVKRKDSRGRAKRSGSGVKQTLNFDLLKLAGDVESNPGPTSMDWIWRILFLVGAATGAHSGPQLQLQESGPGLVKPSETLSLTCTVSGDSISSGDYYWGWIRQPPGKGLEWIGHIYYSGVTYYNPSLKSRVTISVDTSRNQFSLKLSSVTAADTAVYYCTREDSSNWRSRGQGTLVTVSSGSGGGGSGGGGSGGGGSFEVQLVQSGAEVKKPGESLKISCKGSGYDFTTYWIGWVRQMPGKGLEWMGIIYPGDSDTRYSPSVRGRVTISADKSINTAYLQWSSLEASDTAMYYCARMWTFSQDGWGQGTLVTVSSTRASTKGPSVFPLAPSSKSTSGGTAALGCLVKDYFPEPVTVSWNSGALTSGVHTFPAVLQSSGLYSLSSVVTVPSSSLGTQTYICNVNHKPSNTKVDKRVEPKSCIPEDTFFPSPESSCDVKLVEKSFETDTNLNFQNLSVIGFRILLLKVAGFNLLMTLRLWSS

SEQ ID NO: 14035 - protein, 902 aa, Artificial Sequence
  Synthetic Polypeptide
MALPVTALLLPLALLLHAARPEVQLVESGGGLVQPGGSLRLSCAASGFSFSDFWMSWVRQAPGKGLEWVATISQAGSEKDYVDSVKGRFTISRDNAKKSLYLQMNSLRAEDTAVYYCASGVYSFDYRGQGTLVTVSSGTGGGGSGGGGSGGGGSEFDIVMTQSPDSLAVSLGERATINCKSSQSILYSSNQKNYLAWYQQKPGQSPKLLIYWASTRESGVPDRFSGSGSGTDFTLTISSLQAEDVAVYYCHQYISSYTFGQGTKLEIKLEGQPKANPTVTLFPPSSEELQANKATLVCLISDFYPGAVTVAWKADGSPVKAGVETTKPSKQSNNKYAASSYLSLTPEQWKSHRSYSCQVTHEGSTVEKTVAPTECSGRADCGFTSESYQQGVLSATILYEILLGKATLYAVLVSALVLMAMVKRKDSRGRAKRSGSGVKQTLNFDLLKLAGDVESNPGPTSMDWIWRILFLVGAATGAHSGPQLQLQESGPGLVKPSETLSLTCTVSGDSISSGDYYWGWIRQPPGKGLEWIGHIYYSGVTYYNPSLKSRVTISVDTSRNQFSLKLSSVTAADTAVYYCTREDSSNWRSRGQGTLVTVSSGSGGGGSGGGGSGGGGSFEQVQLVQSGAEVKKPGASVKVSCKASGYTFASQWMHWMRQAPGQGLEWIGWINPGNVNTKYNEKFKGRATLTVDTSTNTAYMELSSLRSEDTAVYYCARSTWYRPLDYWGQGTLVTVSSTRASTKGPSVFPLAPSSKSTSGGTAALGCLVKDYFPEPVTVSWNSGALTSGVHTFPAVLQSSGLYSLSSVVTVPSSSLGTQTYICNVNHKPSNTKVDKRVEPKSCIPEDTFFPSPESSCDVKLVEKSFETDTNLNFQNLSVIGFRILLLKVAGFNLLMTLRLWSS

SEQ ID NO: 14036 - protein, 902 aa, Artificial Sequence
  Synthetic Polypeptide
MALPVTALLLPLALLLHAARPEVQLVESGGGLVQPGGSLRLSCAASGFSFSDFWMSWVRQAPGKGLEWVATISQAGSEKDYVDSVKGRFTISRDNAKKSLYLQMNSLRAEDTAVYYCASGVYSFDYRGQGTLVTVSSGTGGGGSGGGGSGGGGSEFDHIVLTQSPSSLSASLGDRVTISCRASQDISTYLNWYQQKPDGTVKLLIFYTSRLHAGVPSRFSGSGSGTHHSLTISNLEQEDIATYFCQQGNSLPFTFGSGTKLEIKRLEGQPKANPTVTLFPPSSEELQANKATLVCLISDFYPGAVTVAWKADGSPVKAGVETTKPSKQSNNKYAASSYLSLTPEQWKSHRSYSCQVTHEGSTVEKTVAPTECSGRADCGFTSESYQQGVLSATILYEILLGKATLYAVLVSALVLMAMVKRKDSRGRAKRSGSGVKQTLNFDLLKLAGDVESNPGPTSMDWIWRILFLVGAATGAHSGPQLQLQESGPGLVKPSETLSLTCTVSGDSISSGDYYWGWIRQPPGKGLEWIGHIYYSGVTYYNPSLKSRVTISVDTSRNQFSLKLSSVTAADTAVYYCTREDSSNWRSRGQGTLVTVSSGSGGGGSGGGGSGGGGSFEQVQLKESGPELEKPGASVKISCKASGYSFTAYSMNWVKQNNGMSLEWIGSIDPYYGDTKYAQKFKGKATLTVDKASSTAYLQLKSLTSEDSAVYYCARRMITTGDWYFDVWGAGTTVTVSSTRASTKGPSVFPLAPSSKSTSGGTAALGCLVKDYFPEPVTVSWNSGALTSGVHTFPAVLQSSGLYSLSSVVTVPSSSLGTQTYICNVNHKPSNTKVDKRVEPKSCIPEDTFFPSPESSCDVKLVEKSFETDTNLNFQNLSVIGFRILLLKVAGFNLLMTLRLWSS

SEQ ID NO: 14037 - protein, 902 aa, Artificial Sequence; identical to SEQ ID NO: 14036
  Synthetic Polypeptide

SEQ ID NO: 14038 - protein, 902 aa, Artificial Sequence
  Synthetic Polypeptide
MALPVTALLLPLALLLHAARPEVQLVESGGGLVQPGGSLRLSCAASGFSFSDFWMSWVRQAPGKGLEWVATISQAGSEKDYVDSVKGRFTISRDNAKKSLYLQMNSLRAEDTAVYYCASGVYSFDYRGQGTLVTVSSGTGGGGSGGGGSGGGGSEFDEIVLTQSPATLSLSPGERATLSCRASQSVSSYLAWYQQKPGQAPRLLIYDASNRATGIPARFSGSGSGTDFTLTISSLEPEDFAVYYCQQRSNWPITFGQGTRLEIKLEGQPKANPTVTLFPPSSEELQANKATLVCLISDFYPGAVTVAWKADGSPVKAGVETTKPSKQSNNKYAASSYLSLTPEQWKSHRSYSCQVTHEGSTVEKTVAPTECSGRADCGFTSESYQQGVLSATILYEILLGKATLYAVLVSALVLMAMVKRKDSRGRAKRSGSGVKQTLNFDLLKLAGDVESNPGPTSMDWIWRILFLVGAATGAHSGPQLQLQESGPGLVKPSETLSLTCTVSGDSISSGDYYWGWIRQPPGKGLEWIGHIYYSGVTYYNPSLKSRVTISVDTSRNQFSLKLSSVTAADTAVYYCTREDSSNWRSRGQGTLVTVSSGSGGGGSGGGGSGGGGSFEEVQLVESGGGLVQPGRSLRLSCAASGFTFNDYAMHWVRQAPGKGLEWVSTISWNSGSIGYADSVKGRFTISRDNAKKSLYLQMNSLRAEDTALYYCAKDIQYGNYYYGMDVWGQGTTVTVSSTRASTKGPSVFPLAPSSKSTSGGTAALGCLVKDYFPEPVTVSWNSGALTSGVHTFPAVLQSSGLYSLSSVVTVPSSSLGTQTYICNVNHKPSNTKVDKRVEPKSCIPEDTFFPSPESSCDVKLVEKSFETDTNLNFQNLSVIGFRILLLKVAGFNLLMTLRLWSS

SEQ ID NO: 14039 - protein, 904 aa, Artificial Sequence
  Synthetic Polypeptide
MALPVTALLLPLALLLHAARPEVQLVESGGGLVQPGGSLRLSCAASGFSFSDFWMSWVRQAPGKGLEWVATISQAGSEKDYVDSVKGRFTISRDNAKKSLYLQMNSLRAEDTAVYYCASGVYSFDYRGQGTLVTVSSGTGGGGSGGGGSGGGGSEFDIVMTQTPLSLPVTPGEPASISCRSSKSLLHSNGITYLYWYLQKPGQSPQLLIYQMSNLVSGVPDRFSGSGSGTDFTLKISRVEAEDVGVYYCAQNLELPYTFGGGTKVEIKRLEGQPKANPTVTLFPPSSEELQANKATLVCLISDFYPGAVTVAWKADGSPVKAGVETTKPSKQSNNKYAASSYLSLTPEQWKSHRSYSCQVTHEGSTVEKTVAPTECSGRADCGFTSESYQQGVLSATILYEILLGKATLYAVLVSALVLMAMVKRKDSRGRAKRSGSGVKQTLNFDLLKLAGDVESNPGPTSMDWIWRILFLVGAATGAHSGPQLQLQESGPGLVKPSETLSLTCTVSGDSISSGDYYWGWIRQPPGKGLEWIGHIYYSGVTYYNPSLKSRVTISVDTSRNQFSLKLSSVTAADTAVYYCTREDSSNWRSRGQGTLVTVSSGSGGGGSGGGGSGGGGSFEQVQLVQSGAEVKKPGSSVKVSCKASGYAFSYSWINWVRQAPGQGLEWMGRIFPGDGDTDYNGKFKGRVTITADKSTSTAYMELSSLRSEDTAVYYCARNVFDGYWLVYWGQGTLVTVSSTRASTKGPSVFPLAPSSKSTSGGTAALGCLVKDYFPEPVTVSWNSGALTSGVHTFPAVLQSSGLYSLSSVVTVPSSSLGTQTYICNVNHKPSNTKVDKRVEPKSCIPEDTFFPSPESSCDVKLVEKSFETDTNLNFQNLSVIGFRILLLKVAGFNLLMTLRLWSS

SEQ ID NO: 14040 - protein, 905 aa, Artificial Sequence
  Synthetic Polypeptide
MALPVTALLLPLALLLHAARPEVQLVESGGGLVQPGGSLRLSCAASGFSFSDFWMSWVRQAPGKGLEWVATISQAGSEKDYVDSVKGRFTISRDNAKKSLYLQMNSLRAEDTAVYYCASGVYSFDYRGQGTLVTVSSGTGGGGSGGGGSGGGGSEFDIQMTQSPSSLSASVGDRVTITCRSSQSIVHSVGNTFLEWYQQKPGKAPKLLIYKVSNRFSGVPSRFSGSGSGTDFTLTISSLQPEDFATYYCFQGSQFPYTFGQGTKVEIKRLEGQPKANPTVTLFPPSSEELQANKATLVCLISDFYPGAVTVAWKADGSPVKAGVETTKPSKQSNNKYAASSYLSLTPEQWKSHRSYSCQVTHEGSTVEKTVAPTECSGRADCGFTSESYQQGVLSATILYEILLGKATLYAVLVSALVLMAMVKRKDSRGRAKRSGSGVKQTLNFDLLKLAGDVESNPGPTSMDWIWRILFLVGAATGAHSGPQLQLQESGPGLVKPSETLSLTCTVSGDSISSGDYYWGWIRQPPGKGLEWIGHIYYSGVTYYNPSLKSRVTISVDTSRNQFSLKLSSVTAADTAVYYCTREDSSNWRSRGQGTLVTVSSGSGGGGSGGGGSGGGGSFEEVQLVESGGGLVQPGGSLRLSCAASGYEFSRSWMNWVRQAPGKGLEWVGRIYPGDGDTNYSGKFKGRFTISADTSKNTAYLQMNSLRAEDTAVYYCARDGSSWDWYFDVWGQGTLVTVSSTRASTKGPSVFPLAPSSKSTSGGTAALGCLVKDYFPEPVTVSWNSGALTSGVHTFPAVLQSSGLYSLSSVVTVPSSSLGTQTYICNVNHKPSNTKVDKRVEPKSCIPEDTFFPSPESSCDVKLVEKSFETDTNLNFQNLSVIGFRILLLKVAGFNLLMTLRLWSS

SEQ ID NO: 14041 - protein, 903 aa, Artificial Sequence
  Synthetic Polypeptide
MALPVTALLLPLALLLHAARPEVQLVESGGGLVQPGGSLRLSCAASGFSFSDFWMSWVRQAPGKGLEWVATISQAGSEKDYVDSVKGRFTISRDNAKKSLYLQMNSLRAEDTAVYYCASGVYSFDYRGQGTLVTVSSGTGGGGSGGGGSGGGGSEFDIQMTQSPSSLSASVGDRVTITCRASQTIWSYLNWYQQRPGKAPNLLIYAASSLQSGVPSRFSGRGSGTDFTLTISSLQAEDFATYYCQQSYSIPQIFGQGTKLEIKLEGQPKANPTVTLFPPSSEELQANKATLVCLISDFYPGAVTVAWKADGSPVKAGVETTKPSKQSNNKYAASSYLSLTPEQWKSHRSYSCQVTHEGSTVEKTVAPTECSGRADCGFTSESYQQGVLSATILYEILLGKATLYAVLVSALVLMAMVKRKDSRGRAKRSGSGVKQTLNFDLLKLAGDVESNPGPTSMDWIWRILFLVGAATGAHSGPQLQLQESGPGLVKPSETLSLTCTVSGDSISSGDYYWGWIRQPPGKGLEWIGHIYYSGVTYYNPSLKSRVTISVDTSRNQFSLKLSSVTAADTAVYYCTREDSSNWRSRGQGTLVTVSSGSGGGGSGGGGSGGGGSFEQVQLQQSGPGLVKPSQTLSLTCAISGDSVSSNSAAWNWIRQSPSRGLEWLGRTYYRSKWYNDYAVSVKSRITINPDTSKNQFSLQLNSVTPEDTAVYYCAREVTGDLEDAFDIWGQGTMVTVSSTRASTKGPSVFPLAPSSKSTSGGTAALGCLVKDYFPEPVTVSWNSGALTSGVHTFPAVLQSSGLYSLSSVVTVPSSSLGTQTYICNVNHKPSNTKVDKRVEPKSCIPEDTFFPSPESSCDVKLVEKSFETDTNLNFQNLSVIGFRILLLKVAGFNLLMTLRLWSS

SEQ ID NO: 14042 - protein, 896 aa, Artificial Sequence
  Synthetic Polypeptide
MALPVTALLLPLALLLHAARPEVQLVESGGGLVQPGGSLRLSCAASGFSFSDFWMSWVRQAPGKGLEWVATISQAGSEKDYVDSVKGRFTISRDNAKKSLYLQMNSLRAEDTAVYYCASGVYSFDYRGQGTLVTVSSGTGGGGSGGGGSGGGGSEFDIQMTQSPATIENTSLSASVGDRVTITCRASQGISSWLTWYQQKPEKAPKSLIYAASSLQSGVPSRFSGSGSGTDFTLTISSLQPEDFATYYCQQYDSYPITFGQGTRLEIKLEGQPKANPTVTLFPPSSEELQANKATLVCLISDFYPGAVTVAWKADGSPVKAGVETTKPSKQSNNKYAASSYLSLTPEQWKSHRSYSCQVTHEGSTVEKTVAPTECSGRADCGFTSESYQQGVLSATILYEILLGKATLYAVLVSALVLMAMVKRKDSRGRAKRSGSGVKQTLNFDLLKLAGDVESNPGPTSMDWIWRILFLVGAATGAHSGPQLQLQESGPGLVKPSETLSLTCTVSGDSISSGDYYWGWIRQPPGKGLEWIGHIYYSGVTYYNPSLKSRVTISVDTSRNQFSLKLSSVTAADTAVYYCTREDSSNWRSRGQGTLVTVSSGSGGGGSGGGGSGGGGSFEQVQLQQWGAGLLKPSETLSLTCAVYGGSFSAYYWSWIRQPPGKGLEWIGDINHGGGTNYNPSLKSRVTISVDTSKNQFSLKLNSVTAADTAVYYCASLTAYWGQGSLVTVSSTRASTKGPSVFPLAPSSKSTSGGTAALGCLVKDYFPEPVTVSWNSGALTSGVHTFPAVLQSSGLYSLSSVVTVPSSSLGTQTYICNVNHKPSNTKVDKRVEPKSCIPEDTFFPSPESSCDVKLVEKSFETDTNLNFQNLSVIGFRILLLKVAGFNLLMTLRLWSS

SEQ ID NO: 14043 - protein, 901 aa, Artificial Sequence
  Synthetic Polypeptide
MALPVTALLLPLALLLHAARPEVQLVESGGGLVQPGGSLRLSCAASGFSFSDFWMSWVRQAPGKGLEWVATISQAGSEKDYVDSVKGRFTISRDNAKKSLYLQMNSLRAEDTAVYYCASGVYSFDYRGQGTLVTVSSGTGGGGSGGGGSGGGGSEFDEIVLTQSPDSLAVSLGERATINCKASQSVDFDGDSYLNWYQQKPGQPPKVLIYAASTLQSGVPSRFSGSGSGTDFTLTINSLEAEDAATYYCQQSNEDPWTFGGGTKVEIKLEGQPKANPTVTLFPPSSEELQANKATLVCLISDFYPGAVTVAWKADGSPVKAGVETTKPSKQSNNKYAASSYLSLTPEQWKSHRSYSCQVTHEGSTVEKTVAPTECSGRADCGFTSESYQQGVLSATILYEILLGKATLYAVLVSALVLMAMVKRKDSRGRAKRSGSGVKQTLNFDLLKLAGDVESNPGPTSMDWIWRILFLVGAATGAHSGPQLQLQESGPGLVKPSETLSLTCTVSGDSISSGDYYWGWIRQPPGKGLEWIGHIYYSGVTYYNPSLKSRVTISVDTSRNQFSLKLSSVTAADTAVYYCTREDSSNWRSRGQGTLVTVSSGSGGGGSGGGGSGGGGSFEQVQLVQSGAEVKKPGASVKVSCKVSGYTFTDYYITWVRQAPGQALEWMGWIYPGSGNTKYSQKFQGRFVFSVDTSASTAYLQLSSLKAEDTAVYYCANYGNYWFAYWGQGTLVTVSSTRASTKGPSVFPLAPSSKSTSGGTAALGCLVKDYFPEPVTVSWNSGALTSGVHTFPAVLQSSGLYSLSSVVTVPSSSLGTQTYICNVNHKPSNTKVDKRVEPKSCIPEDTFFPSPESSCDVKLVEKSFETDTNLNFQNLSVIGFRILLLKVAGFNLLMTLRLWSS

SEQ ID NO: 14044 - protein, 898 aa, Artificial Sequence
  Synthetic Polypeptide
MALPVTALLLPLALLLHAARPEVQLVESGGGLVQPGGSLRLSCAASGFSFSDFWMSWVRQAPGKGLEWVATISQAGSEKDYVDSVKGRFTISRDNAKKSLYLQMNSLRAEDTAVYYCASGVYSFDYRGQGTLVTVSSGTGGGGSGGGGSGGGGSEFDIQMTQSPSSLSASVGDRVTITCRASQGISSWLAWYQQKPEKAPKSLIYAASSLQSGVPSRFSGSGSGTDFTLTISSLQPEDFATYYCQQYNSYPPTFGGGTKVEIKLEGQPKANPTVTLFPPSSEELQANKATLVCLISDFYPGAVTVAWKADGSPVKAGVETTKPSKQSNNKYAASSYLSLTPEQWKSHRSYSCQVTHEGSTVEKTVAPTECSGRADCGFTSESYQQGVLSATILYEILLGKATLYAVLVSALVLMAMVKRKDSRGRAKRSGSGVKQTLNFDLLKLAGDVESNPGPTSMDWIWRILFLVGAATGAHSGPQLQLQESGPGLVKPSETLSLTCTVSGDSISSGDYYWGWIRQPPGKGLEWIGHIYYSGVTYYNPSLKSRVTISVDTSRNQFSLKLSSVTAADTAVYYCTREDSSNWRSRGQGTLVTVSSGSGGGGSGGGGSGGGGSFEEVQLVQSGGGLVHPGGSLRLSCAGSGFAFSSSTMHWIRQAPGKGLEWISLIGSGGGIYYGDSVKGRFTISRDNAKNSLYLQMNSLRAEDMAVYYCVRGYFDWVDYFDYWGQGTLVTVSSTRASTKGPSVFPLAPSSKSTSGGTAALGCLVKDYFPEPVTVSWNSGALTSGVHTFPAVLQSSGLYSLSSVVTVPSSSLGTQTYICNVNHKPSNTKVDKRVEPKSCIPEDTFFPSPESSCDVKLVEKSFETDTNLNFQNLSVIGFRILLLKVAGFNLLMTLRLWSS

SEQ ID NO: 14045 - protein, 908 aa, Artificial Sequence
  Synthetic Polypeptide
MALPVTALLLPLALLLHAARPEVQLVESGGGLVQPGGSLRLSCAASGFSFSDFWMSWVRQAPGKGLEWVATISQAGSEKDYVDSVKGRFTISRDNAKKSLYLQMNSLRAEDTAVYYCASGVYSFDYRGQGTLVTVSSGTGGGGSGGGGSGGGGSEFDDIVMTQSPDSLTVSLGERTTINCKSSQSVLDSSKNKNSLAWYQQKPGQPPKLLLSWASTRESGIPDRFSGSGSGTDFTLTIDSLQPEDSATYYCQQSAHFPITFGQGTRLEIKLEGQPKANPTVTLFPPSSEELQANKATLVCLISDFYPGAVTVAWKADGSPVKAGVETTKPSKQSNNKYAASSYLSLTPEQWKSHRSYSCQVTHEGSTVEKTVAPTECSGRADCGFTSESYQQGVLSATILYEILLGKATLYAVLVSALVLMAMVKRKDSRGRAKRSGSGVKQTLNFDLLKLAGDVESNPGPTSMDWIWRILFLVGAATGAHSGPQLQLQESGPGLVKPSETLSLTCTVSGDSISSGDYYWGWIRQPPGKGLEWIGHIYYSGVTYYNPSLKSRVTISVDTSRNQFSLKLSSVTAADTAVYYCTREDSSNWRSRGQGTLVTVSSGSGGGGSGGGGSGGGGSFEQVQLVQSGAEVKKPGASVKVSCKASGYTFTNYGMNWVKQAPGQGLKWMGWINTYTGEPTYADDFKGRVTMTSDTSTSTAYLELHNLRSDDTAVYYCARWSWSDGYYVYFDYWGQGTTVTVSSTRASTKGPSVFPLAPSSKSTSGGTAALGCLVKDYFPEPVTVSWNSGALTSGVHTFPAVLQSSGLYSLSSVVTVPSSSLGTQTYICNVNHKPSNTKVDKRVEPKSCIPEDTFFPSPESSCDVKLVEKSFETDTNLNFQNLSVIGFRILLLKVAGFNLLMTLRLWSS

SEQ ID NO: 14046 - protein, 904 aa, Artificial Sequence
  Synthetic Polypeptide
MALPVTALLLPLALLLHAARPEVQLVESGGGLVQPGGSLRLSCAASGFSFSDFWMSWVRQAPGKGLEWVATISQAGSEKDYVDSVKGRFTISRDNAKKSLYLQMNSLRAEDTAVYYCASGVYSFDYRGQGTLVTVSSGTGGGGSGGGGSGGGGSEFDEIVLTQSPGSLAVSPGERVTMSCKSSQSVFFSSSQKNYLAWYQQIPGQSPRLLIYWASTRESGVPDRFTGSGSGTDFTLTISSVQPEDLAIYYCHQYLSSRTFGQGTKLEIKRLEGQPKANPTVTLFPPSSEELQANKATLVCLISDFYPGAVTVAWKADGSPVKAGVETTKPSKQSNNKYAASSYLSLTPEQWKSHRSYSCQVTHEGSTVEKTVAPTECSGRADCGFTSESYQQGVLSATILYEILLGKATLYAVLVSALVLMAMVKRKDSRGRAKRSGSGVKQTLNFDLLKLAGDVESNPGPTSMDWIWRILFLVGAATGAHSGPQLQLQESGPGLVKPSETLSLTCTVSGDSISSGDYYWGWIRQPPGKGLEWIGHIYYSGVTYYNPSLKSRVTISVDTSRNQFSLKLSSVTAADTAVYYCTREDSSNWRSRGQGTLVTVSSGSGGGGSGGGGSGGGGSFEQVQLQQPGAEVVKPGASVKMSCKASGYTFTSYYIHWIKQTPGQGLEWVGVIYPGNDDISYNQKFQGKATLTADKSSTTAYMQLSSLTSEDSAVYYCAREVRLRYFDVWGQGTTVTVSSTRASTKGPSVFPLAPSSKSTSGGTAALGCLVKDYFPEPVTVSWNSGALTSGVHTFPAVLQSSGLYSLSSVVTVPSSSLGTQTYICNVNHKPSNTKVDKRVEPKSCIPEDTFFPSPESSCDVKLVEKSFETDTNLNFQNLSVIGFRILLLKVAGFNLLMTLRLWSS

SEQ ID NO: 14047 - protein, 908 aa, Artificial Sequence
  Synthetic Polypeptide
MALPVTALLLPLALLLHAARPEVQLVESGGGLVQPGGSLRLSCAASGFSFSDFWMSWVRQAPGKGLEWVATISQAGSEKDYVDSVKGRFTISRDNAKKSLYLQMNSLRAEDTAVYYCASGVYSFDYRGQGTLVTVSSGTGGGGSGGGGSGGGGSEFDVLLTQSPLSLPVTLGQPASISCRSSQTIVHSNGNTYLEWFQQRPGQSPRLLIYQVSNRFSGVPDRFSGSGSGTDFTLKISRVEAEDVGVYYCFQGSHVPRTFGGGTKVEIKRALEGQPKANPTVTLFPPSSEELQANKATLVCLISDFYPGAVTVAWKADGSPVKAGVETTKPSKQSNNKYAASSYLSLTPEQWKSHRSYSCQVTHEGSTVEKTVAPTECSGRADCGFTSESYQQGVLSATILYEILLGKATLYAVLVSALVLMAMVKRKDSRGRAKRSGSGVKQTLNFDLLKLAGDVESNPGPTSMDWIWRILFLVGAATGAHSGPQLQLQESGPGLVKPSETLSLTCTVSGDSISSGDYYWGWIRQPPGKGLEWIGHIYYSGVTYYNPSLKSRVTISVDTSRNQFSLKLSSVTAADTAVYYCTREDSSNWRSRGQGTLVTVSSGSGGGGSGGGGSGGGGSFEQIQLVQSGSELKKPGASVKVSCKASGYTFTNYGMNWVRQAPGQGLKWMGWINTNTGEPKYAEEFKGRFALSLDTSVSTAYLQINSLKAEDTAVYFCARGYGNYARGAWLAYWGQGTLVTVSSTRASTKGPSVFPLAPSSKSTSGGTAALGCLVKDYFPEPVTVSWNSGALTSGVHTFPAVLQSSGLYSLSSVVTVPSSSLGTQTYICNVNHKPSNTKVDKRVEPKSCIPEDTFFPSPESSCDVKLVEKSFETDTNLNFQNLSVIGFRILLLKVAGFNLLMTLRLWSS

SEQ ID NO: 14048 - protein, 893 aa, Artificial Sequence
  Synthetic Polypeptide
MALPVTALLLPLALLLHAARPEVQLVESGGGLVQPGGSLRLSCAASGFSFSDFWMSWVRQAPGKGLEWVATISQAGSEKDYVDSVKGRFTISRDNAKKSLYLQMNSLRAEDTAVYYCASGVYSFDYRGQGTLVTVSSGTGGGGSGGGGSGGGGSEFDEIVLTQSPATLSLSPGERATLSCSASSSINYIYWLQQKPGQAPRILIYLTSNLASGVPARFSGSGSGTDFTLTISSLEPEDFAVYYCLQWSSNPLTFGGGTKVEIKLEGQPKANPTVTLFPPSSEELQANKATLVCLISDFYPGAVTVAWKADGSPVKAGVETTKPSKQSNNKYAASSYLSLTPEQWKSHRSYSCQVTHEGSTVEKTVAPTECSGRADCGFTSESYQQGVLSATILYEILLGKATLYAVLVSALVLMAMVKRKDSRGRAKRSGSGVKQTLNFDLLKLAGDVESNPGPTSMDWIWRILFLVGAATGAHSGPQLQLQESGPGLVKPSETLSLTCTVSGDSISSGDYYWGWIRQPPGKGLEWIGHIYYSGVTYYNPSLKSRVTISVDTSRNQFSLKLSSVTAADTAVYYCTREDSSNWRSRGQGTLVTVSSGSGGGGSGGGGSGGGGSFEEVQLVESGGGLVKPGGSLRLSCAASGFTFSSYDMSWVRQAPGKGLEWVSTISSGGSYTYYLDSIKGRFTISRDNAKNSLYLQMNSLRAEDTAVYYCARQGLDYWGRGTLVTVSSTRASTKGPSVFPLAPSSKSTSGGTAALGCLVKDYFPEPVTVSWNSGALTSGVHTFPAVLQSSGLYSLSSVVTVPSSSLGTQTYICNVNHKPSNTKVDKRVEPKSCIPEDTFFPSPESSCDVKLVEKSFETDTNLNFQNLSVIGFRILLLKVAGFNLLMTLRLWSS

SEQ ID NO: 14049 - protein, 902 aa, Artificial Sequence
  Synthetic Polypeptide
MALPVTALLLPLALLLHAARPEVQLVESGGGLVQPGGSLRLSCAASGFSFSDFWMSWVRQAPGKGLEWVATISQAGSEKDYVDSVKGRFTISRDNAKKSLYLQMNSLRAEDTAVYYCASGVYSFDYRGQGTLVTVSSGTGGGGSGGGGSGGGGSEFDIVMTQSPDSLAVSLGERATINCRASKSVSTSGYSFMHWYQQKPGQPPKLLIYLASNLESGVPDRFSGSGSGTDFTLTISSLQAEDVAVYYCQHSREVPWTFGQGTKVEIKRLEGQPKANPTVTLFPPSSEELQANKATLVCLISDFYPGAVTVAWKADGSPVKAGVETTKPSKQSNNKYAASSYLSLTPEQWKSHRSYSCQVTHEGSTVEKTVAPTECSGRADCGFTSESYQQGVLSATILYEILLGKATLYAVLVSALVLMAMVKRKDSRGRAKRSGSGVKQTLNFDLLKLAGDVESNPGPTSMDWIWRILFLVGAATGAHSGPQLQLQESGPGLVKPSETLSLTCTVSGDSISSGDYYWGWIRQPPGKGLEWIGHIYYSGVTYYNPSLKSRVTISVDTSRNQFSLKLSSVTAADTAVYYCTREDSSNWRSRGQGTLVTVSSGSGGGGSGGGGSGGGGSFEQVQLVQSGAEVKKPGASVKVSCKASGYTFTNYGMNWVRQAPGQGLEWMGWINTYTGEPTYADAFKGRFAFSLDTSTSTAYLQINSLRSDDTAVYYCARDYGDYGMDYWGQGTTVTVSSTRASTKGPSVFPLAPSSKSTSGGTAALGCLVKDYFPEPVTVSWNSGALTSGVHTFPAVLQSSGLYSLSSVVTVPSSSLGTQTYICNVNHKPSNTKVDKRVEPKSCIPEDTFFPSPESSCDVKLVEKSFETDTNLNFQNLSVIGFRILLLKVAGFNLLMTLRLWSS

SEQ ID NO: 14050 - protein, 898 aa, Artificial Sequence
  Synthetic Polypeptide
MALPVTALLLPLALLLHAARPEVQLVESGGGLVQPGGSLRLSCAASGFSFSDFWMSWVRQAPGKGLEWVATISQAGSEKDYVDSVKGRFTISRDNAKKSLYLQMNSLRAEDTAVYYCASGVYSFDYRGQGTLVTVSSGTGGGGSGGGGSGGGGSEFDIVMTQTPLTLSVTIGQPASISCKSSQSLLDSDGKTYLNWLLQRPGQSPERLIYLVSKLDSGVPDRFTGSGSGTDFTLKISRVEAEDLGVYCCWQGTHFPYTFGGGTKVEIKGLEGQPKANPTVTLFPPSSEELQANKATLVCLISDFYPGAVTVAWKADGSPVKAGVETTKPSKQSNNKYAASSYLSLTPEQWKSHRSYSCQVTHEGSTVEKTVAPTECSGRADCGFTSESYQQGVLSATILYEILLGKATLYAVLVSALVLMAMVKRKDSRGRAKRSGSGVKQTLNFDLLKLAGDVESNPGPTSMDWIWRILFLVGAATGAHSGPQLQLQESGPGLVKPSETLSLTCTVSGDSISSGDYYWGWIRQPPGKGLEWIGHIYYSGVTYYNPSLKSRVTISVDTSRNQFSLKLSSVTAADTAVYYCTREDSSNWRSRGQGTLVTVSSGSGGGGSGGGGSGGGGSFEQVQLQQPGAELVRPGASVKLSCKASGYTFTSYWMNWVKQRPGQGLEWIGMIDPSDSETHYNHIFKDKATLTVDKSSSTAYLQLSSLTSEDSAVYYCARNLYLWGQGTSVTVSSTRASTKGPSVFPLAPSSKSTSGGTAALGCLVKDYFPEPVTVSWNSGALTSGVHTFPAVLQSSGLYSLSSVVTVPSSSLGTQTYICNVNHKPSNTKVDKRVEPKSCIPEDTFFPSPESSCDVKLVEKSFETDTNLNFQNLSVIGFRILLLKVAGFNLLMTLRLWSS

SEQ ID NO: 14051 - protein, 906 aa, Artificial Sequence
  Synthetic Polypeptide
MALPVTALLLPLALLLHAARPEVQLVESGGGLVQPGGSLRLSCAASGFSFSDFWMSWVRQAPGKGLEWVATISQAGSEKDYVDSVKGRFTISRDNAKKSLYLQMNSLRAEDTAVYYCASGVYSFDYRGQGTLVTVSSGTGGGGSGGGGSGGGGSEFDIVMTQSPDSLAVSLGERATINCESSQSLLNSGNQKNYLTWYQQKPGQPPKPLIYWASTRESGVPDRFSGSGSGTDFTLTISSLQAEDVAVYYCQNDYSYPYTFGQGTKLEIKRLEGQPKANPTVTLFPPSSEELQANKATLVCLISDFYPGAVTVAWKADGSPVKAGVETTKPSKQSNNKYAASSYLSLTPEQWKSHRSYSCQVTHEGSTVEKTVAPTECSGRADCGFTSESYQQGVLSATILYEILLGKATLYAVLVSALVLMAMVKRKDSRGRAKRSGSGVKQTLNFDLLKLAGDVESNPGPTSMDWIWRILFLVGAATGAHSGPQLQLQESGPGLVKPSETLSLTCTVSGDSISSGDYYWGWIRQPPGKGLEWIGHIYYSGVTYYNPSLKSRVTISVDTSRNQFSLKLSSVTAADTAVYYCTREDSSNWRSRGQGTLVTVSSGSGGGGSGGGGSGGGGSFEEVQLVQSGAEVKKPGESLKISCKGSGYSFTDYYMKWARQMPGKGLEWMGDIIPSNGATFYNQKFKGQVTISADKSISTTYLQWSSLKASDTAMYYCARSHLLRASWFAYWGQGTMVTVSSTRASTKGPSVFPLAPSSKSTSGGTAALGCLVKDYFPEPVTVSWNSGALTSGVHTFPAVLQSSGLYSLSSVVTVPSSSLGTQTYICNVNHKPSNTKVDKRVEPKSCIPEDTFFPSPESSCDVKLVEKSFETDTNLNFQNLSVIGFRILLLKVAGFNLLMTLRLWSS

SEQ ID NO: 14052 - protein, 901 aa, Artificial Sequence
  Synthetic Polypeptide
MALPVTALLLPLALLLHAARPEVQLVESGGGLVQPGGSLRLSCAASGFSFSDFWMSWVRQAPGKGLEWVATISQAGSEKDYVDSVKGRFTISRDNAKKSLYLQMNSLRAEDTAVYYCASGVYSFDYRGQGTLVTVSSGTGGGGSGGGGSGGGGSEFDIQMTQSTSSLSASLGDRVTISCSASQGINNYLNWYQQKPDGTVELLIYYTSTLQSGVPSRFSGSGSGTDYSLTISNLEPEDIGTYYCQQYSKLPRTFGGGTKLEIKLEGQPKANPTVTLFPPSSEELQANKATLVCLISDFYPGAVTVAWKADGSPVKAGVETTKPSKQSNNKYAASSYLSLTPEQWKSHRSYSCQVTHEGSTVEKTVAPTECSGRADCGFTSESYQQGVLSATILYEILLGKATLYAVLVSALVLMAMVKRKDSRGRAKRSGSGVKQTLNFDLLKLAGDVESNPGPTSMDWIWRILFLVGAATGAHSGPQLQLQESGPGLVKPSETLSLTCTVSGDSISSGDYYWGWIRQPPGKGLEWIGHIYYSGVTYYNPSLKSRVTISVDTSRNQFSLKLSSVTAADTAVYYCTREDSSNWRSRGQGTLVTVSSGSGGGGSGGGGSGGGGSFEQVQLQQSGSELMMPGASVKISCKATGYTFSNYWIEWVKQRPGHGLEWIGEILPGTGRTIYNEKFKGKATFTADISSNTVQMQLSSLTSEDSAVYYCARRDYYGNFYYAMDYWGQGTSVTVSSTRASTKGPSVFPLAPSSKSTSGGTAALGCLVKDYFPEPVTVSWNSGALTSGVHTFPAVLQSSGLYSLSSVVTVPSSSLGTQTYICNVNHKPSNTKVDKRVEPKSCIPEDTFFPSPESSCDVKLVEKSFETDTNLNFQNLSVIGFRILLLKVAGFNLLMTLRLWSS

SEQ ID NO: 14053 - protein, 896 aa, Artificial Sequence
  Synthetic Polypeptide
MALPVTALLLPLALLLHAARPEVQLVESGGGLVQPGGSLRLSCAASGFSFSDFWMSWVRQAPGKGLEWVATISQAGSEKDYVDSVKGRFTISRDNAKKSLYLQMNSLRAEDTAVYYCASGVYSFDYRGQGTLVTVSSGTGGGGSGGGGSGGGGSEFDIQMTQSPASLSVSVGETVTITCRASENIYSNLAWYQQKQGKSPQLLVYAATNLADGVPSRFSGSGSGTQYSLKINSLQSEDFGSYYCQHFWGTWTFGGGTTLEIKLEGQPKANPTVTLFPPSSEELQANKATLVCLISDFYPGAVTVAWKADGSPVKAGVETTKPSKQSNNKYAASSYLSLTPEQWKSHRSYSCQVTHEGSTVEKTVAPTECSGRADCGFTSESYQQGVLSATILYEILLGKATLYAVLVSALVLMAMVKRKDSRGRAKRSGSGVKQTLNFDLLKLAGDVESNPGPTSMDWIWRILFLVGAATGAHSGPQLQLQESGPGLVKPSETLSLTCTVSGDSISSGDYYWGWIRQPPGKGLEWIGHIYYSGVTYYNPSLKSRVTISVDTSRNQFSLKLSSVTAADTAVYYCTREDSSNWRSRGQGTLVTVSSGSGGGGSGGGGSGGGGSFEEVQLQQSGPELVKPGASVKMSCKASGYTFTDYYMKWMKQSHGKSLEWIGDINPNNGGTTYNQKFKGKATLTVDKSSSTAYMQLNSLTSEDSAVYYCARDYGYGYFDYWGQGTTLTVSSTRASTKGPSVFPLAPSSKSTSGGTAALGCLVKDYFPEPVTVSWNSGALTSGVHTFPAVLQSSGLYSLSSVVTVPSSSLGTQTYICNVNHKPSNTKVDKRVEPKSCIPEDTFFPSPESSCDVKLVEKSFETDTNLNFQNLSVIGFRILLLKVAGFNLLMTLRLWSS

SEQ ID NO: 14054 - protein, 899 aa, Artificial Sequence
  Synthetic Polypeptide
MALPVTALLLPLALLLHAARPEVQLVESGGGLVQPGGSLRLSCAASGFSFSDFWMSWVRQAPGKGLEWVATISQAGSEKDYVDSVKGRFTISRDNAKKSLYLQMNSLRAEDTAVYYCASGVYSFDYRGQGTLVTVSSGTGGGGSGGGGSGGGGSEFEIVLTQSPGTLSLSPGERATLSCRASQSVGGYLAWYQQKPGQAPRLLIYDASNRATGIPARFSGSGSGTDFTLTISSLEPEDFAVYYCQQRNNWPPMYTFGQGTKLEIKRLEGQPKANPTVTLFPPSSEELQANKATLVCLISDFYPGAVTVAWKADGSPVKAGVETTKPSKQSNNKYAASSYLSLTPEQWKSHRSYSCQVTHEGSTVEKTVAPTECSGRADCGFTSESYQQGVLSATILYEILLGKATLYAVLVSALVLMAMVKRKDSRGRAKRSGSGVKQTLNFDLLKLAGDVESNPGPTSMDWIWRILFLVGAATGAHSGPQLQLQESGPGLVKPSETLSLTCTVSGDSISSGDYYWGWIRQPPGKGLEWIGHIYYSGVTYYNPSLKSRVTISVDTSRNQFSLKLSSVTAADTAVYYCTREDSSNWRSRGQGTLVTVSSGSGGGGSGGGGSGGGGSFEQVQLVQSGAEVKKPGSSVKVSCKASGGTFSSYAISWVRQAPGQGLEWMGGIIPILGTANYAQKFQGRVTITADESTSTAYMELSSLRSEDTAVYYCARWGGGAFDIWGQGTMVTVSSTRASTKGPSVFPLAPSSKSTSGGTAALGCLVKDYFPEPVTVSWNSGALTSGVHTFPAVLQSSGLYSLSSVVTVPSSSLGTQTYICNVNHKPSNTKVDKRVEPKSCIPEDTFFPSPESSCDVKLVEKSFETDTNLNFQNLSVIGFRILLLKVAGFNLLMTLRLWSS

SEQ ID NO: 14055 - protein, 894 aa, Artificial Sequence
  Synthetic Polypeptide
MALPVTALLLPLALLLHAARPEVQLVESGGGLVQPGGSLRLSCAASGFSFSDFWMSWVRQAPGKGLEWVATISQAGSEKDYVDSVKGRFTISRDNAKKSLYLQMNSLRAEDTAVYYCASGVYSFDYRGQGTLVTVSSGTGGGGSGGGGSGGGGSEFQIVLTQSPALMSASPGEKVTMTCSASSSVRYMYWYQQKPRSSPKPWIHLTSNLASGVPARFSGSGSGTSYSLTISSMEAEDAATYYCQQWSSHPFTFGSGTKLEIKLEGQPKANPTVTLFPPSSEELQANKATLVCLISDFYPGAVTVAWKADGSPVKAGVETTKPSKQSNNKYAASSYLSLTPEQWKSHRSYSCQVTHEGSTVEKTVAPTECSGRADCGFTSESYQQGVLSATILYEILLGKATLYAVLVSALVLMAMVKRKDSRGRAKRSGSGVKQTLNFDLLKLAGDVESNPGPTSMDWIWRILFLVGAATGAHSGPQLQLQESGPGLVKPSETLSLTCTVSGDSISSGDYYWGWIRQPPGKGLEWIGHIYYSGVTYYNPSLKSRVTISVDTSRNQFSLKLSSVTAADTAVYYCTREDSSNWRSRGQGTLVTVSSGSGGGGSGGGGSGGGGSFEDVQLQESGPGLVKPSQSLSLTCTVTGFSITSDYSWNWIRQFPGNKLEWMGYISYSGHTSYNPSLESRISITRDTSKNQFFLQLNSVTTEDTATYYCTRGNWDVVYWGQGTLVTVSATRASTKGPSVFPLAPSSKSTSGGTAALGCLVKDYFPEPVTVSWNSGALTSGVHTFPAVLQSSGLYSLSSVVTVPSSSLGTQTYICNVNHKPSNTKVDKRVEPKSCIPEDTFFPSPESSCDVKLVEKSFETDTNLNFQNLSVIGFRILLLKVAGFNLLMTLRLWSS

SEQ ID NO: 14056 - protein, 904 aa, Artificial Sequence
  Synthetic Polypeptide
MALPVTALLLPLALLLHAARPEVQLVESGGGLVQPGGSLRLSCAASGFSFSDFWMSWVRQAPGKGLEWVATISQAGSEKDYVDSVKGRFTISRDNAKKSLYLQMNSLRAEDTAVYYCASGVYSFDYRGQGTLVTVSSGTGGGGSGGGGSGGGGSEFDVVMTQSPLSLPVTLGQPASISCRSSQSIVHSDGNTYLEWYQQRPGQSPRRLIYKVSNRFSGVPDRFSGSGSGTDFTLKISRVEAEDVGVYYCFQGSHAPWTFGGGTKVEIKLEGQPKANPTVTLFPPSSEELQANKATLVCLISDFYPGAVTVAWKADGSPVKAGVETTKPSKQSNNKYAASSYLSLTPEQWKSHRSYSCQVTHEGSTVEKTVAPTECSGRADCGFTSESYQQGVLSATILYEILLGKATLYAVLVSALVLMAMVKRKDSRGRAKRSGSGVKQTLNFDLLKLAGDVESNPGPTSMDWIWRILFLVGAATGAHSGPQLQLQESGPGLVKPSETLSLTCTVSGDSISSGDYYWGWIRQPPGKGLEWIGHIYYSGVTYYNPSLKSRVTISVDTSRNQFSLKLSSVTAADTAVYYCTREDSSNWRSRGQGTLVTVSSGSGGGGSGGGGSGGGGSFEEVQLVESGGGLVQPGGSLRLSCAASGFTFSSYGMHWVRQAPGKGLEWVAYITTRSSTIYYADSVKGRFTISRDNAKNSLYLQMNSLRAEDTAVYYCTREPLTGYYAMDYWGQGTSVTVSSTRASTKGPSVFPLAPSSKSTSGGTAALGCLVKDYFPEPVTVSWNSGALTSGVHTFPAVLQSSGLYSLSSVVTVPSSSLGTQTYICNVNHKPSNTKVDKRVEPKSCIPEDTFFPSPESSCDVKLVEKSFETDTNLNFQNLSVIGFRILLLKVAGFNLLMTLRLWSS

SEQ ID NO: 14057 - protein, 896 aa, Artificial Sequence
  Synthetic Polypeptide
MALPVTALLLPLALLLHAARPEVQLVESGGGLVQPGGSLRLSCAASGFSFSDFWMSWVRQAPGKGLEWVATISQAGSEKDYVDSVKGRFTISRDNAKKSLYLQMNSLRAEDTAVYYCASGVYSFDYRGQGTLVTVSSGTGGGGSGGGGSGGGGSEFDIQMTQSPSSLSASVGDRVTITCRASQSISLWLNWYQQKPGKAPKLLIYAASTLQSGVPSRFSGSGSGTDFTLTISSLQPEDFATYYCQQYYTSPYTFGQGTKVEIKRLEGQPKANPTVTLFPPSSEELQANKATLVCLISDFYPGAVTVAWKADGSPVKAGVETTKPSKQSNNKYAASSYLSLTPEQWKSHRSYSCQVTHEGSTVEKTVAPTECSGRADCGFTSESYQQGVLSATILYEILLGKATLYAVLVSALVLMAMVKRKDSRGRAKRSGSGVKQTLNFDLLKLAGDVESNPGPTSMDWIWRILFLVGAATGAHSGPQLQLQESGPGLVKPSETLSLTCTVSGDSISSGDYYWGWIRQPPGKGLEWIGHIYYSGVTYYNPSLKSRVTISVDTSRNQFSLKLSSVTAADTAVYYCTREDSSNWRSRGQGTLVTVSSGSGGGGSGGGGSGGGGSFEQVQLLESGGGLVQPGGSLRLSCAASGFTFSSYAMSWVRQAPGKGLEWVSVIRSSGSSTYYADSVKGRFTISRDNSKNTLYLQMNSLRAEDTAVYYCARGGGYFDYWGQGTLVTVSSTRASTKGPSVFPLAPSSKSTSGGTAALGCLVKDYFPEPVTVSWNSGALTSGVHTFPAVLQSSGLYSLSSVVTVPSSSLGTQTYICNVNHKPSNTKVDKRVEPKSCIPEDTFFPSPESSCDVKLVEKSFETDTNLNFQNLSVIGFRILLLKVAGFNLLMTLRLWSS

SEQ ID NO: 14058 - protein, 899 aa, Artificial Sequence
  Synthetic Polypeptide
MALPVTALLLPLALLLHAARPEVQLVESGGGLVQPGGSLRLSCAASGFSFSDFWMSWVRQAPGKGLEWVATISQAGSEKDYVDSVKGRFTISRDNAKKSLYLQMNSLRAEDTAVYYCASGVYSFDYRGQGTLVTVSSGTGGGGSGGGGSGGGGSEFDIQMTQSPSSLSASVGDRVTITCRASQSISSYLNWYQQKPGKAPKLLIYAVSTLQSGVPSRFSGSGSGTDFTLTISSLQPEDFATYYCQQSGTFPPTTFGQGTKVEIKRLEGQPKANPTVTLFPPSSEELQANKATLVCLISDFYPGAVTVAWKADGSPVKAGVETTKPSKQSNNKYAASSYLSLTPEQWKSHRSYSCQVTHEGSTVEKTVAPTECSGRADCGFTSESYQQGVLSATILYEILLGKATLYAVLVSALVLMAMVKRKDSRGRAKRSGSGVKQTLNFDLLKLAGDVESNPGPTSMDWIWRILFLVGAATGAHSGPQLQLQESGPGLVKPSETLSLTCTVSGDSISSGDYYWGWIRQPPGKGLEWIGHIYYSGVTYYNPSLKSRVTISVDTSRNQFSLKLSSVTAADTAVYYCTREDSSNWRSRGQGTLVTVSSGSGGGGSGGGGSGGGGSFEQVQLLESGGGLVQPGGSLRLSCAASGFTFSSHGMHWVRQAPGKGLEWVSVISGSGSNTGYADSVKGRFTISRDNSKNTLYLQMNSLRAEDTAVYYCARQWGSYAFDSWGQGTLVTVSSTRASTKGPSVFPLAPSSKSTSGGTAALGCLVKDYFPEPVTVSWNSGALTSGVHTFPAVLQSSGLYSLSSVVTVPSSSLGTQTYICNVNHKPSNTKVDKRVEPKSCIPEDTFFPSPESSCDVKLVEKSFETDTNLNFQNLSVIGFRILLLKVAGFNLLMTLRLWSS

SEQ ID NO: 14059 - protein, 909 aa, Artificial Sequence
  Synthetic Polypeptide
MALPVTALLLPLALLLHAARPEVQLVESGGGLVQPGGSLRLSCAASGFSFSDFWMSWVRQAPGKGLEWVATISQAGSEKDYVDSVKGRFTISRDNAKKSLYLQMNSLRAEDTAVYYCASGVYSFDYRGQGTLVTVSSGTGGGGSGGGGSGGGGSEFDIVMSQSPSSLAVSVGEKVTMSCKSSQSLLHSSNQKNYLAWYQQKPGQSPKVLIYWASTRESGVPDRFTGSGSGTDFTLTITSVKSEDLAVYYCQQYYSYPWTFGGGTRLEIKRLEGQPKANPTVTLFPPSSEELQANKATLVCLISDFYPGAVTVAWKADGSPVKAGVETTKPSKQSNNKYAASSYLSLTPEQWKSHRSYSCQVTHEGSTVEKTVAPTECSGRADCGFTSESYQQGVLSATILYEILLGKATLYAVLVSALVLMAMVKRKDSRGRAKRSGSGVKQTLNFDLLKLAGDVESNPGPTSMDWIWRILFLVGAATGAHSGPQLQLQESGPGLVKPSETLSLTCTVSGDSISSGDYYWGWIRQPPGKGLEWIGHIYYSGVTYYNPSLKSRVTISVDTSRNQFSLKLSSVTAADTAVYYCTREDSSNWRSRGQGTLVTVSSGSGGGGSGGGGSGGGGSFEEVQLQQSVAELVKPGASVKMSCKVSGYTLTDHTIHWMKQRPEQGLEWIGYIYPRDGITGYNEKFKGKATLTADTSSSTAYMQLNSLTSEDSAVYFCARWGYSYRNYAYYYDYWGQGTTLTVSSTRASTKGPSVFPLAPSSKSTSGGTAALGCLVKDYFPEPVTVSWNSGALTSGVHTFPAVLQSSGLYSLSSVVTVPSSSLGTQTYICNVNHKPSNTKVDKRVEPKSCIPEDTFFPSPESSCDVKLVEKSFETDTNLNFQNLSVIGFRILLLKVAGFNLLMTLRLWSS

SEQ ID NO: 14060 - protein, 906 aa, Artificial Sequence
  Synthetic Polypeptide
MALPVTALLLPLALLLHAARPEVQLVESGGGLVQPGGSLRLSCAASGFSFSDFWMSWVRQAPGKGLEWVATISQAGSEKDYVDSVKGRFTISRDNAKKSLYLQMNSLRAEDTAVYYCASGVYSFDYRGQGTLVTVSSGTGGGGSGGGGSGGGGSEFEIVLTQSPGTLSLSPGERATLSCRASQSVSSSYLAWYQQKPGQAPRLLIYGTSSRATGIPDRFSGSGSGTDFTLTISRLEPEDFAVYYCQQYGSSPFTFGGGTKVEIKRLEGQPKANPTVTLFPPSSEELQANKATLVCLISDFYPGAVTVAWKADGSPVKAGVETTKPSKQSNNKYAASSYLSLTPEQWKSHRSYSCQVTHEGSTVEKTVAPTECSGRADCGFTSESYQQGVLSATILYEILLGKATLYAVLVSALVLMAMVKRKDSRGRAKRSGSGVKQTLNFDLLKLAGDVESNPGPTSMDWIWRILFLVGAATGAHSGPQLQLQESGPGLVKPSETLSLTCTVSGDSISSGDYYWGWIRQPPGKGLEWIGHIYYSGVTYYNPSLKSRVTISVDTSRNQFSLKLSSVTAADTAVYYCTREDSSNWRSRGQGTLVTVSSGSGGGGSGGGGSGGGGSFEQVQLQESGPGLAKPSETLSLTCTVSGDSITSYYWSWIRQPPGKGLEWIGYIYYSGSTNYNPSLKSRVTISVDTSKNQFSLKLSSVTAADTAVYYCARDQRRIAAAGTHFYGMDVWGQGTTVTVSSTRASTKGPSVFPLAPSSKSTSGGTAALGCLVKDYFPEPVTVSWNSGALTSGVHTFPAVLQSSGLYSLSSVVTVPSSSLGTQTYICNVNHKPSNTKVDKRVEPKSCIPEDTFFPSPESSCDVKLVEKSFETDTNLNFQNLSVIGFRILLLKVAGFNLLMTLRLWSS

SEQ ID NO: 14061 - protein, 898 aa, Artificial Sequence
  Synthetic Polypeptide
MALPVTALLLPLALLLHAARPEVQLVESGGGLVQPGGSLRLSCAASGFSFSDFWMSWVRQAPGKGLEWVATISQAGSEKDYVDSVKGRFTISRDNAKKSLYLQMNSLRAEDTAVYYCASGVYSFDYRGQGTLVTVSSGTGGGGSGGGGSGGGGSEFDILLTQSPVILSVSPGERVSFSCRASQSIGTNIHWYQQRTNGSPRLLIKYASESISGIPSRFSGSGSGTDFTLSINSVESEDIADYYCQQNNNWPTTFGAGTKLELKLEGQPKANPTVTLFPPSSEELQANKATLVCLISDFYPGAVTVAWKADGSPVKAGVETTKPSKQSNNKYAASSYLSLTPEQWKSHRSYSCQVTHEGSTVEKTVAPTECSGRADCGFTSESYQQGVLSATILYEILLGKATLYAVLVSALVLMAMVKRKDSRGRAKRSGSGVKQTLNFDLLKLAGDVESNPGPTSMDWIWRILFLVGAATGAHSGPQLQLQESGPGLVKPSETLSLTCTVSGDSISSGDYYWGWIRQPPGKGLEWIGHIYYSGVTYYNPSLKSRVTISVDTSRNQFSLKLSSVTAADTAVYYCTREDSSNWRSRGQGTLVTVSSGSGGGGSGGGGSGGGGSFEQVQLKQSGPGLVQPSQSLSITCTVSGFSLTNYGVHWVRQSPGKGLEWLGVIWSGGNTDYNTPFTSRLSINKDNSKSQVFFKMNSLQSNDTAIYYCARALTYYDYEFAYWGQGTLVTVSATRASTKGPSVFPLAPSSKSTSGGTAALGCLVKDYFPEPVTVSWNSGALTSGVHTFPAVLQSSGLYSLSSVVTVPSSSLGTQTYICNVNHKPSNTKVDKRVEPKSCIPEDTFFPSPESSCDVKLVEKSFETDTNLNFQNLSVIGFRILLLKVAGFNLLMTLRLWSS

SEQ ID NO: 14062 - protein, 891 aa, Artificial Sequence
  Synthetic Polypeptide
MALPVTALLLPLALLLHAARPEVQLVESGGGLVQPGGSLRLSCAASGFSFSDFWMSWVRQAPGKGLEWVATISQAGSEKDYVDSVKGRFTISRDNAKKSLYLQMNSLRAEDTAVYYCASGVYSFDYRGQGTLVTVSSGTGGGGSGGGGSGGGGSEFMTQSPKFLLVSAGDRVTLTCKASQSVNNDVYWYQQEPGQSPKLLIYWASTRESGVPDRFTGSGSGTDFTLTISSVQAEDLAVYYCKQSYNLYTFGGGTKLEIKRLEGQPKANPTVTLFPPSSEELQANKATLVCLISDFYPGAVTVAWKADGSPVKAGVETTKPSKQSNNKYAASSYLSLTPEQWKSHRSYSCQVTHEGSTVEKTVAPTECSGRADCGFTSESYQQGVLSATILYEILLGKATLYAVLVSALVLMAMVKRKDSRGRAKRSGSGVKQTLNFDLLKLAGDVESNPGPTSMDWIWRILFLVGAATGAHSGPQLQLQESGPGLVKPSETLSLTCTVSGDSISSGDYYWGWIRQPPGKGLEWIGHIYYSGVTYYNPSLKSRVTISVDTSRNQFSLKLSSVTAADTAVYYCTREDSSNWRSRGQGTLVTVSSGSGGGGSGGGGSGGGGSFEESGRGLVQPGGSRKLSCAASGFTFSTSGMHWVRQAPEKGLEWVAYISSGSTTIYHADTVKGRFTISRDNPKNTLFLQMTSLRSEDTAMYYCCARSGQFGNYFDYWGQGTTLTVSSTRASTKGPSVFPLAPSSKSTSGGTAALGCLVKDYFPEPVTVSWNSGALTSGVHTFPAVLQSSGLYSLSSVVTVPSSSLGTQTYICNVNHKPSNTKVDKRVEPKSCIPEDTFFPSPESSCDVKLVEKSFETDTNLNFQNLSVIGFRILLLKVAGFNLLMTLRLWSS

SEQ ID NO: 14063 - protein, 896 aa, Artificial Sequence
  Synthetic Polypeptide
MALPVTALLLPLALLLHAARPEVQLVESGGGLVQPGGSLRLSCAASGFSFSDFWMSWVRQAPGKGLEWVATISQAGSEKDYVDSVKGRFTISRDNAKKSLYLQMNSLRAEDTAVYYCASGVYSFDYRGQGTLVTVSSGTGGGGSGGGGSGGGGSEFQSPSSLAVSAGEKVTMSCKSSQSLLNSRTRKNYLAWYQQKPGQSPKLLIYWASTRESGVPDRFTGSGSGTDFTLTISSVQAEDLAVYYCKQSNLYTFGGGTKLEIKLEGQPKANPTVTLFPPSSEELQANKATLVCLISDFYPGAVTVAWKADGSPVKAGVETTKPSKQSNNKYAASSYLSLTPEQWKSHRSYSCQVTHEGSTVEKTVAPTECSGRADCGFTSESYQQGVLSATILYEILLGKATLYAVLVSALVLMAMVKRKDSRGRAKRSGSGVKQTLNFDLLKLAGDVESNPGPTSMDWIWRILFLVGAATGAHSGPQLQLQESGPGLVKPSETLSLTCTVSGDSISSGDYYWGWIRQPPGKGLEWIGHIYYSGVTYYNPSLKSRVTISVDTSRNQFSLKLSSVTAADTAVYYCTREDSSNWRSRGQGTLVTVSSGSGGGGSGGGGSGGGGSFEQVQLEESGPELVKPGASVKLSCKASGYTFTEYIIHWVKQRSGQGLEWIGWFYPGSGSIKYNEKFKDKATLTADKSSSTVYMELSGLTSEDSAVYFCARHDGYSYFDYWGQGTTLTVSSTRASTKGPSVFPLAPSSKSTSGGTAALGCLVKDYFPEPVTVSWNSGALTSGVHTFPAVLQSSGLYSLSSVVTVPSSSLGTQTYICNVNHKPSNTKVDKRVEPKSCIPEDTFFPSPESSCDVKLVEKSFETDTNLNFQNLSVIGFRILLLKVAGFNLLMTLRLWSS

SEQ ID NO: 14064 - protein, 899 aa, Artificial Sequence
  Synthetic Polypeptide
MALPVTALLLPLALLLHAARPEVQLVESGGGLVQPGGSLRLSCAASGFSFSDFWMSWVRQAPGKGLEWVATISQAGSEKDYVDSVKGRFTISRDNAKKSLYLQMNSLRAEDTAVYYCASGVYSFDYRGQGTLVTVSSGTGGGGSGGGGSGGGGSEFDIQMTQSPSSLSASLGERVSLTCRATQELSGYLSWLQQKPDGTIKRLIYAASTLDSGVPKRFSGNRSGSDYSLTISSLESEDFADYYCLQYAIYPYTFGGGTKLEIKLEGQPKANPTVTLFPPSSEELQANKATLVCLISDFYPGAVTVAWKADGSPVKAGVETTKPSKQSNNKYAASSYLSLTPEQWKSHRSYSCQVTHEGSTVEKTVAPTECSGRADCGFTSESYQQGVLSATILYEILLGKATLYAVLVSALVLMAMVKRKDSRGRAKRSGSGVKQTLNFDLLKLAGDVESNPGPTSMDWIWRILFLVGAATGAHSGPQLQLQESGPGLVKPSETLSLTCTVSGDSISSGDYYWGWIRQPPGKGLEWIGHIYYSGVTYYNPSLKSRVTISVDTSRNQFSLKLSSVTAADTAVYYCTREDSSNWRSRGQGTLVTVSSGSGGGGSGGGGSGGGGSFEEVQLQQSGPELVKPGASVKMSCKASGYTFTSYFIHWVKQKPGQGLEWIGFINPYNDGSKYNEKFKGKATLTSDKSSSTAYMELSSLTSEDSAVYYCTRDDGYYGYAMDYWGQGTSVTVSSTRASTKGPSVFPLAPSSKSTSGGTAALGCLVKDYFPEPVTVSWNSGALTSGVHTFPAVLQSSGLYSLSSVVTVPSSSLGTQTYICNVNHKPSNTKVDKRVEPKSCIPEDTFFPSPESSCDVKLVEKSFETDTNLNFQNLSVIGFRILLLKVAGFNLLMTLRLWSS

SEQ ID NO: 14065 - protein, 904 aa, Artificial Sequence
  Synthetic Polypeptide
MALPVTALLLPLALLLHAARPEVQLVESGGGLVQPGGSLRLSCAASGFSFSDFWMSWVRQAPGKGLEWVATISQAGSEKDYVDSVKGRFTISRDNAKKSLYLQMNSLRAEDTAVYYCASGVYSFDYRGQGTLVTVSSGTGGGGSGGGGSGGGGSEFDTIVLTQSPASLAVSLGQRATISCRASESVDSYGNSFMHWYQQKPGQPPKLLIYLASNLESGVPARFSGSGSRTDFTLTIDPVEADDAATYYCQQNNYDPWTFGGGTKLEIKLEGQPKANPTVTLFPPSSEELQANKATLVCLISDFYPGAVTVAWKADGSPVKAGVETTKPSKQSNNKYAASSYLSLTPEQWKSHRSYSCQVTHEGSTVEKTVAPTECSGRADCGFTSESYQQGVLSATILYEILLGKATLYAVLVSALVLMAMVKRKDSRGRAKRSGSGVKQTLNFDLLKLAGDVESNPGPTSMDWIWRILFLVGAATGAHSGPQLQLQESGPGLVKPSETLSLTCTVSGDSISSGDYYWGWIRQPPGKGLEWIGHIYYSGVTYYNPSLKSRVTISVDTSRNQFSLKLSSVTAADTAVYYCTREDSSNWRSRGQGTLVTVSSGSGGGGSGGGGSGGGGSFEEVQLQQSGPELVKPGASVKMSCKASGYTFTSYVMHWVKQKPGQGLEWIGYINPYNDGTKYNEKFKGKATLTSDTSSSTAYMELNSLTSEDSAVYFCARPIYFDNDYFDYWGQGTTLKVSSTRASTKGPSVFPLAPSSKSTSGGTAALGCLVKDYFPEPVTVSWNSGALTSGVHTFPAVLQSSGLYSLSSVVTVPSSSLGTQTYICNVNHKPSNTKVDKRVEPKSCIPEDTFFPSPESSCDVKLVEKSFETDTNLNFQNLSVIGFRILLLKVAGFNLLMTLRLWSS

SEQ ID NO: 14066 - protein, 899 aa, Artificial Sequence
  Synthetic Polypeptide
MALPVTALLLPLALLLHAARPEVQLVESGGGLVQPGGSLRLSCAASGFSFSDFWMSWVRQAPGKGLEWVATISQAGSEKDYVDSVKGRFTISRDNAKKSLYLQMNSLRAEDTAVYYCASGVYSFDYRGQGTLVTVSSGTGGGGSGGGGSGGGGSEFDIQMTQSPSSLSASVGDRVTITCKASQDVGIAVAWYQQKPGKVPKLLIYWASTRHTGVPDRFSGSGSGTDFTLTISSLQPEDVATYYCQQYSSYPYTFGQGTKVEIKRLEGQPKANPTVTLFPPSSEELQANKATLVCLISDFYPGAVTVAWKADGSPVKAGVETTKPSKQSNNKYAASSYLSLTPEQWKSHRSYSCQVTHEGSTVEKTVAPTECSGRADCGFTSESYQQGVLSATILYEILLGKATLYAVLVSALVLMAMVKRKDSRGRAKRSGSGVKQTLNFDLLKLAGDVESNPGPTSMDWIWRILFLVGAATGAHSGPQLQLQESGPGLVKPSETLSLTCTVSGDSISSGDYYWGWIRQPPGKGLEWIGHIYYSGVTYYNPSLKSRVTISVDTSRNQFSLKLSSVTAADTAVYYCTREDSSNWRSRGQGTLVTVSSGSGGGGSGGGGSGGGGSFEEVQLVESGGGLVQPGGSLRLSCAASGFDFSRYWMSWVRQAPGKGLEWIGEINPDSSTINYAPSLKDKFIISRDNAKNSLYLQMNSLRAEDTAVYYCARPDGNYWYFDVWGQGTLVTVSSTRASTKGPSVFPLAPSSKSTSGGTAALGCLVKDYFPEPVTVSWNSGALTSGVHTFPAVLQSSGLYSLSSVVTVPSSSLGTQTYICNVNHKPSNTKVDKRVEPKSCIPEDTFFPSPESSCDVKLVEKSFETDTNLNFQNLSVIGFRILLLKVAGFNLLMTLRLWSS

SEQ ID NO: 14067 - protein, 899 aa, Artificial Sequence
  Synthetic Polypeptide
MALPVTALLLPLALLLHAARPEVQLVESGGGLVQPGGSLRLSCAASGFSFSDFWMSWVRQAPGKGLEWVATISQAGSEKDYVDSVKGRFTISRDNAKKSLYLQMNSLRAEDTAVYYCASGVYSFDYRGQGTLVTVSSGTGGGGSGGGGSGGGGSEFDIVMTQSQKSMSTSVGDRVSITCKASQDVITGVAWYQQKPGQSPKLLIYSASYRYTGVPDRFTGSGSGTDFTFTISNVQAEDLAVYYCQQHYSTPLTFGAGTKLELKLEGQPKANPTVTLFPPSSEELQANKATLVCLISDFYPGAVTVAWKADGSPVKAGVETTKPSKQSNNKYAASSYLSLTPEQWKSHRSYSCQVTHEGSTVEKTVAPTECSGRADCGFTSESYQQGVLSATILYEILLGKATLYAVLVSALVLMAMVKRKDSRGRAKRSGSGVKQTLNFDLLKLAGDVESNPGPTSMDWIWRILFLVGAATGAHSGPQLQLQESGPGLVKPSETLSLTCTVSGDSISSGDYYWGWIRQPPGKGLEWIGHIYYSGVTYYNPSLKSRVTISVDTSRNQFSLKLSSVTAADTAVYYCTREDSSNWRSRGQGTLVTVSSGSGGGGSGGGGSGGGGSFEQVQLQQPGAELVRPGASVKLSCKASGYSFTTYWMNWVKQRPGQGLEWIGMIHPSDSETRLNQKFKDKATLTVDKSSSTAYMQLSSPTSEDSAVYYCARSTMIATRAMDYWGQGTSVTVSSTRASTKGPSVFPLAPSSKSTSGGTAALGCLVKDYFPEPVTVSWNSGALTSGVHTFPAVLQSSGLYSLSSVVTVPSSSLGTQTYICNVNHKPSNTKVDKRVEPKSCIPEDTFFPSPESSCDVKLVEKSFETDTNLNFQNLSVIGFRILLLKVAGFNLLMTLRLWSS

SEQ ID NO: 14068 - protein, 905 aa, Artificial Sequence
  Synthetic Polypeptide
MALPVTALLLPLALLLHAARPEVQLVESGGGLVQPGGSLRLSCAASGFSFSDFWMSWVRQAPGKGLEWVATISQAGSEKDYVDSVKGRFTISRDNAKKSLYLQMNSLRAEDTAVYYCASGVYSFDYRGQGTLVTVSSGTGGGGSGGGGSGGGGSEFQSVLTQPPSVSGAPGQRVTISCTGSGSNIGAPYDVSWYQQLPGTAPKLLIYHNNKRPSGVPDRFSGSKSGTSASLAITGLQAEDEADYYCATVEAGLSGSVFGGGTKLTVLGALEGQPKANPTVTLFPPSSEELQANKATLVCLISDFYPGAVTVAWKADGSPVKAGVETTKPSKQSNNKYAASSYLSLTPEQWKSHRSYSCQVTHEGSTVEKTVAPTECSGRADCGFTSESYQQGVLSATILYEILLGKATLYAVLVSALVLMAMVKRKDSRGRAKRSGSGVKQTLNFDLLKLAGDVESNPGPTSMDWIWRILFLVGAATGAHSGPQLQLQESGPGLVKPSETLSLTCTVSGDSISSGDYYWGWIRQPPGKGLEWIGHIYYSGVTYYNPSLKSRVTISVDTSRNQFSLKLSSVTAADTAVYYCTREDSSNWRSRGQGTLVTVSSGSGGGGSGGGGSGGGGSFEQVQLVQSGAEVKKPGASVKVSCKVSGYTLTELSIHWVRQAPGKGLEWMGGFDPEENEIVYAQRFQGRVTMTEDTSTDTAYMELSSLRSEDTAVYYCAIVGSFSPLTLGLWGQGTMVTVSSTRASTKGPSVFPLAPSSKSTSGGTAALGCLVKDYFPEPVTVSWNSGALTSGVHTFPAVLQSSGLYSLSSVVTVPSSSLGTQTYICNVNHKPSNTKVDKRVEPKSCIPEDTFFPSPESSCDVKLVEKSFETDTNLNFQNLSVIGFRILLLKVAGFNLLMTLRLWSS

SEQ ID NO: 14069 - protein, 905 aa, Artificial Sequence
  Synthetic Polypeptide
MALPVTALLLPLALLLHAARPEVQLVESGGGLVQPGGSLRLSCAASGFSFSDFWMSWVRQAPGKGLEWVATISQAGSEKDYVDSVKGRFTISRDNAKKSLYLQMNSLRAEDTAVYYCASGVYSFDYRGQGTLVTVSSGTGGGGSGGGGSGGGGSEFQSVLTQPPSVSGAPGQRVTISCTGSGSNIGAPYDVSWYQQLPGTAPKLLIYHNNKRPSGVPDRFSGSKSGTSASLAITGLQAEDEADYYCQSYDSSSISTIFGGGTKLTVLGALEGQPKANPTVTLFPPSSEELQANKATLVCLISDFYPGAVTVAWKADGSPVKAGVETTKPSKQSNNKYAASSYLSLTPEQWKSHRSYSCQVTHEGSTVEKTVAPTECSGRADCGFTSESYQQGVLSATILYEILLGKATLYAVLVSALVLMAMVKRKDSRGRAKRSGSGVKQTLNFDLLKLAGDVESNPGPTSMDWIWRILFLVGAATGAHSGPQLQLQESGPGLVKPSETLSLTCTVSGDSISSGDYYWGWIRQPPGKGLEWIGHIYYSGVTYYNPSLKSRVTISVDTSRNQFSLKLSSVTAADTAVYYCTREDSSNWRSRGQGTLVTVSSGSGGGGSGGGGSGGGGSFEQVQLVQSGAEVKKPGASVKVSCKVSGYTLTELSIHWVRQAPGKGLEWMGGFDPEENEIVYAQRFQGRVTMTEDTSTDTAYMELSSLRSEDTAVYYCAIVGSFSGIAYRPWGQGTMVTVSSTRASTKGPSVFPLAPSSKSTSGGTAALGCLVKDYFPEPVTVSWNSGALTSGVHTFPAVLQSSGLYSLSSVVTVPSSSLGTQTYICNVNHKPSNTKVDKRVEPKSCIPEDTFFPSPESSCDVKLVEKSFETDTNLNFQNLSVIGFRILLLKVAGFNLLMTLRLWSS

SEQ ID NO: 14070 - protein, 893 aa, Artificial Sequence
  Synthetic Polypeptide
MALPVTALLLPLALLLHAARPEVQLVESGGGLVQPGGSLRLSCAASGFSFSDFWMSWVRQAPGKGLEWVATISQAGSEKDYVDSVKGRFTISRDNAKKSLYLQMNSLRAEDTAVYYCASGVYSFDYRGQGTLVTVSSGTGGGGSGGGGSGGGGSEFDIQMTQSPSSLSASVGDRVTITCRASQGIRNNLAWYQQKPGKAPKRLIYAASNLQSGVPSRFTGSGSGTEFTLIVSSLQPEDFATYYCLQHHSYPLTSGGGTKVELEGQPKANPTVTLFPPSSEELQANKATLVCLISDFYPGAVTVAWKADGSPVKAGVETTKPSKQSNNKYAASSYLSLTPEQWKSHRSYSCQVTHEGSTVEKTVAPTECSGRADCGFTSESYQQGVLSATILYEILLGKATLYAVLVSALVLMAMVKRKDSRGRAKRSGSGVKQTLNFDLLKLAGDVESNPGPTSMDWIWRILFLVGAATGAHSGPQLQLQESGPGLVKPSETLSLTCTVSGDSISSGDYYWGWIRQPPGKGLEWIGHIYYSGVTYYNPSLKSRVTISVDTSRNQFSLKLSSVTAADTAVYYCTREDSSNWRSRGQGTLVTVSSGSGGGGSGGGGSGGGGSFEEVQVLESGGGLVQPGGSLRLSCAASGFTFSSYAMSWVRQAPGKGLEWVSAISGSGGSTNYADSVKGRFTISRDNSKNTLYLQMNSLRAEDTAVYYCAGSSGWSEYWGQGTLVTVSSTRASTKGPSVFPLAPSSKSTSGGTAALGCLVKDYFPEPVTVSWNSGALTSGVHTFPAVLQSSGLYSLSSVVTVPSSSLGTQTYICNVNHKPSNTKVDKRVEPKSCIPEDTFFPSPESSCDVKLVEKSFETDTNLNFQNLSVIGFRILLLKVAGFNLLMTLRLWSS

SEQ ID NO: 14071 - protein, 899 aa, Artificial Sequence
  Synthetic Polypeptide
MALPVTALLLPLALLLHAARPEVQLVESGGGLVQPGGSLRLSCAASGFSFSDFWMSWVRQAPGKGLEWVATISQAGSEKDYVDSVKGRFTISRDNAKKSLYLQMNSLRAEDTAVYYCASGVYSFDYRGQGTLVTVSSGTGGGGSGGGGSGGGGSEFDEIQLVQSGAEVKKPGESLRISCKGSGFNIEDYYIHWVRQMPGKGLEWMGRIDPENDETKYGPIFQGHVTISADTSINTVYLQWSSLKASDTAMYYCAFRGGVYWGQGTTVTVSSLEGQPKANPTVTLFPPSSEELQANKATLVCLISDFYPGAVTVAWKADGSPVKAGVETTKPSKQSNNKYAASSYLSLTPEQWKSHRSYSCQVTHEGSTVEKTVAPTECSGRADCGFTSESYQQGVLSATILYEILLGKATLYAVLVSALVLMAMVKRKDSRGRAKRSGSGVKQTLNFDLLKLAGDVESNPGPTSMDWIWRILFLVGAATGAHSGPQLQLQESGPGLVKPSETLSLTCTVSGDSISSGDYYWGWIRQPPGKGLEWIGHIYYSGVTYYNPSLKSRVTISVDTSRNQFSLKLSSVTAADTAVYYCTREDSSNWRSRGQGTLVTVSSGSGGGGSGGGGSGGGGSFEDVVMTQSPDSLAVSLGERATINCKSSQSLLDSDGKTYLNWLQQKPGQPPKRLISLVSKLDSGVPDRFSGSGSGTDFTLTISSLQAEDVAVYYCWQGTHFPGTFGGGTKVEIKTRASTKGPSVFPLAPSSKSTSGGTAALGCLVKDYFPEPVTVSWNSGALTSGVHTFPAVLQSSGLYSLSSVVTVPSSSLGTQTYICNVNHKPSNTKVDKRVEPKSCIPEDTFFPSPESSCDVKLVEKSFETDTNLNFQNLSVIGFRILLLKVAGFNLLMTLRLWSS

SEQ ID NO: 14072 - protein, 906 aa, Artificial Sequence
  Synthetic Polypeptide
MALPVTALLLPLALLLHAARPEVQLVESGGGLVQPGGSLRLSCAASGFSFSDFWMSWVRQAPGKGLEWVATISQAGSEKDYVDSVKGRFTISRDNAKKSLYLQMNSLRAEDTAVYYCASGVYSFDYRGQGTLVTVSSGTGGGGSGGGGSGGGGSEFDELVMTQSPSSLTVTAGEKVTMSCKSSQSLLNSGNQKNYLTWYQQKPGQPPKLLIYWASTRESGVPDRFTGSGSGTDFTLTISSVQAEDLAVYYCQNDYSYPLTFGAGTKLEIKLEGQPKANPTVTLFPPSSEELQANKATLVCLISDFYPGAVTVAWKADGSPVKAGVETTKPSKQSNNKYAASSYLSLTPEQWKSHRSYSCQVTHEGSTVEKTVAPTECSGRADCGFTSESYQQGVLSATILYEILLGKATLYAVLVSALVLMAMVKRKDSRGRAKRSGSGVKQTLNFDLLKLAGDVESNPGPTSMDWIWRILFLVGAATGAHSGPQLQLQESGPGLVKPSETLSLTCTVSGDSISSGDYYWGWIRQPPGKGLEWIGHIYYSGVTYYNPSLKSRVTISVDTSRNQFSLKLSSVTAADTAVYYCTREDSSNWRSRGQGTLVTVSSGSGGGGSGGGGSGGGGSFEEVQLLEQSGAELVRPGTSVKISCKASGYAFTNYWLGWVKQRPGHGLEWIGDIFPGSGNIHYNEKFKGKATLTADKSSSTAYMQLSSLTFEDSAVYFCARLRNWDEPMDYWGQGTTVTVSSTRASTKGPSVFPLAPSSKSTSGGTAALGCLVKDYFPEPVTVSWNSGALTSGVHTFPAVLQSSGLYSLSSVVTVPSSSLGTQTYICNVNHKPSNTKVDKRVEPKSCIPEDTFFPSPESSCDVKLVEKSFETDTNLNFQNLSVIGFRILLLKVAGFNLLMTLRLWSS

SEQ ID NO: 14073 - protein, 907 aa, Artificial Sequence
  Synthetic Polypeptide
MALPVTALLLPLALLLHAARPEVQLVESGGGLVQPGGSLRLSCAASGFSFSDFWMSWVRQAPGKGLEWVATISQAGSEKDYVDSVKGRFTISRDNAKKSLYLQMNSLRAEDTAVYYCASGVYSFDYRGQGTLVTVSSGTGGGGSGGGGSGGGGSEFDELQMTQSPSSLSASVGDRVTITCRASQSISSYLNWYQQKPGQPPKLLIYWASTRESGVPDRFSGSESGTNYTLTISSLQPEDFATYFCQQSDSLPITFGQGTRLDIQLEGQPKANPTVTLFPPSSEELQANKATLVCLISDFYPGAVTVAWKADGSPVKAGVETTKPSKQSNNKYAASSYLSLTPEQWKSHRSYSCQVTHEGSTVEKTVAPTECSGRADCGFTSESYQQGVLSATILYEILLGKATLYAVLVSALVLMAMVKRKDSRGRAKRSGSGVKQTLNFDLLKLAGDVESNPGPTSMDWIWRILFLVGAATGAHSGPQLQLQESGPGLVKPSETLSLTCTVSGDSISSGDYYWGWIRQPPGKGLEWIGHIYYSGVTYYNPSLKSRVTISVDTSRNQFSLKLSSVTAADTAVYYCTREDSSNWRSRGQGTLVTVSSGSGGGGSGGGGSGGGGSFEEVQLLESGGGVVQPGRSLRLSCAASGFTFSSYGMHWVRQAPGKGLEWVAVISYDGSNKYYADSVKGRFTISRDNSKNTLYLQMNSLRAEDTAVYYCAKDMGWGSGWRPYYYYGMDVWGQGTTVTVSSTRASTKGPSVFPLAPSSKSTSGGTAALGCLVKDYFPEPVTVSWNSGALTSGVHTFPAVLQSSGLYSLSSVVTVPSSSLGTQTYICNVNHKPSNTKVDKRVEPKSCIPEDTFFPSPESSCDVKLVEKSFETDTNLNFQNLSVIGFRILLLKVAGFNLLMTLRLWSS

SEQ ID NO: 14074 - protein, 904 aa, Artificial Sequence
  Synthetic Polypeptide
MALPVTALLLPLALLLHAARPEVQLVESGGGLVQPGGSLRLSCAASGFSFSDFWMSWVRQAPGKGLEWVATISQAGSEKDYVDSVKGRFTISRDNAKKSLYLQMNSLRAEDTAVYYCASGVYSFDYRGQGTLVTVSSGTGGGGSGGGGSGGGGSEFDDIQMTQSPSSLSASVGDRVTITCRASQSISSYLNWYQQKPGKAPKLLIYAASSLQSGVPSRFSGSGSGTDFTLTISSLQPEDLATYYCQQSYSTPFTFGPGTKVDIKLEGQPKANPTVTLFPPSSEELQANKATLVCLISDFYPGAVTVAWKADGSPVKAGVETTKPSKQSNNKYAASSYLSLTPEQWKSHRSYSCQVTHEGSTVEKTVAPTECSGRADCGFTSESYQQGVLSATILYEILLGKATLYAVLVSALVLMAMVKRKDSRGRAKRSGSGVKQTLNFDLLKLAGDVESNPGPTSMDWIWRILFLVGAATGAHSGPQLQLQESGPGLVKPSETLSLTCTVSGDSISSGDYYWGWIRQPPGKGLEWIGHIYYSGVTYYNPSLKSRVTISVDTSRNQFSLKLSSVTAADTAVYYCTREDSSNWRSRGQGTLVTVSSGSGGGGSGGGGSGGGGSFEVHEVQLVQSGAEVKKPGSSVKVSCKASGGTFSSYAISWVRQAPGQGLEWMGGIIPIFGTANYAQKFQGRVTITADKSTSTAYMELSSLRSEDTAVYYCATFALFGFREQAFDIWGQGTTVTVSSTRASTKGPSVFPLAPSSKSTSGGTAALGCLVKDYFPEPVTVSWNSGALTSGVHTFPAVLQSSGLYSLSSVVTVPSSSLGTQTYICNVNHKPSNTKVDKRVEPKSCIPEDTFFPSPESSCDVKLVEKSFETDTNLNFQNLSVIGFRILLLKVAGFNLLMTLRLWSS

SEQ ID NO: 14075 - protein, 902 aa, Artificial Sequence
  Synthetic Polypeptide
MALPVTALLLPLALLLHAARPEVQLVESGGGLVQPGGSLRLSCAASGFSFSDFWMSWVRQAPGKGLEWVATISQAGSEKDYVDSVKGRFTISRDNAKKSLYLQMNSLRAEDTAVYYCASGVYSFDYRGQGTLVTVSSGTGGGGSGGGGSGGGGSEFDIVLTQSPLSLAVSLGQPAIISCKASQSVSFAGTSLMHWYHQKPGQQPRLLIYRASNLEAGVPDRFSGSGSKTDFTLTISPVEAEDAATYYCQQSREYPYTFGGGTKLEIKRLEGQPKANPTVTLFPPSSEELQANKATLVCLISDFYPGAVTVAWKADGSPVKAGVETTKPSKQSNNKYAASSYLSLTPEQWKSHRSYSCQVTHEGSTVEKTVAPTECSGRADCGFTSESYQQGVLSATILYEILLGKATLYAVLVSALVLMAMVKRKDSRGRAKRSGSGVKQTLNFDLLKLAGDVESNPGPTSMDWIWRILFLVGAATGAHSGPQLQLQESGPGLVKPSETLSLTCTVSGDSISSGDYYWGWIRQPPGKGLEWIGHIYYSGVTYYNPSLKSRVTISVDTSRNQFSLKLSSVTAADTAVYYCTREDSSNWRSRGQGTLVTVSSGSGGGGSGGGGSGGGGSFEQVQLVQSGAEVVKPGASVKISCKASGYTFTGYFMNWVKQSPGQSLEWIGRIHPYDGDTFYNQKFQGKATLTVDKSSNTAHMELLSLTSEDFAVYYCTRYDGSRAMDYWGQGTTVTVSSTRASTKGPSVFPLAPSSKSTSGGTAALGCLVKDYFPEPVTVSWNSGALTSGVHTFPAVLQSSGLYSLSSVVTVPSSSLGTQTYICNVNHKPSNTKVDKRVEPKSCIPEDTFFPSPESSCDVKLVEKSFETDTNLNFQNLSVIGFRILLLKVAGFNLLMTLRLWSS

SEQ ID NO: 14076 - protein, 899 aa, Artificial Sequence
  Synthetic Polypeptide
MALPVTALLLPLALLLHAARPEVQLVESGGGLVQPGGSLRLSCAASGFSFSDFWMSWVRQAPGKGLEWVATISQAGSEKDYVDSVKGRFTISRDNAKKSLYLQMNSLRAEDTAVYYCASGVYSFDYRGQGTLVTVSSGTGGGGSGGGGSGGGGSEFDDVVMTQTPLSLPVTPGEPASISCRSSQSLVHRNGNTYLHWYLQKPGQSPKLLIHKVSNRFSGVPDRFSGSGSGTDFTLKISRVEAEDLGVYFCSQSTHVPPLTFGAGTKLELKLEGQPKANPTVTLFPPSSEELQANKATLVCLISDFYPGAVTVAWKADGSPVKAGVETTKPSKQSNNKYAASSYLSLTPEQWKSHRSYSCQVTHEGSTVEKTVAPTECSGRADCGFTSESYQQGVLSATILYEILLGKATLYAVLVSALVLMAMVKRKDSRGRAKRSGSGVKQTLNFDLLKLAGDVESNPGPTSMDWIWRILFLVGAATGAHSGPQLQLQESGPGLVKPSETLSLTCTVSGDSISSGDYYWGWIRQPPGKGLEWIGHIYYSGVTYYNPSLKSRVTISVDTSRNQFSLKLSSVTAADTAVYYCTREDSSNWRSRGQGTLVTVSSGSGGGGSGGGGSGGGGSFEEVQLVQSGAEVEKPGASVKISCKASGSSFTGYNMNWVRQNIGKSLEWIGAIDPYYGGTSYNQKFKGRATLTVDKSTSTAYMHLKSLRSEDTAVYYCVSGMEYWGQGTSVTVSSTRASTKGPSVFPLAPSSKSTSGGTAALGCLVKDYFPEPVTVSWNSGALTSGVHTFPAVLQSSGLYSLSSVVTVPSSSLGTQTYICNVNHKPSNTKVDKRVEPKSCIPEDTFFPSPESSCDVKLVEKSFETDTNLNFQNLSVIGFRILLLKVAGFNLLMTLRLWSS

SEQ ID NO: 14077 - protein, 897 aa, Artificial Sequence
  Synthetic Polypeptide
MALPVTALLLPLALLLHAARPEVQLVESGGGLVQPGGSLRLSCAASGFSFSDFWMSWVRQAPGKGLEWVATISQAGSEKDYVDSVKGRFTISRDNAKKSLYLQMNSLRAEDTAVYYCASGVYSFDYRGQGTLVTVSSGTGGGGSGGGGSGGGGSEFDEIVMTQTPATLSVSAGERVTITCKASQSVSNDVTWYQQKPGQAPRLLIYSASNRYSGVPARFSGSGYGTEFTFTISSVQSEDFAVYFCQQDYSSFGQGTKLEIKRLEGQPKANPTVTLFPPSSEELQANKATLVCLISDFYPGAVTVAWKADGSPVKAGVETTKPSKQSNNKYAASSYLSLTPEQWKSHRSYSCQVTHEGSTVEKTVAPTECSGRADCGFTSESYQQGVLSATILYEILLGKATLYAVLVSALVLMAMVKRKDSRGRAKRSGSGVKQTLNFDLLKLAGDVESNPGPTSMDWIWRILFLVGAATGAHSGPQLQLQESGPGLVKPSETLSLTCTVSGDSISSGDYYWGWIRQPPGKGLEWIGHIYYSGVTYYNPSLKSRVTISVDTSRNQFSLKLSSVTAADTAVYYCTREDSSNWRSRGQGTLVTVSSGSGGGGSGGGGSGGGGSFEQVQLVESGPGVVQPGRSLRISCAVSGFSVTNYGVHWVRQPPGKGLEWLGVIWAGGITNYNSAFMSRLTISKDNSKNTVYLQMNSLRAEDTAMYYCASRGGHYGYALDYWGQGTLVTVSSTRASTKGPSVFPLAPSSKSTSGGTAALGCLVKDYFPEPVTVSWNSGALTSGVHTFPAVLQSSGLYSLSSVVTVPSSSLGTQTYICNVNHKPSNTKVDKRVEPKSCIPEDTFFPSPESSCDVKLVEKSFETDTNLNFQNLSVIGFRILLLKVAGFNLLMTLRLWSS

SEQ ID NO: 14078 - protein, 899 aa, Artificial Sequence
  Synthetic Polypeptide
MALPVTALLLPLALLLHAARPEVQLVESGGGLVQPGGSLRLSCAASGFSFSDFWMSWVRQAPGKGLEWVATISQAGSEKDYVDSVKGRFTISRDNAKKSLYLQMNSLRAEDTAVYYCASGVYSFDYRGQGTLVTVSSGTGGGGSGGGGSGGGGSEFDIQMTQTASSLPASLGDRVTISCSASQDISNYLNWYQQKPDGTVKLLIFYSSNLHSGVPSRFSGGGSGTDYSLTISNLEPEDIATYFCHQYSKLPWTFGGGTKLEIKRLEGQPKANPTVTLFPPSSEELQANKATLVCLISDFYPGAVTVAWKADGSPVKAGVETTKPSKQSNNKYAASSYLSLTPEQWKSHRSYSCQVTHEGSTVEKTVAPTECSGRADCGFTSESYQQGVLSATILYEILLGKATLYAVLVSALVLMAMVKRKDSRGRAKRSGSGVKQTLNFDLLKLAGDVESNPGPTSMDWIWRILFLVGAATGAHSGPQLQLQESGPGLVKPSETLSLTCTVSGDSISSGDYYWGWIRQPPGKGLEWIGHIYYSGVTYYNPSLKSRVTISVDTSRNQFSLKLSSVTAADTAVYYCTREDSSNWRSRGQGTLVTVSSGSGGGGSGGGGSGGGGSFEEVTLVESGGDFVKPGGSLKVSCAASGFAFSHYAMSWVRQTPAKRLEWVAYISSGGSGTYYSDSVKGRFTISRDNAKNTLYLQMRSLRSEDSAMYFCTRVKLGTYYFDSWGQGTTLTVSSTRASTKGPSVFPLAPSSKSTSGGTAALGCLVKDYFPEPVTVSWNSGALTSGVHTFPAVLQSSGLYSLSSVVTVPSSSLGTQTYICNVNHKPSNTKVDKRVEPKSCIPEDTFFPSPESSCDVKLVEKSFETDTNLNFQNLSVIGFRILLLKVAGFNLLMTLRLWSS

SEQ ID NO: 14079 - protein, 901 aa, Artificial Sequence
  Synthetic Polypeptide
MALPVTALLLPLALLLHAARPEVQLVESGGGLVQPGGSLRLSCAASGFSFSDFWMSWVRQAPGKGLEWVATISQAGSEKDYVDSVKGRFTISRDNAKKSLYLQMNSLRAEDTAVYYCASGVYSFDYRGQGTLVTVSSGTGGGGSGGGGSGGGGSEFQFVLTQSPSASAALGASAKLTCTLSSAHKTYTIDWYQQQKGKAPRYLIQVKSDGTYTKATGVPDRFSGSSSGADRYLIIPSVQADDEADYYCGTDYTGGYVFGGGTQLTVTLEGQPKANPTVTLFPPSSEELQANKATLVCLISDFYPGAVTVAWKADGSPVKAGVETTKPSKQSNNKYAASSYLSLTPEQWKSHRSYSCQVTHEGSTVEKTVAPTECSGRADCGFTSESYQQGVLSATILYEILLGKATLYAVLVSALVLMAMVKRKDSRGRAKRSGSGVKQTLNFDLLKLAGDVESNPGPTSMDWIWRILFLVGAATGAHSGPQLQLQESGPGLVKPSETLSLTCTVSGDSISSGDYYWGWIRQPPGKGLEWIGHIYYSGVTYYNPSLKSRVTISVDTSRNQFSLKLSSVTAADTAVYYCTREDSSNWRSRGQGTLVTVSSGSGGGGSGGGGSGGGGSFEEQLKESGGGLFKPTDTLTLTCTVSGFSLSYYGVNWVRQAPGNGLEWIGTIGGSGDTYYASWAKSRSTIIRNTNENTVTLKMTSLTAADTATYFCVRYANIGYEYFNVWGPGTLVTVSSTRASTKGPSVFPLAPSSKSTSGGTAALGCLVKDYFPEPVTVSWNSGALTSGVHTFPAVLQSSGLYSLSSVVTVPSSSLGTQTYICNVNHKPSNTKVDKRVEPKSCIPEDTFFPSPESSCDVKLVEKSFETDTNLNFQNLSVIGFRILLLKVAGFNLLMTLRLWSS

SEQ ID NO: 14080 - protein, 906 aa, Artificial Sequence
  Synthetic Polypeptide
MALPVTALLLPLALLLHAARPEVQLVESGGGLVQPGGSLRLSCAASGFSFSDFWMSWVRQAPGKGLEWVATISQAGSEKDYVDSVKGRFTISRDNAKKSLYLQMNSLRAEDTAVYYCASGVYSFDYRGQGTLVTVSSGTGGGGSGGGGSGGGGSEFQFVLTQSPSVSAALGASAKLTCTLSSAHKTYTIDWYQQQQGEAPRYLMQVKSDGSYTKGTGVPDRFSGSSSGADRYLIIPSVQADDEAGYVCGADDNGGYVFGGGTQLTVTLEGQPKANPTVTLFPPSSEELQANKATLVCLISDFYPGAVTVAWKADGSPVKAGVETTKPSKQSNNKYAASSYLSLTPEQWKSHRSYSCQVTHEGSTVEKTVAPTECSGRADCGFTSESYQQGVLSATILYEILLGKATLYAVLVSALVLMAMVKRKDSRGRAKRSGSGVKQTLNFDLLKLAGDVESNPGPTSMDWIWRILFLVGAATGAHSGPQLQLQESGPGLVKPSETLSLTCTVSGDSISSGDYYWGWIRQPPGKGLEWIGHIYYSGVTYYNPSLKSRVTISVDTSRNQFSLKLSSVTAADTAVYYCTREDSSNWRSRGQGTLVTVSSGSGGGGSGGGGSGGGGSFEQSVKESEGGLFKPTDTLTLTCTVSGFSLSRHALTWVRQAPGNGLEWIGAIDNAGTTYYASWAKSRSTITRNTDLHTVTLKMTSLTASDTATYFCARVFYDINSGYYLDGMDLWGPGTLVTVSSTRASTKGPSVFPLAPSSKSTSGGTAALGCLVKDYFPEPVTVSWNSGALTSGVHTFPAVLQSSGLYSLSSVVTVPSSSLGTQTYICNVNHKPSNTKVDKRVEPKSCIPEDTFFPSPESSCDVKLVEKSFETDTNLNFQNLSVIGFRILLLKVAGFNLLMTLRLWSS

SEQ ID NO: 14081 - protein, 900 aa, Artificial Sequence
  Synthetic Polypeptide
MALPVTALLLPLALLLHAARPEVQLVESGGGLVQPGGSLRLSCAASGFSFSDFWMSWVRQAPGKGLEWVATISQAGSEKDYVDSVKGRFTISRDNAKKSLYLQMNSLRAEDTAVYYCASGVYSFDYRGQGTLVTVSSGTGGGGSGGGGSGGGGSEFDIQMTQSPSSLSASVGDRVTITCRASQGISSWLAWYQQKPEKAPKSLIYAASSLQSGVPSRFSGSGSGTDFTLTISSLQPEDFATYYCQQYNSYPPTFGGGTKVEIKLEGQPKANPTVTLFPPSSEELQANKATLVCLISDFYPGAVTVAWKADGSPVKAGVETTKPSKQSNNKYAASSYLSLTPEQWKSHRSYSCQVTHEGSTVEKTVAPTECSGRADCGFTSESYQQGVLSATILYEILLGKATLYAVLVSALVLMAMVKRKDSRGRAKRSGSGVKQTLNFDLLKLAGDVESNPGPTSMDWIWRILFLVGAATGAHSGPQLQLQESGPGLVKPSETLSLTCTVSGDSISSGDYYWGWIRQPPGKGLEWIGHIYYSGVTYYNPSLKSRVTISVDTSRNQFSLKLSSVTAADTAVYYCTREDSSNWRSRGQGTLVTVSSGSGGGGSGGGGSGGGGSFEEVQLVESGGGLVQPGESLRLSCVASGFTFSRYKMNWVRQAPGKGLEWVSYISRSGRDIYYADSVKGRFTISRDNAKNSLYLQMNSLRDEDTAVYYCAGTVTTYYYFGMDVWGHGTTVTVSSTRASTKGPSVFPLAPSSKSTSGGTAALGCLVKDYFPEPVTVSWNSGALTSGVHTFPAVLQSSGLYSLSSVVTVPSSSLGTQTYICNVNHKPSNTKVDKRVEPKSCIPEDTFFPSPESSCDVKLVEKSFETDTNLNFQNLSVIGFRILLLKVAGFNLLMTLRLWSS

SEQ ID NO: 14082 - protein, 901 aa, Artificial Sequence
  Synthetic Polypeptide
MALPVTALLLPLALLLHAARPEVQLVESGGGLVQPGGSLRLSCAASGFSFSDFWMSWVRQAPGKGLEWVATISQAGSEKDYVDSVKGRFTISRDNAKKSLYLQMNSLRAEDTAVYYCASGVYSFDYRGQGTLVTVSSGTGGGGSGGGGSGGGGSEFDIQMTQSPSSLSASVGDRVTITCRASQGISSWLAWYQQKPEKAPKSLIYAASSLQSGVPSRFSGSGSGTDFTLTISSLQPEDFATYYCQQYNSYPPTFGGGTKVEIKLEGQPKANPTVTLFPPSSEELQANKATLVCLISDFYPGAVTVAWKADGSPVKAGVETTKPSKQSNNKYAASSYLSLTPEQWKSHRSYSCQVTHEGSTVEKTVAPTECSGRADCGFTSESYQQGVLSATILYEILLGKATLYAVLVSALVLMAMVKRKDSRGRAKRSGSGVKQTLNFDLLKLAGDVESNPGPTSMDWIWRILFLVGAATGAHSGPQLQLQESGPGLVKPSETLSLTCTVSGDSISSGDYYWGWIRQPPGKGLEWIGHIYYSGVTYYNPSLKSRVTISVDTSRNQFSLKLSSVTAADTAVYYCTREDSSNWRSRGQGTLVTVSSGSGGGGSGGGGSGGGGSFEEVQLVESGGGSVQPGESLRLSCVASGFTFSRYKMNWVRQAPGKGLEWVSYISRSGRDIYYADSVKGRFTISRDNAKNSLYLQMNSLRDEDTAVYYCAGTVTTYYYDFGMDVWGQGTTVTVSSTRASTKGPSVFPLAPSSKSTSGGTAALGCLVKDYFPEPVTVSWNSGALTSGVHTFPAVLQSSGLYSLSSVVTVPSSSLGTQTYICNVNHKPSNTKVDKRVEPKSCIPEDTFFPSPESSCDVKLVEKSFETDTNLNFQNLSVIGFRILLLKVAGFNLLMTLRLWSS

SEQ ID NO: 14083 - protein, 899 aa, Artificial Sequence
  Synthetic Polypeptide
MALPVTALLLPLALLLHAARPEVQLVESGGGLVQPGGSLRLSCAASGFSFSDFWMSWVRQAPGKGLEWVATISQAGSEKDYVDSVKGRFTISRDNAKKSLYLQMNSLRAEDTAVYYCASGVYSFDYRGQGTLVTVSSGTGGGGSGGGGSGGGGSEFQSVLTQPPSASGTPGQRVTISCSGSRSNVGGNYVFWYQQVPGATPKLLIYRSNQRPSGVPDRFAGSKSGSSASLAISGLRSEDEADYYCATWDDSLSGFVFGTGTKVTVLGLEGQPKANPTVTLFPPSSEELQANKATLVCLISDFYPGAVTVAWKADGSPVKAGVETTKPSKQSNNKYAASSYLSLTPEQWKSHRSYSCQVTHEGSTVEKTVAPTECSGRADCGFTSESYQQGVLSATILYEILLGKATLYAVLVSALVLMAMVKRKDSRGRAKRSGSGVKQTLNFDLLKLAGDVESNPGPTSMDWIWRILFLVGAATGAHSGPQLQLQESGPGLVKPSETLSLTCTVSGDSISSGDYYWGWIRQPPGKGLEWIGHIYYSGVTYYNPSLKSRVTISVDTSRNQFSLKLSSVTAADTAVYYCTREDSSNWRSRGQGTLVTVSSGSGGGGSGGGGSGGGGSFEVQLVESGGGLVKPGGSLRLSCAASGFTFSDYYMSWIRQAPGKGLEWVSYISSSGSTIYYADSVKGRFTISRDNAKNSLYLQMNSLRAEDTAVYYCARGYGKAYDQWGQGTLVTVSSTRASTKGPSVFPLAPSSKSTSGGTAALGCLVKDYFPEPVTVSWNSGALTSGVHTFPAVLQSSGLYSLSSVVTVPSSSLGTQTYICNVNHKPSNTKVDKRVEPKSCIPEDTFFPSPESSCDVKLVEKSFETDTNLNFQNLSVIGFRILLLKVAGFNLLMTLRLWSS

SEQ ID NO: 14084 - protein, 898 aa, Artificial Sequence
  Synthetic Polypeptide
MALPVTALLLPLALLLHAARPEVQLVESGGGLVQPGGSLRLSCAASGFSFSDFWMSWVRQAPGKGLEWVATISQAGSEKDYVDSVKGRFTISRDNAKKSLYLQMNSLRAEDTAVYYCASGVYSFDYRGQGTLVTVSSGTGGGGSGGGGSGGGGSEFQSVVTQPPSMSAAPGQQVTISCSGGNSNIERNYVSWYLQLPGTAPKLVIFDNDRRPSGIPDRFSGSKSGTSATLGITGLQTGDEADYYCGTWDSSLRGWVFGGGTKLTVLGLEGQPKANPTVTLFPPSSEELQANKATLVCLISDFYPGAVTVAWKADGSPVKAGVETTKPSKQSNNKYAASSYLSLTPEQWKSHRSYSCQVTHEGSTVEKTVAPTECSGRADCGFTSESYQQGVLSATILYEILLGKATLYAVLVSALVLMAMVKRKDSRGRAKRSGSGVKQTLNFDLLKLAGDVESNPGPTSMDWIWRILFLVGAATGAHSGPQLQLQESGPGLVKPSETLSLTCTVSGDSISSGDYYWGWIRQPPGKGLEWIGHIYYSGVTYYNPSLKSRVTISVDTSRNQFSLKLSSVTAADTAVYYCTREDSSNWRSRGQGTLVTVSSGSGGGGSGGGGSGGGGSFEVQLVESGGGLIQPGGSLRLSCAASGFTFSNYAMNWVRQAPGKGLEWVSTINGRGSSTIYADSVKGRFTISRDNSKNTLYLQMNSLRAEDTATYYCARYISRGLGDSWGQGTLVTVTRASTKGPSVFPLAPSSKSTSGGTAALGCLVKDYFPEPVTVSWNSGALTSGVHTFPAVLQSSGLYSLSSVVTVPSSSLGTQTYICNVNHKPSNTKVDKRVEPKSCIPEDTFFPSPESSCDVKLVEKSFETDTNLNFQNLSVIGFRILLLKVAGFNLLMTLRLWSS

SEQ ID NO: 14085 - protein, 899 aa, Artificial Sequence
  Synthetic Polypeptide
MALPVTALLLPLALLLHAARPEVQLVESGGGLVQPGGSLRLSCAASGFSFSDFWMSWVRQAPGKGLEWVATISQAGSEKDYVDSVKGRFTISRDNAKKSLYLQMNSLRAEDTAVYYCASGVYSFDYRGQGTLVTVSSGTGGGGSGGGGSGGGGSEFDVVMTQTPLSLPVSLGDQASISCRSSQSLVHSNGNTYLHWYLQKPGQSPKLLIYKVSNRFSGVPDRFSGSGSGTDFTLKISRVEAEDLGVYFCSQNTPVPPKFGSGTKLEIKLEGQPKANPTVTLFPPSSEELQANKATLVCLISDFYPGAVTVAWKADGSPVKAGVETTKPSKQSNNKYAASSYLSLTPEQWKSHRSYSCQVTHEGSTVEKTVAPTECSGRADCGFTSESYQQGVLSATILYEILLGKATLYAVLVSALVLMAMVKRKDSRGRAKRSGSGVKQTLNFDLLKLAGDVESNPGPTSMDWIWRILFLVGAATGAHSGPQLQLQESGPGLVKPSETLSLTCTVSGDSISSGDYYWGWIRQPPGKGLEWIGHIYYSGVTYYNPSLKSRVTISVDTSRNQFSLKLSSVTAADTAVYYCTREDSSNWRSRGQGTLVTVSSGSGGGGSGGGGSGGGGSFEQVQLQQSGAELVRPGASVKLSCKASGYTFNDYEMHWVKQTPVHGLKWIGALEPKTGDTAYSQKFKGKATLTADKSSSTAYMELRSLTSEDSAVYYCTSCYYYTYSGQGTLVTVSATRASTKGPSVFPLAPSSKSTSGGTAALGCLVKDYFPEPVTVSWNSGALTSGVHTFPAVLQSSGLYSLSSVVTVPSSSLGTQTYICNVNHKPSNTKVDKRVEPKSCIPEDTFFPSPESSCDVKLVEKSFETDTNLNFQNLSVIGFRILLLKVAGFNLLMTLRLWSS

SEQ ID NO: 14086 - protein, 898 aa, Artificial Sequence
  Synthetic Polypeptide
MALPVTALLLPLALLLHAARPEVQLVESGGGLVQPGGSLRLSCAASGFSFSDFWMSWVRQAPGKGLEWVATISQAGSEKDYVDSVKGRFTISRDNAKKSLYLQMNSLRAEDTAVYYCASGVYSFDYRGQGTLVTVSSGTGGGGSGGGGSGGGGSEFDIQLTQSPSSLSASVGDRVTITCRASQGIRNDLGWYQQKPGKAPKRLIYAASSLQNGVPSRFSGSGSGTEFTLTISSLQPEDFATYYCLQHNTYPAFGQGTKVEIKRLEGQPKANPTVTLFPPSSEELQANKATLVCLISDFYPGAVTVAWKADGSPVKAGVETTKPSKQSNNKYAASSYLSLTPEQWKSHRSYSCQVTHEGSTVEKTVAPTECSGRADCGFTSESYQQGVLSATILYEILLGKATLYAVLVSALVLMAMVKRKDSRGRAKRSGSGVKQTLNFDLLKLAGDVESNPGPTSMDWIWRILFLVGAATGAHSGPQLQLQESGPGLVKPSETLSLTCTVSGDSISSGDYYWGWIRQPPGKGLEWIGHIYYSGVTYYNPSLKSRVTISVDTSRNQFSLKLSSVTAADTAVYYCTREDSSNWRSRGQGTLVTVSSGSGGGGSGGGGSGGGGSFEQVQLQESGPGLVKPSQTLSLTCTVSGGSISSFNYYWSWIRHHPGKGLEWIGYIYYSGSTYSNPSLKSRVTISVDTSKNQFSLTLSSVTAADTAVYYCARGYNWNYFDYWGQGTLVTVSSTRASTKGPSVFPLAPSSKSTSGGTAALGCLVKDYFPEPVTVSWNSGALTSGVHTFPAVLQSSGLYSLSSVVTVPSSSLGTQTYICNVNHKPSNTKVDKRVEPKSCIPEDTFFPSPESSCDVKLVEKSFETDTNLNFQNLSVIGFRILLLKVAGFNLLMTLRLWSS

SEQ ID NO: 14087 - protein, 900 aa, Artificial Sequence
  Synthetic Polypeptide
MALPVTALLLPLALLLHAARPEVQLVESGGGLVQPGGSLRLSCAASGFSFSDFWMSWVRQAPGKGLEWVATISQAGSEKDYVDSVKGRFTISRDNAKKSLYLQMNSLRAEDTAVYYCASGVYSFDYRGQGTLVTVSSGTGGGGSGGGGSGGGGSEFDDIVLTQSPASLAVSLGQSVTISCRASESVEYYGTSLMQWYQQKPGQPPKLLIYATSNVESGVPARFSGSGSGTDFSLNIHPVEEDDIAMYFCQQSRKLPSTFGGGTKLEIKLEGQPKANPTVTLFPPSSEELQANKATLVCLISDFYPGAVTVAWKADGSPVKAGVETTKPSKQSNNKYAASSYLSLTPEQWKSHRSYSCQVTHEGSTVEKTVAPTECSGRADCGFTSESYQQGVLSATILYEILLGKATLYAVLVSALVLMAMVKRKDSRGRAKRSGSGVKQTLNFDLLKLAGDVESNPGPTSMDWIWRILFLVGAATGAHSGPQLQLQESGPGLVKPSETLSLTCTVSGDSISSGDYYWGWIRQPPGKGLEWIGHIYYSGVTYYNPSLKSRVTISVDTSRNQFSLKLSSVTAADTAVYYCTREDSSNWRSRGQGTLVTVSSGSGGGGSGGGGSGGGGSFEDVRLQESGPGQVKPSQTVSLTCSVTGYSITNGNHWWNWIRQVSGSKLEWIGYISSSGSTDSNPSLKSRISITRDTSKNQLFLQLNSVTTEDIATYYCARGYYFDYWGQGTTLTVSSTRASTKGPSVFPLAPSSKSTSGGTAALGCLVKDYFPEPVTVSWNSGALTSGVHTFPAVLQSSGLYSLSSVVTVPSSSLGTQTYICNVNHKPSNTKVDKRVEPKSCIPEDTFFPSPESSCDVKLVEKSFETDTNLNFQNLSVIGFRILLLKVAGFNLLMTLRLWSS

SEQ ID NO: 14088 - protein, 899 aa, Artificial Sequence
  Synthetic Polypeptide
MALPVTALLLPLALLLHAARPEVQLVESGGGLVQPGGSLRLSCAASGFSFSDFWMSWVRQAPGKGLEWVATISQAGSEKDYVDSVKGRFTISRDNAKKSLYLQMNSLRAEDTAVYYCASGVYSFDYRGQGTLVTVSSGTGGGGSGGGGSGGGGSEFDIQMTQSPSSLSASVGDRVTITCRASQDVNTAVAWYQQKPGKAPKLLIYSASFLESGVPSRFSGSRSGTDFTLTISSLQPEDFATYYCQQHYTTPPTFGQTKVEIKRLEGQPKANPTVTLFPPSSEELQANKATLVCLISDFYPGAVTVAWKADGSPVKAGVETTKPSKQSNNKYAASSYLSLTPEQWKSHRSYSCQVTHEGSTVEKTVAPTECSGRADCGFTSESYQQGVLSATILYEILLGKATLYAVLVSALVLMAMVKRKDSRGRAKRSGSGVKQTLNFDLLKLAGDVESNPGPTSMDWIWRILFLVGAATGAHSGPQLQLQESGPGLVKPSETLSLTCTVSGDSISSGDYYWGWIRQPPGKGLEWIGHIYYSGVTYYNPSLKSRVTISVDTSRNQFSLKLSSVTAADTAVYYCTREDSSNWRSRGQGTLVTVSSGSGGGGSGGGGSGGGGSFEEVQLVESGGGLVQPGGSLRLSCAASGFNIKDTYIHWVRQAPGKGLEWVARIYPTNGYTRYADSVKGRFTISADTSKNTAYLQMNSLRAEDTAVYYCSRWGGDGFYAMDVWGQGTLVTVSSTRASTKGPSVFPLAPSSKSTSGGTAALGCLVKDYFPEPVTVSWNSGALTSGVHTFPAVLQSSGLYSLSSVVTVPSSSLGTQTYICNVNHKPSNTKVDKRVEPKSCIPEDTFFPSPESSCDVKLVEKSFETDTNLNFQNLSVIGFRILLLKVAGFNLLMTLRLWSS

SEQ ID NO: 14089 - protein, 898 aa, Artificial Sequence
  Synthetic Polypeptide
MALPVTALLLPLALLLHAARPEVQLVESGGGLVQPGGSLRLSCAASGFSFSDFWMSWVRQAPGKGLEWVATISQAGSEKDYVDSVKGRFTISRDNAKKSLYLQMNSLRAEDTAVYYCASGVYSFDYRGQGTLVTVSSGTGGGGSGGGGSGGGGSEFDQSVLTQPPSVSVAPGKTARIPCEGNYIGSSNVHWYQQKPGQAPVLVIHFDSDRPSGIPDRFSGSNSGNMATLTISRVEAGDEADYYCQVWENHGWVFGGGTKLTVLSLEGQPKANPTVTLFPPSSEELQANKATLVCLISDFYPGAVTVAWKADGSPVKAGVETTKPSKQSNNKYAASSYLSLTPEQWKSHRSYSCQVTHEGSTVEKTVAPTECSGRADCGFTSESYQQGVLSATILYEILLGKATLYAVLVSALVLMAMVKRKDSRGRAKRSGSGVKQTLNFDLLKLAGDVESNPGPTSMDWIWRILFLVGAATGAHSGPQLQLQESGPGLVKPSETLSLTCTVSGDSISSGDYYWGWIRQPPGKGLEWIGHIYYSGVTYYNPSLKSRVTISVDTSRNQFSLKLSSVTAADTAVYYCTREDSSNWRSRGQGTLVTVSSGSGGGGSGGGGSGGGGSFEEVQLVETGGGLVQPGESLRLSCAASGFTFSDYEMNWVRQAPGKGLEWVSYISSSGSTIYYADSVKGRFTIYRDNAKNSLYLQMNSLRAEDTALYYCARAWGVGPPDYWGQGTLVTVSSTRASTKGPSVFPLAPSSKSTSGGTAALGCLVKDYFPEPVTVSWNSGALTSGVHTFPAVLQSSGLYSLSSVVTVPSSSLGTQTYICNVNHKPSNTKVDKRVEPKSCIPEDTFFPSPESSCDVKLVEKSFETDTNLNFQNLSVIGFRILLLKVAGFNLLMTLRLWSS

SEQ ID NO: 14090 - protein, 906 aa, Artificial Sequence
  Synthetic Polypeptide
MALPVTALLLPLALLLHAARPEVQLVESGGGLVQPGGSLRLSCAASGFSFSDFWMSWVRQAPGKGLEWVATISQAGSEKDYVDSVKGRFTISRDNAKKSLYLQMNSLRAEDTAVYYCASGVYSFDYRGQGTLVTVSSGTGGGGSGGGGSGGGGSEFDIQMTQSPSSLSASVGDTVTITCQANGYLNWYQQRRGKAPKLLIYDGSKLERGVPSRFSGRRWGQEYNLTINNLQPEDIATYFCQVYEFVVPGTRLDLKRTVAAPLEGQPKANPTVTLFPPSSEELQANKATLVCLISDFYPGAVTVAWKADGSPVKAGVETTKPSKQSNNKYAASSYLSLTPEQWKSHRSYSCQVTHEGSTVEKTVAPTECSGRADCGFTSESYQQGVLSATILYEILLGKATLYAVLVSALVLMAMVKRKDSRGRAKRSGSGVKQTLNFDLLKLAGDVESNPGPTSMDWIWRILFLVGAATGAHSGPQLQLQESGPGLVKPSETLSLTCTVSGDSISSGDYYWGWIRQPPGKGLEWIGHIYYSGVTYYNPSLKSRVTISVDTSRNQFSLKLSSVTAADTAVYYCTREDSSNWRSRGQGTLVTVSSGSGGGGSGGGGSGGGGSFEQVQLLQSGAAVTKPGASVRVSCEASGYNIRDYFIHWWRQAPGQGLQWVGWINPKTGQPNNPRQFQGRVSLTRHASWDFDTFSFYMDLKALRSDDTAVYFCARQRSDYWDFDVWGSGTQVTVSSASTKGPTRASTKGPSVFPLAPSSKSTSGGTAALGCLVKDYFPEPVTVSWNSGALTSGVHTFPAVLQSSGLYSLSSVVTVPSSSLGTQTYICNVNHKPSNTKVDKRVEPKSCIPEDTFFPSPESSCDVKLVEKSFETDTNLNFQNLSVIGFRILLLKVAGFNLLMTLRLWSS

SEQ ID NO: 14091 - protein, 912 aa, Artificial Sequence
  Synthetic Polypeptide
MALPVTALLLPLALLLHAARPEVQLVESGGGLVQPGGSLRLSCAASGFSFSDFWMSWVRQAPGKGLEWVATISQAGSEKDYVDSVKGRFTISRDNAKKSLYLQMNSLRAEDTAVYYCASGVYSFDYRGQGTLVTVSSGTGGGGSGGGGSGGGGSEFQSALTQPPSASGSPGQSITISCTGTSNNFVSWYQQHAGKAPKLVIYDVNKRPSGVPDRFSGSKSGNTASLTVSGLQTDDEAVYYCGSLVGNWDVIFGGGTKLTVLLEGQPKANPTVTLFPPSSEELQANKATLVCLISDFYPGAVTVAWKADGSPVKAGVETTKPSKQSNNKYAASSYLSLTPEQWKSHRSYSCQVTHEGSTVEKTVAPTECSGRADCGFTSESYQQGVLSATILYEILLGKATLYAVLVSALVLMAMVKRKDSRGRAKRSGSGVKQTLNFDLLKLAGDVESNPGPTSMDWIWRILFLVGAATGAHSGPQLQLQESGPGLVKPSETLSLTCTVSGDSISSGDYYWGWIRQPPGKGLEWIGHIYYSGVTYYNPSLKSRVTISVDTSRNQFSLKLSSVTAADTAVYYCTREDSSNWRSRGQGTLVTVSSGSGGGGSGGGGSGGGGSFEQPQLQESGPTLVEASETLSLTCAVSGDSTAACNSFWGWVRQPPGKGLEWVGSLSHCASYWNRGWTYHNPSLKSRLTLALDTPKNLVFLKLNSVTAADTATYYCARFGGEVLRYTDWPKPAWVDLWGRGTLVTVSSTRASTKGPSVFPLAPSSKSTSGGTAALGCLVKDYFPEPVTVSWNSGALTSGVHTFPAVLQSSGLYSLSSVVTVPSSSLGTQTYICNVNHKPSNTKVDKRVEPKSCIPEDTFFPSPESSCDVKLVEKSFETDTNLNFQNLSVIGFRILLLKVAGFNLLMTLRLWSS

SEQ ID NO: 14092 - protein, 897 aa, Artificial Sequence
  Synthetic Polypeptide
MALPVTALLLPLALLLHAARPEVQLVESGGGLVQPGGSLRLSCAASGFSFSDFWMSWVRQAPGKGLEWVATISQAGSEKDYVDSVKGRFTISRDNAKKSLYLQMNSLRAEDTAVYYCASGVYSFDYRGQGTLVTVSSGTGGGGSGGGGSGGGGSEFEIVLTQSPGTLSLSPGETAIISCRTSQYGSLAWYQQRPGQAPRLVIYSGSTRAAGIPDRFSGSRWGPDYNLTISNLESGDFGVYYCQQYEFFGQGTKVQVDIKRLEGQPKANPTVTLFPPSSEELQANKATLVCLISDFYPGAVTVAWKADGSPVKAGVETTKPSKQSNNKYAASSYLSLTPEQWKSHRSYSCQVTHEGSTVEKTVAPTECSGRADCGFTSESYQQGVLSATILYEILLGKATLYAVLVSALVLMAMVKRKDSRGRAKRSGSGVKQTLNFDLLKLAGDVESNPGPTSMDWIWRILFLVGAATGAHSGPQLQLQESGPGLVKPSETLSLTCTVSGDSISSGDYYWGWIRQPPGKGLEWIGHIYYSGVTYYNPSLKSRVTISVDTSRNQFSLKLSSVTAADTAVYYCTREDSSNWRSRGQGTLVTVSSGSGGGGSGGGGSGGGGSFEQVQLVQSGGQMKKPGESMRISCRASGYEFIDCTLNWIRLAPGKRPEWMGWLKPRGGAVNYARPLQGRVTMTRDVYSDTAFLELRSLTVDDTAVYFCTRGKNCDYNWDFEHWGRGTPVIVSSTRASTKGPSVFPLAPSSKSTSGGTAALGCLVKDYFPEPVTVSWNSGALTSGVHTFPAVLQSSGLYSLSSVVTVPSSSLGTQTYICNVNHKPSNTKVDKRVEPKSCIPEDTFFPSPESSCDVKLVEKSFETDTNLNFQNLSVIGFRILLLKVAGFNLLMTLRLWSS

SEQ ID NO: 14093 - protein, 907 aa, Artificial Sequence
  Synthetic Polypeptide
MALPVTALLLPLALLLHAARPEVQLVESGGGLVQPGGSLRLSCAASGFSFSDFWMSWVRQAPGKGLEWVATISQAGSEKDYVDSVKGRFTISRDNAKKSLYLQMNSLRAEDTAVYYCASGVYSFDYRGQGTLVTVSSGTGGGGSGGGGSGGGGSEFELVLTQSPGTLSLSAGERATLSCRASQSVSSGSLAWYQQKPGQAPRLLIYGASTRATGIPDRFSGSGSGTDFTLTIGRLEPEDLAVYYCQQYGTSPYTFGQGTKLEILEGQPKANPTVTLFPPSSEELQANKATLVCLISDFYPGAVTVAWKADGSPVKAGVETTKPSKQSNNKYAASSYLSLTPEQWKSHRSYSCQVTHEGSTVEKTVAPTECSGRADCGFTSESYQQGVLSATILYEILLGKATLYAVLVSALVLMAMVKRKDSRGRAKRSGSGVKQTLNFDLLKLAGDVESNPGPTSMDWIWRILFLVGAATGAHSGPQLQLQESGPGLVKPSETLSLTCTVSGDSISSGDYYWGWIRQPPGKGLEWIGHIYYSGVTYYNPSLKSRVTISVDTSRNQFSLKLSSVTAADTAVYYCTREDSSNWRSRGQGTLVTVSSGSGGGGSGGGGSGGGGSFELEQSGAEVKKPGSSVQVSCKASGGTFSMYGFNWVRQAPGHGLEWMGGIIPIFGTSNYAQKFRGRVTFTADQATSTAYMELTNLRSDDTAVYYCARDFGPDWEDGDSYDGSGRGFFDFWGQGTLVTVSSTRASTKGPSVFPLAPSSKSTSGGTAALGCLVKDYFPEPVTVSWNSGALTSGVHTFPAVLQSSGLYSLSSVVTVPSSSLGTQTYICNVNHKPSNTKVDKRVEPKSCIPEDTFFPSPESSCDVKLVEKSFETDTNLNFQNLSVIGFRILLLKVAGFNLLMTLRLWSS

SEQ ID NO: 14094 - protein, 887 aa, Artificial Sequence
  Synthetic Polypeptide
MALPVTALLLPLALLLHAARPEVQLVESGGGLVQPGGSLRLSCAASGFSFSDFWMSWVRQAPGKGLEWVATISQAGSEKDYVDSVKGRFTISRDNAKKSLYLQMNSLRAEDTAVYYCASGVYSFDYRGQGTLVTVSSGTGGGGSGGGGSGGGGSEFDIQMTQSPSSLSASVGDRVTITCQASQDINNYLNWYQQKPGKAPKLLIYDASNLQTGVPSRFSGSGSGTDFTFTIEDIATYYCQQYTFGPGTKVDIKLEGQPKANPTVTLFPPSSEELQANKATLVCLISDFYPGAVTVAWKADGSPVKAGVETTKPSKQSNNKYAASSYLSLTPEQWKSHRSYSCQVTHEGSTVEKTVAPTECSGRADCGFTSESYQQGVLSATILYEILLGKATLYAVLVSALVLMAMVKRKDSRGRAKRSGSGVKQTLNFDLLKLAGDVESNPGPTSMDWIWRILFLVGAATGAHSGPQLQLQESGPGLVKPSETLSLTCTVSGDSISSGDYYWGWIRQPPGKGLEWIGHIYYSGVTYYNPSLKSRVTISVDTSRNQFSLKLSSVTAADTAVYYCTREDSSNWRSRGQGTLVTVSSGSGGGGSGGGGSGGGGSFEEVQLLESGGGLVQPGGSLRLSCAASGFTFSWYSMTWVRQAPGKGLEWVSSIVPWGDFTQYADSVKGRFTISRDNSKNTLYLQMNSLRAEDTAVYYCAKGPGWGSFDLWGRGTLVTVSSTRASTKGPSVFPLAPSSKSTSGGTAALGCLVKDYFPEPVTVSWNSGALTSGVHTFPAVLQSSGLYSLSSVVTVPSSSLGTQTYICNVNHKPSNTKVDKRVEPKSCIPEDTFFPSPESSCDVKLVEKSFETDTNLNFQNLSVIGFRILLLKVAGFNLLMTLRLWSS

SEQ ID NO: 14095 - protein, 897 aa, Artificial Sequence
  Synthetic Polypeptide
MALPVTALLLPLALLLHAARPEVQLVESGGGLVQPGGSLRLSCAASGFSFSDFWMSWVRQAPGKGLEWVATISQAGSEKDYVDSVKGRFTISRDNAKKSLYLQMNSLRAEDTAVYYCASGVYSFDYRGQGTLVTVSSGTGGGGSGGGGSGGGGSEFDIQMTQSPSSLSASVGDRVTITCTASLSVSSTYLHWYQQKPGSSPKLWIYSTSNLASGVPSRFSGSGSGTSYTLTISSLQPEDFATYYCHQYHRSPLTFGGGTKVEIKRLEGQPKANPTVTLFPPSSEELQANKATLVCLISDFYPGAVTVAWKADGSPVKAGVETTKPSKQSNNKYAASSYLSLTPEQWKSHRSYSCQVTHEGSTVEKTVAPTECSGRADCGFTSESYQQGVLSATILYEILLGKATLYAVLVSALVLMAMVKRKDSRGRAKRSGSGVKQTLNFDLLKLAGDVESNPGPTSMDWIWRILFLVGAATGAHSGPQLQLQESGPGLVKPSETLSLTCTVSGDSISSGDYYWGWIRQPPGKGLEWIGHIYYSGVTYYNPSLKSRVTISVDTSRNQFSLKLSSVTAADTAVYYCTREDSSNWRSRGQGTLVTVSSGSGGGGSGGGGSGGGGSFEEVQLVESGGGLVQPGGSLRLSCAASGFSLTKYGVHWVRQAPGKGLEWVGVKWAGGSTDYNSALMSRFTISKDNAKNSLYLQMNSLRAEDTAVYYCARDHRDAMDYWGQGTLVTVSSTRASTKGPSVFPLAPSSKSTSGGTAALGCLVKDYFPEPVTVSWNSGALTSGVHTFPAVLQSSGLYSLSSVVTVPSSSLGTQTYICNVNHKPSNTKVDKRVEPKSCIPEDTFFPSPESSCDVKLVEKSFETDTNLNFQNLSVIGFRILLLKVAGFNLLMTLRLWSS

SEQ ID NO: 14096 - protein, 901 aa, Artificial Sequence
  Synthetic Polypeptide
MALPVTALLLPLALLLHAARPEVQLVESGGGLVQPGGSLRLSCAASGFSFSDFWMSWVRQAPGKGLEWVATISQAGSEKDYVDSVKGRFTISRDNAKKSLYLQMNSLRAEDTAVYYCASGVYSFDYRGQGTLVTVSSGTGGGGSGGGGSGGGGSEFDIQMTQSPSSLSASVGDRVTITCKASQDVGTAVAWYQQKPGKAPKLLIYSASYRSTGVPSRFSGSGSGTDFTLTISSLQPEDFATYYCQHHYSAPWTFGGGTKVEIKLEGQPKANPTVTLFPPSSEELQANKATLVCLISDFYPGAVTVAWKADGSPVKAGVETTKPSKQSNNKYAASSYLSLTPEQWKSHRSYSCQVTHEGSTVEKTVAPTECSGRADCGFTSESYQQGVLSATILYEILLGKATLYAVLVSALVLMAMVKRKDSRGRAKRSGSGVKQTLNFDLLKLAGDVESNPGPTSMDWIWRILFLVGAATGAHSGPQLQLQESGPGLVKPSETLSLTCTVSGDSISSGDYYWGWIRQPPGKGLEWIGHIYYSGVTYYNPSLKSRVTISVDTSRNQFSLKLSSVTAADTAVYYCTREDSSNWRSRGQGTLVTVSSGSGGGGSGGGGSGGGGSFEEVQLVESGGGLVQPGGSLRLSCAASGFTFSRNGMSWVRQAPGKGLEWVATVSSGGSYIYYADSVKGRFTISRDNAKNSLYLQMNSLRAEDTAVYYCARQGTTALATRFFDVWGQGTLVTVSSTRASTKGPSVFPLAPSSKSTSGGTAALGCLVKDYFPEPVTVSWNSGALTSGVHTFPAVLQSSGLYSLSSVVTVPSSSLGTQTYICNVNHKPSNTKVDKRVEPKSCIPEDTFFPSPESSCDVKLVEKSFETDTNLNFQNLSVIGFRILLLKVAGFNLLMTLRLWSS

SEQ ID NO: 14097 - protein, 897 aa, Artificial Sequence
  Synthetic Polypeptide
MALPVTALLLPLALLLHAARPEVQLVESGGGLVQPGGSLRLSCAASGFSFSDFWMSWVRQAPGKGLEWVATISQAGSEKDYVDSVKGRFTISRDNAKKSLYLQMNSLRAEDTAVYYCASGVYSFDYRGQGTLVTVSSGTGGGGSGGGGSGGGGSEFDIQMTQSPPSLSASVGGKVTITCKASQDIDRYMAWYQDKPGKGPKLLIHDTSTLQPGIPSRFSGSGSGRDYSFSISNLEPEDIATYYCLQYDNLWTFGGGTKLEIKRLEGQPKANPTVTLFPPSSEELQANKATLVCLISDFYPGAVTVAWKADGSPVKAGVETTKPSKQSNNKYAASSYLSLTPEQWKSHRSYSCQVTHEGSTVEKTVAPTECSGRADCGFTSESYQQGVLSATILYEILLGKATLYAVLVSALVLMAMVKRKDSRGRAKRSGSGVKQTLNFDLLKLAGDVESNPGPTSMDWIWRILFLVGAATGAHSGPQLQLQESGPGLVKPSETLSLTCTVSGDSISSGDYYWGWIRQPPGKGLEWIGHIYYSGVTYYNPSLKSRVTISVDTSRNQFSLKLSSVTAADTAVYYCTREDSSNWRSRGQGTLVTVSSGSGGGGSGGGGSGGGGSFEQVQLVQSGAELVKPGASVKMSCKASGYIFTNYNIHWVKKSPGQGLEWIGAIYPGNGDAPYSQKFQDRATLTADTSSSTTYMELSSLTSEDSAVYYCVRANWDVAFAYWGQGTLVSVSSTRASTKGPSVFPLAPSSKSTSGGTAALGCLVKDYFPEPVTVSWNSGALTSGVHTFPAVLQSSGLYSLSSVVTVPSSSLGTQTYICNVNHKPSNTKVDKRVEPKSCIPEDTFFPSPESSCDVKLVEKSFETDTNLNFQNLSVIGFRILLLKVAGFNLLMTLRLWSS

SEQ ID NO: 14098 - protein, 898 aa, Artificial Sequence
  Synthetic Polypeptide
MALPVTALLLPLALLLHAARPEVQLVESGGGLVQPGGSLRLSCAASGFSFSDFWMSWVRQAPGKGLEWVATISQAGSEKDYVDSVKGRFTISRDNAKKSLYLQMNSLRAEDTAVYYCASGVYSFDYRGQGTLVTVSSGTGGGGSGGGGSGGGGSEFDIQMTQSPASLSASVGETVTITCRVSGNIHNYLAWYQQKQGKSPQLLVYNAKTLADGVPSRFSGSGSGTQYSLKINSLQPEDFGSYYCQHFWSNPYTFGGGTKLEIKLEGQPKANPTVTLFPPSSEELQANKATLVCLISDFYPGAVTVAWKADGSPVKAGVETTKPSKQSNNKYAASSYLSLTPEQWKSHRSYSCQVTHEGSTVEKTVAPTECSGRADCGFTSESYQQGVLSATILYEILLGKATLYAVLVSALVLMAMVKRKDSRGRAKRSGSGVKQTLNFDLLKLAGDVESNPGPTSMDWIWRILFLVGAATGAHSGPQLQLQESGPGLVKPSETLSLTCTVSGDSISSGDYYWGWIRQPPGKGLEWIGHIYYSGVTYYNPSLKSRVTISVDTSRNQFSLKLSSVTAADTAVYYCTREDSSNWRSRGQGTLVTVSSGSGGGGSGGGGSGGGGSFEQVQLQQSGASVKVSCKASELVRPGTGYAFTNYLIEWVKQRPGQGLEWIGVINPGSGGTNYNEKFKGKATLTADKSSSTAYMQLSSLTSDDSAVYFCARYRSYDWYFDVWGAGTTVTVSSTRASTKGPSVFPLAPSSKSTSGGTAALGCLVKDYFPEPVTVSWNSGALTSGVHTFPAVLQSSGLYSLSSVVTVPSSSLGTQTYICNVNHKPSNTKVDKRVEPKSCIPEDTFFPSPESSCDVKLVEKSFETDTNLNFQNLSVIGFRILLLKVAGFNLLMTLRLWSS

SEQ ID NO: 14099 - protein, 897 aa, Artificial Sequence
  Synthetic Polypeptide
MALPVTALLLPLALLLHAARPEVQLVESGGGLVQPGGSLRLSCAASGFSFSDFWMSWVRQAPGKGLEWVATISQAGSEKDYVDSVKGRFTISRDNAKKSLYLQMNSLRAEDTAVYYCASGVYSFDYRGQGTLVTVSSGTGGGGSGGGGSGGGGSEFDIQMTQSFSSLSASVGDRVTITCRASQDISNYLNWYQQKPGKAPKLLIYYTSRLHSGVPSRFSGSGSGTDYTLTISSLQPEDFATYFCQQGNTLPWTFGGGTKLEIKRLEGQPKANPTVTLFPPSSEELQANKATLVCLISDFYPGAVTVAWKADGSPVKAGVETTKPSKQSNNKYAASSYLSLTPEQWKSHRSYSCQVTHEGSTVEKTVAPTECSGRADCGFTSESYQQGVLSATILYEILLGKATLYAVLVSALVLMAMVKRKDSRGRAKRSGSGVKQTLNFDLLKLAGDVESNPGPTSMDWIWRILFLVGAATGAHSGPQLQLQESGPGLVKPSETLSLTCTVSGDSISSGDYYWGWIRQPPGKGLEWIGHIYYSGVTYYNPSLKSRVTISVDTSRNQFSLKLSSVTAADTAVYYCTREDSSNWRSRGQGTLVTVSSGSGGGGSGGGGSGGGGSFEEVQLVQSGGGLVQSGGSLRLSCRASGYTFTRYWMLWVRQRPGKGLEWVAEINPRNDRTNYNEKFKTRFTISVDRSKNTLYLQMDSLRAEDTAVYFCALGGGYAMDYWGQGTLVTVSSTRASTKGPSVFPLAPSSKSTSGGTAALGCLVKDYFPEPVTVSWNSGALTSGVHTFPAVLQSSGLYSLSSVVTVPSSSLGTQTYICNVNHKPSNTKVDKRVEPKSCIPEDTFFPSPESSCDVKLVEKSFETDTNLNFQNLSVIGFRILLLKVAGFNLLMTLRLWSS

SEQ ID NO: 14100 - protein, 898 aa, Artificial Sequence
  Synthetic Polypeptide
MALPVTALLLPLALLLHAARPEVQLVESGGGLVQPGGSLRLSCAASGFSFSDFWMSWVRQAPGKGLEWVATISQAGSEKDYVDSVKGRFTISRDNAKKSLYLQMNSLRAEDTAVYYCASGVYSFDYRGQGTLVTVSSGTGGGGSGGGGSGGGGSEFDIQMTQSPASLSASVGETVTIICRASVNIYSYLAWYQQKQGKSPQLLVYNAKILAEGVPSRFSGSGSGTQFSLKINSLQPEDFGSYYCQHHYGTFTFGSGTKLEIKRLEGQPKANPTVTLFPPSSEELQANKATLVCLISDFYPGAVTVAWKADGSPVKAGVETTKPSKQSNNKYAASSYLSLTPEQWKSHRSYSCQVTHEGSTVEKTVAPTECSGRADCGFTSESYQQGVLSATILYEILLGKATLYAVLVSALVLMAMVKRKDSRGRAKRSGSGVKQTLNFDLLKLAGDVESNPGPTSMDWIWRILFLVGAATGAHSGPQLQLQESGPGLVKPSETLSLTCTVSGDSISSGDYYWGWIRQPPGKGLEWIGHIYYSGVTYYNPSLKSRVTISVDTSRNQFSLKLSSVTAADTAVYYCTREDSSNWRSRGQGTLVTVSSGSGGGGSGGGGSGGGGSFEQVQLKESGPGLVAPSQSLSITCTISGFSLTSYGVHWVRQPPGKGLEWLVVIWSDGSTTYNSALKSRLSISKDNSKSQVFLKMNSLQTDDTAIYYCASHYGSTLAFASWGHGTLVTVSAATRASTKGPSVFPLAPSSKSTSGGTAALGCLVKDYFPEPVTVSWNSGALTSGVHTFPAVLQSSGLYSLSSVVTVPSSSLGTQTYICNVNHKPSNTKVDKRVEPKSCIPEDTFFPSPESSCDVKLVEKSFETDTNLNFQNLSVIGFRILLLKVAGFNLLMTLRLWSS

SEQ ID NO: 14101 - protein, 906 aa, Artificial Sequence
  Synthetic Polypeptide
MALPVTALLLPLALLLHAARPEVQLVESGGGLVQPGGSLRLSCAASGFSFSDFWMSWVRQAPGKGLEWVATISQAGSEKDYVDSVKGRFTISRDNAKKSLYLQMNSLRAEDTAVYYCASGVYSFDYRGQGTLVTVSSGTGGGGSGGGGSGGGGSEFDIVMTQSHKFMSTSVGDRVSVTCKASQNVGNNVAWYQQKPGQSPKVLIYSASYRYSGVPDRFTGSGSGTDFTLTISNVQSEDLAEYFCQQYNTYPFTFGSGTKLEIKLEGQPKANPTVTLFPPSSEELQANKATLVCLISDFYPGAVTVAWKADGSPVKAGVETTKPSKQSNNKYAASSYLSLTPEQWKSHRSYSCQVTHEGSTVEKTVAPTECSGRADCGFTSESYQQGVLSATILYEILLGKATLYAVLVSALVLMAMVKRKDSRGRAKRSGSGVKQTLNFDLLKLAGDVESNPGPTSMDWIWRILFLVGAATGAHSGPQLQLQESGPGLVKPSETLSLTCTVSGDSISSGDYYWGWIRQPPGKGLEWIGHIYYSGVTYYNPSLKSRVTISVDTSRNQFSLKLSSVTAADTAVYYCTREDSSNWRSRGQGTLVTVSSGSGGGGSGGGGSGGGGSFEEVQLEESGGGLVQPGGSMKLSCVASGFTFSNYWMNWVRQSPEKGLEWVAEIRFKSHNYATHFAESVKGRFTISRDDSKSSVYLQMNNLRAEDTGIYYCTRRIGNSDYDWWYFDVWGAGTSVTVSSASTRASTKGPSVFPLAPSSKSTSGGTAALGCLVKDYFPEPVTVSWNSGALTSGVHTFPAVLQSSGLYSLSSVVTVPSSSLGTQTYICNVNHKPSNTKVDKRVEPKSCIPEDTFFPSPESSCDVKLVEKSFETDTNLNFQNLSVIGFRILLLKVAGFNLLMTLRLWSS

SEQ ID NO: 14102 - protein, 899 aa, Artificial Sequence
  Synthetic Polypeptide
MALPVTALLLPLALLLHAARPEVQLVESGGGLVQPGGSLRLSCAASGFSFSDFWMSWVRQAPGKGLEWVATISQAGSEKDYVDSVKGRFTISRDNAKKSLYLQMNSLRAEDTAVYYCASGVYSFDYRGQGTLVTVSSGTGGGGSGGGGSGGGGSEFDQIVLTQSPAIMSASPGEKVTISCSASSSVSYMYWYQQKPGSSPKPWIYRTSNLASGVPARFSGSGSGTSYSLTISNMEAEDAAAYYCQQYHSYPTTFGGGTKLEVKLEGQPKANPTVTLFPPSSEELQANKATLVCLISDFYPGAVTVAWKADGSPVKAGVETTKPSKQSNNKYAASSYLSLTPEQWKSHRSYSCQVTHEGSTVEKTVAPTECSGRADCGFTSESYQQGVLSATILYEILLGKATLYAVLVSALVLMAMVKRKDSRGRAKRSGSGVKQTLNFDLLKLAGDVESNPGPTSMDWIWRILFLVGAATGAHSGPQLQLQESGPGLVKPSETLSLTCTVSGDSISSGDYYWGWIRQPPGKGLEWIGHIYYSGVTYYNPSLKSRVTISVDTSRNQFSLKLSSVTAADTAVYYCTREDSSNWRSRGQGTLVTVSSGSGGGGSGGGGSGGGGSFEEVQLVESGGGLVQPKGSLKLSCAASGFSFNTYAMNWVRQAPGKGLEWIAHIRSKSNNFATYYADSVKDRFSISRDASENILFLQMNNLKTEDTAMYYCVRQGGDFPMDYWGQGTSVTVSSTRASTKGPSVFPLAPSSKSTSGGTAALGCLVKDYFPEPVTVSWNSGALTSGVHTFPAVLQSSGLYSLSSVVTVPSSSLGTQTYICNVNHKPSNTKVDKRVEPKSCIPEDTFFPSPESSCDVKLVEKSFETDTNLNFQNLSVIGFRILLLKVAGFNLLMTLRLWSS

SEQ ID NO: 14103 - protein, 898 aa, Artificial Sequence
  Synthetic Polypeptide
MALPVTALLLPLALLLHAARPEVQLVESGGGLVQPGGSLRLSCAASGFSFSDFWMSWVRQAPGKGLEWVATISQAGSEKDYVDSVKGRFTISRDNAKKSLYLQMNSLRAEDTAVYYCASGVYSFDYRGQGTLVTVSSGTGGGGSGGGGSGGGGSEFDDIQMTQSSSSFSVSLGDRVTITCMASEDIYIRLAWYQQKPGNAPRLLISAATSLETGVPSRFSGSGSGKDYTLSITSLQTEDVGTYYCQQYWSSPWTFGGGTKLEINLEGQPKANPTVTLFPPSSEELQANKATLVCLISDFYPGAVTVAWKADGSPVKAGVETTKPSKQSNNKYAASSYLSLTPEQWKSHRSYSCQVTHEGSTVEKTVAPTECSGRADCGFTSESYQQGVLSATILYEILLGKATLYAVLVSALVLMAMVKRKDSRGRAKRSGSGVKQTLNFDLLKLAGDVESNPGPTSMDWIWRILFLVGAATGAHSGPQLQLQESGPGLVKPSETLSLTCTVSGDSISSGDYYWGWIRQPPGKGLEWIGHIYYSGVTYYNPSLKSRVTISVDTSRNQFSLKLSSVTAADTAVYYCTREDSSNWRSRGQGTLVTVSSGSGGGGSGGGGSGGGGSFEDVQLQESGPGLVKPSQSLSLTCTVTGYSITSDYTWNWIRQFPGNKLEWMGYITYSGSTSYNPSLKSRNSITRDTSKNQFFLQLNSVTTEDTATYYCARLGRRYTMDYWGQGTSVTVSSTRASTKGPSVFPLAPSSKSTSGGTAALGCLVKDYFPEPVTVSWNSGALTSGVHTFPAVLQSSGLYSLSSVVTVPSSSLGTQTYICNVNHKPSNTKVDKRVEPKSCIPEDTFFPSPESSCDVKLVEKSFETDTNLNFQNLSVIGFRILLLKVAGFNLLMTLRLWSS

SEQ ID NO: 14104 - protein, 901 aa, Artificial Sequence
  Synthetic Polypeptide
MALPVTALLLPLALLLHAARPEVQLVESGGGLVQPGGSLRLSCAASGFSFSDFWMSWVRQAPGKGLEWVATISQAGSEKDYVDSVKGRFTISRDNAKKSLYLQMNSLRAEDTAVYYCASGVYSFDYRGQGTLVTVSSGTGGGGSGGGGSGGGGSEFDDIQMTQSPSSLSASVGDRVTITCRASQSISSYLNWYQQKPGKAPKLLIYDASNLETGVPSRFSGSGSGTDFTFTISSLQPEDIATYYCQQYDNLPLTFGGGTKVDIKRLEGQPKANPTVTLFPPSSEELQANKATLVCLISDFYPGAVTVAWKADGSPVKAGVETTKPSKQSNNKYAASSYLSLTPEQWKSHRSYSCQVTHEGSTVEKTVAPTECSGRADCGFTSESYQQGVLSATILYEILLGKATLYAVLVSALVLMAMVKRKDSRGRAKRSGSGVKQTLNFDLLKLAGDVESNPGPTSMDWIWRILFLVGAATGAHSGPQLQLQESGPGLVKPSETLSLTCTVSGDSISSGDYYWGWIRQPPGKGLEWIGHIYYSGVTYYNPSLKSRVTISVDTSRNQFSLKLSSVTAADTAVYYCTREDSSNWRSRGQGTLVTVSSGSGGGGSGGGGSGGGGSFEQVQLVESGGGVVQPGRSLRLSCAASGFTFSSYAMHWVRQAPGKGLEWVAVISYDGSNKYYADSVKGRFTISRDNSKNTLYLQMNSLRAEDTAVYYCARAHNSSSWSFDYWGQGTLVTVSSTRASTKGPSVFPLAPSSKSTSGGTAALGCLVKDYFPEPVTVSWNSGALTSGVHTFPAVLQSSGLYSLSSVVTVPSSSLGTQTYICNVNHKPSNTKVDKRVEPKSCIPEDTFFPSPESSCDVKLVEKSFETDTNLNFQNLSVIGFRILLLKVAGFNLLMTLRLWSS

SEQ ID NO: 14105 - protein, 910 aa, Artificial Sequence
  Synthetic Polypeptide
MALPVTALLLPLALLLHAARPEVQLVESGGGLVQPGGSLRLSCAASGFSFSDFWMSWVRQAPGKGLEWVATISQAGSEKDYVDSVKGRFTISRDNAKKSLYLQMNSLRAEDTAVYYCASGVYSFDYRGQGTLVTVSSGTGGGGSGGGGSGGGGSEFDDVVMTQSPLSLPVSLGDQASISCRSSQRLVHSNGNTYLHWYLQKPGQSPKLLIYRVSNRFPGVPDRFSGSGSGTDFTLKISRVEAEDLGIYFCSQSTHVPYTFGGGTKLEIKRLEGQPKANPTVTLFPPSSEELQANKATLVCLISDFYPGAVTVAWKADGSPVKAGVETTKPSKQSNNKYAASSYLSLTPEQWKSHRSYSCQVTHEGSTVEKTVAPTECSGRADCGFTSESYQQGVLSATILYEILLGKATLYAVLVSALVLMAMVKRKDSRGRAKRSGSGVKQTLNFDLLKLAGDVESNPGPTSMDWIWRILFLVGAATGAHSGPQLQLQESGPGLVKPSETLSLTCTVSGDSISSGDYYWGWIRQPPGKGLEWIGHIYYSGVTYYNPSLKSRVTISVDTSRNQFSLKLSSVTAADTAVYYCTREDSSNWRSRGQGTLVTVSSGSGGGGSGGGGSGGGGSFEEVRLQQSGPDLIKPGASVKMSCKASGYTFTGYVMHWVKQRPGQGLEWIGFINPYNDDIQSNERFRGKATLTSDKSSTTAYMELSSLTSEDSAVYYCARGAGYNFDGAYRFFDFWGQGTTLTVSSTRASTKGPSVFPLAPSSKSTSGGTAALGCLVKDYFPEPVTVSWNSGALTSGVHTFPAVLQSSGLYSLSSVVTVPSSSLGTQTYICNVNHKPSNTKVDKRVEPKSCIPEDTFFPSPESSCDVKLVEKSFETDTNLNFQNLSVIGFRILLLKVAGFNLLMTLRLWSS

SEQ ID NO: 14106 - protein, 901 aa, Artificial Sequence
  Synthetic Polypeptide
MALPVTALLLPLALLLHAARPEVQLVESGGGLVQPGGSLRLSCAASGFSFSDFWMSWVRQAPGKGLEWVATISQAGSEKDYVDSVKGRFTISRDNAKKSLYLQMNSLRAEDTAVYYCASGVYSFDYRGQGTLVTVSSGTGGGGSGGGGSGGGGSEFDSYELTQPPSVSVSPGQTATISCSGDQLGGKYGHWYQKKPGQSPVLVLYQDRKRPAGIPERFSGSSSGNTITLTISGTQAVDEADYYCQAWDTNLGGVFGGGTKVTVLGQLEGQPKANPTVTLFPPSSEELQANKATLVCLISDFYPGAVTVAWKADGSPVKAGVETTKPSKQSNNKYAASSYLSLTPEQWKSHRSYSCQVTHEGSTVEKTVAPTECSGRADCGFTSESYQQGVLSATILYEILLGKATLYAVLVSALVLMAMVKRKDSRGRAKRSGSGVKQTLNFDLLKLAGDVESNPGPTSMDWIWRILFLVGAATGAHSGPQLQLQESGPGLVKPSETLSLTCTVSGDSISSGDYYWGWIRQPPGKGLEWIGHIYYSGVTYYNPSLKSRVTISVDTSRNQFSLKLSSVTAADTAVYYCTREDSSNWRSRGQGTLVTVSSGSGGGGSGGGGSGGGGSFEQVQLVESGAEVKKPGASVKVSCKASGYTFTGYYMHWVRQAPGQGLEWMGRINPNSGGTNYAQKFQGRVTMTRDTSISTAYMELSRLRSDDTAVYYCASPRGRGSAFDIWGQGTLVTVSSTRASTKGPSVFPLAPSSKSTSGGTAALGCLVKDYFPEPVTVSWNSGALTSGVHTFPAVLQSSGLYSLSSVVTVPSSSLGTQTYICNVNHKPSNTKVDKRVEPKSCIPEDTFFPSPESSCDVKLVEKSFETDTNLNFQNLSVIGFRILLLKVAGFNLLMTLRLWSS

SEQ ID NO: 14107 - protein, 904 aa, Artificial Sequence
  Synthetic Polypeptide
MALPVTALLLPLALLLHAARPEVQLVESGGGLVQPGGSLRLSCAASGFSFSDFWMSWVRQAPGKGLEWVATISQAGSEKDYVDSVKGRFTISRDNAKKSLYLQMNSLRAEDTAVYYCASGVYSFDYRGQGTLVTVSSGTGGGGSGGGGSGGGGSEFDNFMLTQPHSVSESPGKTVTISCTRSSGSIASKYVQWYQQRPGSSPTTVIYEDNQRPSGVPDRFSGSIDTSSNSASLTISGLRTEDEADYYCHSYDSNNHSVFGGGTKVTVLGQLEGQPKANPTVTLFPPSSEELQANKATLVCLISDFYPGAVTVAWKADGSPVKAGVETTKPSKQSNNKYAASSYLSLTPEQWKSHRSYSCQVTHEGSTVEKTVAPTECSGRADCGFTSESYQQGVLSATILYEILLGKATLYAVLVSALVLMAMVKRKDSRGRAKRSGSGVKQTLNFDLLKLAGDVESNPGPTSMDWIWRILFLVGAATGAHSGPQLQLQESGPGLVKPSETLSLTCTVSGDSISSGDYYWGWIRQPPGKGLEWIGHIYYSGVTYYNPSLKSRVTISVDTSRNQFSLKLSSVTAADTAVYYCTREDSSNWRSRGQGTLVTVSSGSGGGGSGGGGSGGGGSFEEVQLVESGGGVVQPGGSLRLSCAASGFTFSSYAMSWVRQAPGKGLEWVSAISGSGGSTYYADSVKGRFSISRDNSKNTLYLQMNSLRAEDTAVYYCARTRSSGAFDIWGQGTLVTVSSTRASTKGPSVFPLAPSSKSTSGGTAALGCLVKDYFPEPVTVSWNSGALTSGVHTFPAVLQSSGLYSLSSVVTVPSSSLGTQTYICNVNHKPSNTKVDKRVEPKSCIPEDTFFPSPESSCDVKLVEKSFETDTNLNFQNLSVIGFRILLLKVAGFNLLMTLRLWSS

SEQ ID NO: 14108 - protein, 899 aa, Artificial Sequence
  Synthetic Polypeptide
MALPVTALLLPLALLLHAARPEVQLVESGGGLVQPGGSLRLSCAASGFSFSDFWMSWVRQAPGKGLEWVATISQAGSEKDYVDSVKGRFTISRDNAKKSLYLQMNSLRAEDTAVYYCASGVYSFDYRGQGTLVTVSSGTGGGGSGGGGSGGGGSEFDIQMNQSPSSLSASLGDTITITCHASQNINVWLSWYQQKPGNIPKLLIYKASNLHTGVPSRFSGSGSGTGFTITISSLQPEDIATYYCQQGQSYPWTFGGGTKLEIKRLEGQPKANPTVTLFPPSSEELQANKATLVCLISDFYPGAVTVAWKADGSPVKAGVETTKPSKQSNNKYAASSYLSLTPEQWKSHRSYSCQVTHEGSTVEKTVAPTECSGRADCGFTSESYQQGVLSATILYEILLGKATLYAVLVSALVLMAMVKRKDSRGRAKRSGSGVKQTLNFDLLKLAGDVESNPGPTSMDWIWRILFLVGAATGAHSGPQLQLQESGPGLVKPSETLSLTCTVSGDSISSGDYYWGWIRQPPGKGLEWIGHIYYSGVTYYNPSLKSRVTISVDTSRNQFSLKLSSVTAADTAVYYCTREDSSNWRSRGQGTLVTVSSGSGGGGSGGGGSGGGGSFEEVQLQQSGPELVKPGASVKISCKASGYSFTGYFMNWVKQSHGKSLEYIGRFNPYNGETLYNQKFKGKATLTVDKSSSTVHMELLSVTSEDSAVYYCGRSGNDDAMDYWGQGTSVTVSSATRASTKGPSVFPLAPSSKSTSGGTAALGCLVKDYFPEPVTVSWNSGALTSGVHTFPAVLQSSGLYSLSSVVTVPSSSLGTQTYICNVNHKPSNTKVDKRVEPKSCIPEDTFFPSPESSCDVKLVEKSFETDTNLNFQNLSVIGFRILLLKVAGFNLLMTLRLWSS

SEQ ID NO: 14109 - protein, 900 aa, Artificial Sequence
  Synthetic Polypeptide
MALPVTALLLPLALLLHAARPEVQLVESGGGLVQPGGSLRLSCAASGFSFSDFWMSWVRQAPGKGLEWVATISQAGSEKDYVDSVKGRFTISRDNAKKSLYLQMNSLRAEDTAVYYCASGVYSFDYRGQGTLVTVSSGTGGGGSGGGGSGGGGSEFEIVLTQSPATLSLSPGERATLSCRASQSVRSYLAWYQQKPGQAPRLLIYDASNRATGIPARFSGSGSGTDFTLTISSLEPEDFAVYYCQQRSNWPPTFGQGTKVEIKLEGQPKANPTVTLFPPSSEELQANKATLVCLISDFYPGAVTVAWKADGSPVKAGVETTKPSKQSNNKYAASSYLSLTPEQWKSHRSYSCQVTHEGSTVEKTVAPTECSGRADCGFTSESYQQGVLSATILYEILLGKATLYAVLVSALVLMAMVKRKDSRGRAKRSGSGVKQTLNFDLLKLAGDVESNPGPTSMDWIWRILFLVGAATGAHSGPQLQLQESGPGLVKPSETLSLTCTVSGDSISSGDYYWGWIRQPPGKGLEWIGHIYYSGVTYYNPSLKSRVTISVDTSRNQFSLKLSSVTAADTAVYYCTREDSSNWRSRGQGTLVTVSSGSGGGGSGGGGSGGGGSFEQLQVQESGPGLVKPSETLSLTCTVSGGSISNSYFSWGWIRQPPGKGLEWIGSFYYGEKTYYNPSLKSRATISIDTSKSQFSLKLSSVTAADTAVYYCPRGPTMIRGVIDSWGQGTLVTVSSTRASTKGPSVFPLAPSSKSTSGGTAALGCLVKDYFPEPVTVSWNSGALTSGVHTFPAVLQSSGLYSLSSVVTVPSSSLGTQTYICNVNHKPSNTKVDKRVEPKSCIPEDTFFPSPESSCDVKLVEKSFETDTNLNFQNLSVIGFRILLLKVAGFNLLMTLRLWSS

SEQ ID NO: 14110 - protein, 909 aa, Artificial Sequence
  Synthetic Polypeptide
MALPVTALLLPLALLLHAARPEVQLVESGGGLVQPGGSLRLSCAASGFSFSDFWMSWVRQAPGKGLEWVATISQAGSEKDYVDSVKGRFTISRDNAKKSLYLQMNSLRAEDTAVYYCASGVYSFDYRGQGTLVTVSSGTGGGGSGGGGSGGGGSEFDIVMTQTPLSLPVTPGEPASISCRSSRSLLDSDDGNTYLDWYLQKPGQSPQLLIYTLSYRASGVPDRFSGSGSGTDFTLKISRVEAEDVGVYYCMQRVEFPITFGQGTRLEIKRLEGQPKANPTVTLFPPSSEELQANKATLVCLISDFYPGAVTVAWKADGSPVKAGVETTKPSKQSNNKYAASSYLSLTPEQWKSHRSYSCQVTHEGSTVEKTVAPTECSGRADCGFTSESYQQGVLSATILYEILLGKATLYAVLVSALVLMAMVKRKDSRGRAKRSGSGVKQTLNFDLLKLAGDVESNPGPTSMDWIWRILFLVGAATGAHSGPQLQLQESGPGLVKPSETLSLTCTVSGDSISSGDYYWGWIRQPPGKGLEWIGHIYYSGVTYYNPSLKSRVTISVDTSRNQFSLKLSSVTAADTAVYYCTREDSSNWRSRGQGTLVTVSSGSGGGGSGGGGSGGGGSFEQVQLVESGGGVVQPGRSLRLSCAASGFIFSRYGMHWVRQAPGKGLKWVAVIWYDGSNKLYADSVKGRFTISRDNSKNTLYLQMNSLRAEDTAVYYCARDYYDNSRHHWGFDYWGQGTLVTVSSTRASTKGPSVFPLAPSSKSTSGGTAALGCLVKDYFPEPVTVSWNSGALTSGVHTFPAVLQSSGLYSLSSVVTVPSSSLGTQTYICNVNHKPSNTKVDKRVEPKSCIPEDTFFPSPESSCDVKLVEKSFETDTNLNFQNLSVIGFRILLLKVAGFNLLMTLRLWSS

SEQ ID NO: 14111 - protein, 899 aa, Artificial Sequence
  Synthetic Polypeptide
MALPVTALLLPLALLLHAARPEVQLVESGGGLVQPGGSLRLSCAASGFSFSDFWMSWVRQAPGKGLEWVATISQAGSEKDYVDSVKGRFTISRDNAKKSLYLQMNSLRAEDTAVYYCASGVYSFDYRGQGTLVTVSSGTGGGGSGGGGSGGGGSEFEIQMTQSPSSMSASLGDTITITCQATQDIFKNLNWYQQKPGKPPSLLIYYATELAEGVPSRFSGSGSGSDYSLTISNLESEDFAAYYCLQFFEFPFTFGSGTKLEMKLEGQPKANPTVTLFPPSSEELQANKATLVCLISDFYPGAVTVAWKADGSPVKAGVETTKPSKQSNNKYAASSYLSLTPEQWKSHRSYSCQVTHEGSTVEKTVAPTECSGRADCGFTSESYQQGVLSATILYEILLGKATLYAVLVSALVLMAMVKRKDSRGRAKRSGSGVKQTLNFDLLKLAGDVESNPGPTSMDWIWRILFLVGAATGAHSGPQLQLQESGPGLVKPSETLSLTCTVSGDSISSGDYYWGWIRQPPGKGLEWIGHIYYSGVTYYNPSLKSRVTISVDTSRNQFSLKLSSVTAADTAVYYCTREDSSNWRSRGQGTLVTVSSGSGGGGSGGGGSGGGGSFEQVQLQQSGAELVRPGTSVKVSCKASGYVFTNYWIEWIKQRPGQGLEWIGVMNPGSGETTYNEKFKGKATLTADKSSSTAYMQLSSLTSVDSAVYFCARDHDRDYYAMDYWGQGTSVTVSSTRASTKGPSVFPLAPSSKSTSGGTAALGCLVKDYFPEPVTVSWNSGALTSGVHTFPAVLQSSGLYSLSSVVTVPSSSLGTQTYICNVNHKPSNTKVDKRVEPKSCIPEDTFFPSPESSCDVKLVEKSFETDTNLNFQNLSVIGFRILLLKVAGFNLLMTLRLWSS

SEQ ID NO: 14112 - protein, 896 aa, Artificial Sequence
  Synthetic Polypeptide
MALPVTALLLPLALLLHAARPEVQLVESGGGLVQPGGSLRLSCAASGFSFSDFWMSWVRQAPGKGLEWVATISQAGSEKDYVDSVKGRFTISRDNAKKSLYLQMNSLRAEDTAVYYCASGVYSFDYRGQGTLVTVSSGTGGGGSGGGGSGGGGSEFDILLTQSPAILSVSPGERVSFSCRASQNIGTSIHWYQQRTNGSPRLLIKYASESVSGIPSRFSGSGSGTDFTLSINSVESEDIADYYCQHTNSWPTTFGGGTKLEIKRLEGQPKANPTVTLFPPSSEELQANKATLVCLISDFYPGAVTVAWKADGSPVKAGVETTKPSKQSNNKYAASSYLSLTPEQWKSHRSYSCQVTHEGSTVEKTVAPTECSGRADCGFTSESYQQGVLSATILYEILLGKATLYAVLVSALVLMAMVKRKDSRGRAKRSGSGVKQTLNFDLLKLAGDVESNPGPTSMDWIWRILFLVGAATGAHSGPQLQLQESGPGLVKPSETLSLTCTVSGDSISSGDYYWGWIRQPPGKGLEWIGHIYYSGVTYYNPSLKSRVTISVDTSRNQFSLKLSSVTAADTAVYYCTREDSSNWRSRGQGTLVTVSSGSGGGGSGGGGSGGGGSFEQVQLQQSDAELVKPGASVKISCKASGYTFTDHAIHWVKQKPEQGLEWIGYFSPGNGDIKYNEKFKGKATLTADKSSSTAYMQLNSLTSEDSAVYFCKRSYGNYDYWGQGTTLTVSSTRASTKGPSVFPLAPSSKSTSGGTAALGCLVKDYFPEPVTVSWNSGALTSGVHTFPAVLQSSGLYSLSSVVTVPSSSLGTQTYICNVNHKPSNTKVDKRVEPKSCIPEDTFFPSPESSCDVKLVEKSFETDTNLNFQNLSVIGFRILLLKVAGFNLLMTLRLWSS

SEQ ID NO: 14113 - protein, 901 aa, Artificial Sequence
  Synthetic Polypeptide
MALPVTALLLPLALLLHAARPEVQLVESGGGLVQPGGSLRLSCAASGFSFSDFWMSWVRQAPGKGLEWVATISQAGSEKDYVDSVKGRFTISRDNAKKSLYLQMNSLRAEDTAVYYCASGVYSFDYRGQGTLVTVSSGTGGGGSGGGGSGGGGSEFDIVMTQSPDSLAVSLGERATINCKSSQSLLNSGDQKNYLTWYQQKPGQPPKLLIYWASTRESGVPDRFSGSGSGTDFTLTISSLQAEDVAVYYCQNDYSYPLTFGQGTKVEIKLEGQPKANPTVTLFPPSSEELQANKATLVCLISDFYPGAVTVAWKADGSPVKAGVETTKPSKQSNNKYAASSYLSLTPEQWKSHRSYSCQVTHEGSTVEKTVAPTECSGRADCGFTSESYQQGVLSATILYEILLGKATLYAVLVSALVLMAMVKRKDSRGRAKRSGSGVKQTLNFDLLKLAGDVESNPGPTSMDWIWRILFLVGAATGAHSGPQLQLQESGPGLVKPSETLSLTCTVSGDSISSGDYYWGWIRQPPGKGLEWIGHIYYSGVTYYNPSLKSRVTISVDTSRNQFSLKLSSVTAADTAVYYCTREDSSNWRSRGQGTLVTVSSGSGGGGSGGGGSGGGGSFEQVQLVQSGAEVKKTGSSVKVSCKASGYTFTDHAIHVWRQAPGQALEWMGHFSPGNTDIKYNDKFKGRVTLTVDRSMSTAYMELSSLRSEDTAMYYCKTSTFFFDYWGQGTMVTVSSTRASTKGPSVFPLAPSSKSTSGGTAALGCLVKDYFPEPVTVSWNSGALTSGVHTFPAVLQSSGLYSLSSVVTVPSSSLGTQTYICNVNHKPSNTKVDKRVEPKSCIPEDTFFPSPESSCDVKLVEKSFETDTNLNFQNLSVIGFRILLLKVAGFNLLMTLRLWSS

SEQ ID NO: 14114 - protein, 900 aa, Artificial Sequence
  Synthetic Polypeptide
MALPVTALLLPLALLLHAARPEVQLVESGGGLVQPGGSLRLSCAASGFSFSDFWMSWVRQAPGKGLEWVATISQAGSEKDYVDSVKGRFTISRDNAKKSLYLQMNSLRAEDTAVYYCASGVYSFDYRGQGTLVTVSSGTGGGGSGGGGSGGGGSEFDIQMTQSPSSLSASVGDRVTITCKASQDVSIAVAWYQQKPGKAPKVLIYSASYRYTGVPDRFSGSGSGTDFTFTISSLQPEDIAVYYCQQHYITPLTFGGGTKVEIKLEGQPKANPTVTLFPPSSEELQANKATLVCLISDFYPGAVTVAWKADGSPVKAGVETTKPSKQSNNKYAASSYLSLTPEQWKSHRSYSCQVTHEGSTVEKTVAPTECSGRADCGFTSESYQQGVLSATILYEILLGKATLYAVLVSALVLMAMVKRKDSRGRAKRSGSGVKQTLNFDLLKLAGDVESNPGPTSMDWIWRILFLVGAATGAHSGPQLQLQESGPGLVKPSETLSLTCTVSGDSISSGDYYWGWIRQPPGKGLEWIGHIYYSGVTYYNPSLKSRVTISVDTSRNQFSLKLSSVTAADTAVYYCTREDSSNWRSRGQGTLVTVSSGSGGGGSGGGGSGGGGSFEQIQLVQSGHEVKKPGASVKVSCKASGYTFTNYGMNWVRQAPGQGLEWMGWINTKTGEPTYAEEFKGRFVFSLETSASTAYLQISSLKAEDTAMYFCGRGGYGSSYWYFDVWGQGTTVTVSSTRASTKGPSVFPLAPSSKSTSGGTAALGCLVKDYFPEPVTVSWNSGALTSGVHTFPAVLQSSGLYSLSSVVTVPSSSLGTQTYICNVNHKPSNTKVDKRVEPKSCIPEDTFFPSPESSCDVKLVEKSFETDTNLNFQNLSVIGFRILLLKVAGFNLLMTLRLWSS

SEQ ID NO: 14115 - protein, 902 aa, Artificial Sequence
  Synthetic Polypeptide
MALPVTALLLPLALLLHAARPEVQLVESGGGLVQPGGSLRLSCAASGFSFSDFWMSWVRQAPGKGLEWVATISQAGSEKDYVDSVKGRFTISRDNAKKSLYLQMNSLRAEDTAVYYCASGVYSFDYRGQGTLVTVSSGTGGGGSGGGGSGGGGSEFDIVMTQSPDSLAVSLGERATINCRASKSVSTSGYSYMHWYQQKPGQPPKLLIYLASNLESGVPDRFSGSGSGTDFTLTISSLQAEDVAVYYCQHSRELPYTFGQGTKLEIKLEGQPKANPTVTLFPPSSEELQANKATLVCLISDFYPGAVTVAWKADGSPVKAGVETTKPSKQSNNKYAASSYLSLTPEQWKSHRSYSCQVTHEGSTVEKTVAPTECSGRADCGFTSESYQQGVLSATILYEILLGKATLYAVLVSALVLMAMVKRKDSRGRAKRSGSGVKQTLNFDLLKLAGDVESNPGPTSMDWIWRILFLVGAATGAHSGPQLQLQESGPGLVKPSETLSLTCTVSGDSISSGDYYWGWIRQPPGKGLEWIGHIYYSGVTYYNPSLKSRVTISVDTSRNQFSLKLSSVTAADTAVYYCTREDSSNWRSRGQGTLVTVSSGSGGGGSGGGGSGGGGSFEQVQLQESGPGLVKPSETLSLTCTVSGGSISSYGVHWIRQPPGKGLEWIGVIWTSGVTDYNSALMGRVTISVDTSKNQFSLKLSSVTAADTAVYYCARDGDYDRYTMDYWGQGTLVTVSSTRASTKGPSVFPLAPSSKSTSGGTAALGCLVKDYFPEPVTVSWNSGALTSGVHTFPAVLQSSGLYSLSSVVTVPSSSLGTQTYICNVNHKPSNTKVDKRVEPKSCIPEDTFFPSPESSCDVKLVEKSFETDTNLNFQNLSVIGFRILLLKVAGFNLLMTLRLWSS

SEQ ID NO: 14116 - protein, 902 aa, Artificial Sequence
  Synthetic Polypeptide
MALPVTALLLPLALLLHAARPEVQLVESGGGLVQPGGSLRLSCAASGFSFSDFWMSWVRQAPGKGLEWVATISQAGSEKDYVDSVKGRFTISRDNAKKSLYLQMNSLRAEDTAVYYCASGVYSFDYRGQGTLVTVSSGTGGGGSGGGGSGGGGSEFDIQMTQSPSSLSASVGDRVTITCRASQSIGTSLHWYQQKPGKAPKLLIKFASRLQSGVPSRFSGSGSGTDFTLTISSLQPEDFATYYCQQSPGFPPTFGQGTKLEIKRLEGQPKANPTVTLFPPSSEELQANKATLVCLISDFYPGAVTVAWKADGSPVKAGVETTKPSKQSNNKYAASSYLSLTPEQWKSHRSYSCQVTHEGSTVEKTVAPTECSGRADCGFTSESYQQGVLSATILYEILLGKATLYAVLVSALVLMAMVKRKDSRGRAKRSGSGVKQTLNFDLLKLAGDVESNPGPTSMDWIWRILFLVGAATGAHSGPQLQLQESGPGLVKPSETLSLTCTVSGDSISSGDYYWGWIRQPPGKGLEWIGHIYYSGVTYYNPSLKSRVTISVDTSRNQFSLKLSSVTAADTAVYYCTREDSSNWRSRGQGTLVTVSSGSGGGGSGGGGSGGGGSFEQVQLVESGGGLVKPGGSLRLSCAASGFSITTSGYYWTWIRQFPGKGLEWMGYIGYNSKTYYNPALKSRITISRDNAKNSLYLQMNSLRAEDTAVYYCARSLYGGYKDAFDSWGQGTLVTVSSTRASTKGPSVFPLAPSSKSTSGGTAALGCLVKDYFPEPVTVSWNSGALTSGVHTFPAVLQSSGLYSLSSVVTVPSSSLGTQTYICNVNHKPSNTKVDKRVEPKSCIPEDTFFPSPESSCDVKLVEKSFETDTNLNFQNLSVIGFRILLLKVAGFNLLMTLRLWSS

SEQ ID NO: 14117 - protein, 907 aa, Artificial Sequence
  Synthetic Polypeptide
MALPVTALLLPLALLLHAARPEVQLVESGGGLVQPGGSLRLSCAASGFSFSDFWMSWVRQAPGKGLEWVATISQAGSEKDYVDSVKGRFTISRDNAKKSLYLQMNSLRAEDTAVYYCASGVYSFDYRGQGTLVTVSSGTGGGGSGGGGSGGGGSEFDEIVLTQSPLSLPVTPGEPASISCRSSQSLLHSIGYNYLDWYLQKPGQSPQLLIYLGSNRASGVPDRFSGSGSGTDFTLKISRVEAEDVGVYYCMQALQTPLTFGGGTKVEIKRLEGQPKANPTVTLFPPSSEELQANKATLVCLISDFYPGAVTVAWKADGSPVKAGVETTKPSKQSNNKYAASSYLSLTPEQWKSHRSYSCQVTHEGSTVEKTVAPTECSGRADCGFTSESYQQGVLSATILYEILLGKATLYAVLVSALVLMAMVKRKDSRGRAKRSGSGVKQTLNFDLLKLAGDVESNPGPTSMDWIWRILFLVGAATGAHSGPQLQLQESGPGLVKPSETLSLTCTVSGDSISSGDYYWGWIRQPPGKGLEWIGHIYYSGVTYYNPSLKSRVTISVDTSRNQFSLKLSSVTAADTAVYYCTREDSSNWRSRGQGTLVTVSSGSGGGGSGGGGSGGGGSFEEVQLVESGGGVVQPGRSLRLSCAASGFTFRSYGMHWVRQAPGKGLEWVAVISYDGSNKYYTDSVNGRFTISRDNSKNTLYLQMNSLRAEDTAVYYCARGGGYYETSGPDYWGQGTLVTVSSTRASTKGPSVFPLAPSSKSTSGGTAALGCLVKDYFPEPVTVSWNSGALTSGVHTFPAVLQSSGLYSLSSVVTVPSSSLGTQTYICNVNHKPSNTKVDKRVEPKSCIPEDTFFPSPESSCDVKLVEKSFETDTNLNFQNLSVIGFRILLLKVAGFNLLMTLRLWSS

SEQ ID NO: 14118 - protein, 905 aa, Artificial Sequence
  Synthetic Polypeptide
MALPVTALLLPLALLLHAARPEVQLVESGGGLVQPGGSLRLSCAASGFSFSDFWMSWVRQAPGKGLEWVATISQAGSEKDYVDSVKGRFTISRDNAKKSLYLQMNSLRAEDTAVYYCASGVYSFDYRGQGTLVTVSSGTGGGGSGGGGSGGGGSEFDDVVMTQSPLSLPVTPGEPASISCRSSQSLLHSIGYNYLHWFLQKPGQSPQLLIYLGSNRASGVPDRFSGSGSGTDFTLKISRVEAEDVGVYYCMQALQTPPTFGQGTRLEIKRLEGQPKANPTVTLFPPSSEELQANKATLVCLISDFYPGAVTVAWKADGSPVKAGVETTKPSKQSNNKYAASSYLSLTPEQWKSHRSYSCQVTHEGSTVEKTVAPTECSGRADCGFTSESYQQGVLSATILYEILLGKATLYAVLVSALVLMAMVKRKDSRGRAKRSGSGVKQTLNFDLLKLAGDVESNPGPTSMDWIWRILFLVGAATGAHSGPQLQLQESGPGLVKPSETLSLTCTVSGDSISSGDYYWGWIRQPPGKGLEWIGHIYYSGVTYYNPSLKSRVTISVDTSRNQFSLKLSSVTAADTAVYYCTREDSSNWRSRGQGTLVTVSSGSGGGGSGGGGSGGGGSFEQLQLQESGPGLVKPSGTLSLTCAVSGGSISSSNWWSWVRQPPGKGLEWIGEIYHSGSTNYNPSLKSRVTISVDKSKNQFSLKLSSVTAADTAVYYCVGSPYGDYVLDYWGQGTLVTVSSTRASTKGPSVFPLAPSSKSTSGGTAALGCLVKDYFPEPVTVSWNSGALTSGVHTFPAVLQSSGLYSLSSVVTVPSSSLGTQTYICNVNHKPSNTKVDKRVEPKSCIPEDTFFPSPESSCDVKLVEKSFETDTNLNFQNLSVIGFRILLLKVAGFNLLMTLRLWSS

SEQ ID NO: 14119 - protein, 903 aa, Artificial Sequence
  Synthetic Polypeptide
MALPVTALLLPLALLLHAARPEVQLVESGGGLVQPGGSLRLSCAASGFSFSDFWMSWVRQAPGKGLEWVATISQAGSEKDYVDSVKGRFTISRDNAKKSLYLQMNSLRAEDTAVYYCASGVYSFDYRGQGTLVTVSSGTGGGGSGGGGSGGGGSEFDEIVLTQSPGTLSLSLGERATLSCRASQSISSSFLAWYQQKPGQAPKLLIYAASTRATGIPDRFSGSGSGTDFTLTISRLEPEDFAVYYCQQYGRSLSFGGGTKVEVKLEGQPKANPTVTLFPPSSEELQANKATLVCLISDFYPGAVTVAWKADGSPVKAGVETTKPSKQSNNKYAASSYLSLTPEQWKSHRSYSCQVTHEGSTVEKTVAPTECSGRADCGFTSESYQQGVLSATILYEILLGKATLYAVLVSALVLMAMVKRKDSRGRAKRSGSGVKQTLNFDLLKLAGDVESNPGPTSMDWIWRILFLVGAATGAHSGPQLQLQESGPGLVKPSETLSLTCTVSGDSISSGDYYWGWIRQPPGKGLEWIGHIYYSGVTYYNPSLKSRVTISVDTSRNQFSLKLSSVTAADTAVYYCTREDSSNWRSRGQGTLVTVSSGSGGGGSGGGGSGGGGSFEQVQLQQSGPGLVKPSQTLSLTCAISGDSVSGNSATWNWIRQSPSRGLEWLGRTYYRSKWNHDYAESVKSRITINPDTSKNQFSLQLNSVTPEDTAVYYCARGDSSSWYAFDYWGQGTLVTVSSTRASTKGPSVFPLAPSSKSTSGGTAALGCLVKDYFPEPVTVSWNSGALTSGVHTFPAVLQSSGLYSLSSVVTVPSSSLGTQTYICNVNHKPSNTKVDKRVEPKSCIPEDTFFPSPESSCDVKLVEKSFETDTNLNFQNLSVIGFRILLLKVAGFNLLMTLRLWSS

SEQ ID NO: 14120 - protein, 902 aa, Artificial Sequence
  Synthetic Polypeptide
MALPVTALLLPLALLLHAARPEVQLVESGGGLVQPGGSLRLSCAASGFSFSDFWMSWVRQAPGKGLEWVATISQAGSEKDYVDSVKGRFTISRDNAKKSLYLQMNSLRAEDTAVYYCASGVYSFDYRGQGTLVTVSSGTGGGGSGGGGSGGGGSEFDQSVVTQPPSVSVAPGKTARITCGRNNIGSKSVHWYQQKPGQAPVLVVYDDSDRPSGIPERFSGSNSGNTATLTISRVEAGDEADYYCQVWDSSSDHVVFGGGTKLTVLGLEGQPKANPTVTLFPPSSEELQANKATLVCLISDFYPGAVTVAWKADGSPVKAGVETTKPSKQSNNKYAASSYLSLTPEQWKSHRSYSCQVTHEGSTVEKTVAPTECSGRADCGFTSESYQQGVLSATILYEILLGKATLYAVLVSALVLMAMVKRKDSRGRAKRSGSGVKQTLNFDLLKLAGDVESNPGPTSMDWIWRILFLVGAATGAHSGPQLQLQESGPGLVKPSETLSLTCTVSGDSISSGDYYWGWIRQPPGKGLEWIGHIYYSGVTYYNPSLKSRVTISVDTSRNQFSLKLSSVTAADTAVYYCTREDSSNWRSRGQGTLVTVSSGSGGGGSGGGGSGGGGSFEVQLVQSGGGVMRPGGSLRLSCAASGFTFDDYGMSWVRQAPGKGLEWVSGINWNGGSTGYADSVRGRFTISRDNAKNSLYLQMNSLRAEDTALYYCARERGYGYHDPHDYWGQGTLVTVSSTRASTKGPSVFPLAPSSKSTSGGTAALGCLVKDYFPEPVTVSWNSGALTSGVHTFPAVLQSSGLYSLSSVVTVPSSSLGTQTYICNVNHKPSNTKVDKRVEPKSCIPEDTFFPSPESSCDVKLVEKSFETDTNLNFQNLSVIGFRILLLKVAGFNLLMTLRLWSS

SEQ ID NO: 14121 - protein, 915 aa, Artificial Sequence
  Synthetic Polypeptide
MALPVTALLLPLALLLHAARPEVQLVESGGGLVQPGGSLRLSCAASGFSFSDFWMSWVRQAPGKGLEWVATISQAGSEKDYVDSVKGRFTISRDNAKKSLYLQMNSLRAEDTAVYYCASGVYSFDYRGQGTLVTVSSGTGGGGSGGGGSGGGGSEFEQKLISEEDLEFQAVVTQPPSASGTPGQRVTISCSGSSSNIGSNTVNWYQQVPGTAPKLLIYSNNQRPSGVPDRFSGSKSGTSASLAISGLQSEDEADYYCAAWDDSLNGWVFGGGTKLTVLLEGQPKANPTVTLFPPSSEELQANKATLVCLISDFYPGAVTVAWKADGSPVKAGVETTKPSKQSNNKYAASSYLSLTPEQWKSHRSYSCQVTHEGSTVEKTVAPTECSGRADCGFTSESYQQGVLSATILYEILLGKATLYAVLVSALVLMAMVKRKDSRGRAKRSGSGVKQTLNFDLLKLAGDVESNPGPTSMDWIWRILFLVGAATGAHSGPQLQLQESGPGLVKPSETLSLTCTVSGDSISSGDYYWGWIRQPPGKGLEWIGHIYYSGVTYYNPSLKSRVTISVDTSRNQFSLKLSSVTAADTAVYYCTREDSSNWRSRGQGTLVTVSSGSGGGGSGGGGSGGGGSFEQMQLVQSGAEVKEPGESLRISCKGSGYSFTNFWISWVRQMPGKGLEWMGRVDPGYSYSTYSPSFQGHVTISADKSTSTAYLQWNSLKASDTAMYYCARVQYSGYYDWFDPWGQGTLVTVSSTRASTKGPSVFPLAPSSKSTSGGTAALGCLVKDYFPEPVTVSWNSGALTSGVHTFPAVLQSSGLYSLSSVVTVPSSSLGTQTYICNVNHKPSNTKVDKRVEPKSCIPEDTFFPSPESSCDVKLVEKSFETDTNLNFQNLSVIGFRILLLKVAGFNLLMTLRLWSS

SEQ ID NO: 14122 - protein, 909 aa, Artificial Sequence
  Synthetic Polypeptide
MALPVTALLLPLALLLHAARPEVQLVESGGGLVQPGGSLRLSCAASGFSFSDFWMSWVRQAPGKGLEWVATISQAGSEKDYVDSVKGRFTISRDNAKKSLYLQMNSLRAEDTAVYYCASGVYSFDYRGQGTLVTVSSGTGGGGSGGGGSGGGGSEFEQKLISEEDLEFDIQMTQSPSTLSASVGDRVTITCRASQNINKWLAWYQQRPGKAPQLLIYKASSLESGVPSRFSGSGSGTEYTLTISSLQPDDFATYYCQQYNSYATFGQGTKVEIKRLEGQPKANPTVTLFPPSSEELQANKATLVCLISDFYPGAVTVAWKADGSPVKAGVETTKPSKQSNNKYAASSYLSLTPEQWKSHRSYSCQVTHEGSTVEKTVAPTECSGRADCGFTSESYQQGVLSATILYEILLGKATLYAVLVSALVLMAMVKRKDSRGRAKRSGSGVKQTLNFDLLKLAGDVESNPGPTSMDWIWRILFLVGAATGAHSGPQLQLQESGPGLVKPSETLSLTCTVSGDSISSGDYYWGWIRQPPGKGLEWIGHIYYSGVTYYNPSLKSRVTISVDTSRNQFSLKLSSVTAADTAVYYCTREDSSNWRSRGQGTLVTVSSGSGGGGSGGGGSGGGGSFEQVQLVQSGAEVKKPGESLKISCKGSGYNFSNKWIGWVRQLPGRGLEWIAIIYPGYSDITYSPSFQGRVTISADTSINTAYLHWHSLKASDTAMYYCVRHTALAGFDYWGLGTLVTVSSTRASTKGPSVFPLAPSSKSTSGGTAALGCLVKDYFPEPVTVSWNSGALTSGVHTFPAVLQSSGLYSLSSVVTVPSSSLGTQTYICNVNHKPSNTKVDKRVEPKSCIPEDTFFPSPESSCDVKLVEKSFETDTNLNFQNLSVIGFRILLLKVAGFNLLMTLRLWSS

SEQ ID NO: 14123 - protein, 901 aa, Artificial Sequence
  Synthetic Polypeptide
MALPVTALLLPLALLLHAARPEVQLVESGGGLVQPGGSLRLSCAASGFSFSDFWMSWVRQAPGKGLEWVATISQAGSEKDYVDSVKGRFTISRDNAKKSLYLQMNSLRAEDTAVYYCASGVYSFDYRGQGTLVTVSSGTGGGGSGGGGSGGGGSEFDIVLTQSPASLAVSLGQRATISCRASESVDNYGNTFMHWYQQKPGQPPKLLIYRASNLESGIPARFSGSGSRTDFTLTINPVEADDVATYYCQQSNEDPPTFGAGTKLELKLEGQPKANPTVTLFPPSSEELQANKATLVCLISDFYPGAVTVAWKADGSPVKAGVETTKPSKQSNNKYAASSYLSLTPEQWKSHRSYSCQVTHEGSTVEKTVAPTECSGRADCGFTSESYQQGVLSATILYEILLGKATLYAVLVSALVLMAMVKRKDSRGRAKRSGSGVKQTLNFDLLKLAGDVESNPGPTSMDWIWRILFLVGAATGAHSGPQLQLQESGPGLVKPSETLSLTCTVSGDSISSGDYYWGWIRQPPGKGLEWIGHIYYSGVTYYNPSLKSRVTISVDTSRNQFSLKLSSVTAADTAVYYCTREDSSNWRSRGQGTLVTVSSGSGGGGSGGGGSGGGGSFEQIQLVQSGPELKKPGETVKISCKASGYIFTNYGMNWVKQAPGKSFKWMGWINTYTGESTYSADFKGRFAFSLETSASTAYLHINDLKNEDTATYFCARSGGYDPMDYWGQGTSVTVSSTRASTKGPSVFPLAPSSKSTSGGTAALGCLVKDYFPEPVTVSWNSGALTSGVHTFPAVLQSSGLYSLSSVVTVPSSSLGTQTYICNVNHKPSNTKVDKRVEPKSCIPEDTFFPSPESSCDVKLVEKSFETDTNLNFQNLSVIGFRILLLKVAGFNLLMTLRLWSS

SEQ ID NO: 14124 - protein, 900 aa, Artificial Sequence
  Synthetic Polypeptide
MALPVTALLLPLALLLHAARPEVQLVESGGGLVQPGGSLRLSCAASGFSFSDFWMSWVRQAPGKGLEWVATISQAGSEKDYVDSVKGRFTISRDNAKKSLYLQMNSLRAEDTAVYYCASGVYSFDYRGQGTLVTVSSGTGGGGSGGGGSGGGGSEFDEIVLTQSPGTLSLSPGERATLSCRASQSVSNTYLAWYHQRPGQAPRLLIYGASSRATGIPDRFSGSGSGTDFALTISSLEPEDFAVYYCQQYSNSWTFGQGTKVEIKRLEGQPKANPTVTLFPPSSEELQANKATLVCLISDFYPGAVTVAWKADGSPVKAGVETTKPSKQSNNKYAASSYLSLTPEQWKSHRSYSCQVTHEGSTVEKTVAPTECSGRADCGFTSESYQQGVLSATILYEILLGKATLYAVLVSALVLMAMVKRKDSRGRAKRSGSGVKQTLNFDLLKLAGDVESNPGPTSMDWIWRILFLVGAATGAHSGPQLQLQESGPGLVKPSETLSLTCTVSGDSISSGDYYWGWIRQPPGKGLEWIGHIYYSGVTYYNPSLKSRVTISVDTSRNQFSLKLSSVTAADTAVYYCTREDSSNWRSRGQGTLVTVSSGSGGGGSGGGGSGGGGSFEQVQLVESGGGVVQPGRSLRLSCAASGFTFSSYDMHWVRQAPGKGLEWVAVISYDGTNEYYADSVKGRFTISRDTSKNTLYLQMNSLRAEDTAVYYCARERYFDWSFDYWGQGTLVSVSSTRASTKGPSVFPLAPSSKSTSGGTAALGCLVKDYFPEPVTVSWNSGALTSGVHTFPAVLQSSGLYSLSSVVTVPSSSLGTQTYICNVNHKPSNTKVDKRVEPKSCIPEDTFFPSPESSCDVKLVEKSFETDTNLNFQNLSVIGFRILLLKVAGFNLLMTLRLWSS

SEQ ID NO: 14125 - protein, 899 aa, Artificial Sequence
  Synthetic Polypeptide
MALPVTALLLPLALLLHAARPEVQLVESGGGLVQPGGSLRLSCAASGFSFSDFWMSWVRQAPGKGLEWVATISQAGSEKDYVDSVKGRFTISRDNAKKSLYLQMNSLRAEDTAVYYCASGVYSFDYRGQGTLVTVSSGTGGGGSGGGGSGGGGSEFDELTQDPAVSVALGQTVRITCQGDSLRSNYANWYQQKPGQAPVLVIYGQNNRPSGIPDRFSGSSSGNTASLTITGAQAADEADYYCDSRVSTGNHVVFGGGTKLTVLGQLEGQPKANPTVTLFPPSSEELQANKATLVCLISDFYPGAVTVAWKADGSPVKAGVETTKPSKQSNNKYAASSYLSLTPEQWKSHRSYSCQVTHEGSTVEKTVAPTECSGRADCGFTSESYQQGVLSATILYEILLGKATLYAVLVSALVLMAMVKRKDSRGRAKRSGSGVKQTLNFDLLKLAGDVESNPGPTSMDWIWRILFLVGAATGAHSGPQLQLQESGPGLVKPSETLSLTCTVSGDSISSGDYYWGWIRQPPGKGLEWIGHIYYSGVTYYNPSLKSRVTISVDTSRNQFSLKLSSVTAADTAVYYCTREDSSNWRSRGQGTLVTVSSGSGGGGSGGGGSGGGGSFEEVQLVQSGAEVKKPGASVKVSCKASGYTFTSYAMHWVRQAPGQRLEWMGWINAGNGNTKYSQKFQGRVTITRDTSASTAYMELSSLRSEDTAVYYCARDISYGSFDYWGQGTLVTVSSTRASTKGPSVFPLAPSSKSTSGGTAALGCLVKDYFPEPVTVSWNSGALTSGVHTFPAVLQSSGLYSLSSVVTVPSSSLGTQTYICNVNHKPSNTKVDKRVEPKSCIPEDTFFPSPESSCDVKLVEKSFETDTNLNFQNLSVIGFRILLLKVAGFNLLMTLRLWSS

SEQ ID NO: 14126 - protein, 901 aa, Artificial Sequence
  Synthetic Polypeptide
MALPVTALLLPLALLLHAARPEVQLVESGGGLVQPGGSLRLSCAASGFSFSDFWMSWVRQAPGKGLEWVATISQAGSEKDYVDSVKGRFTISRDNAKKSLYLQMNSLRAEDTAVYYCASGVYSFDYRGQGTLVTVSSGTGGGGSGGGGSGGGGSEFDDIVLTQTPATLSVTPGDSVSLSCRASQSISNNLHWYQQKSHESPRLLIKNASQSISGIPSKFSGSGSGTDFTLRINSVETEDFGMYFCQQSNSWPYTFGSGTKLEIKLEGQPKANPTVTLFPPSSEELQANKATLVCLISDFYPGAVTVAWKADGSPVKAGVETTKPSKQSNNKYAASSYLSLTPEQWKSHRSYSCQVTHEGSTVEKTVAPTECSGRADCGFTSESYQQGVLSATILYEILLGKATLYAVLVSALVLMAMVKRKDSRGRAKRSGSGVKQTLNFDLLKLAGDVESNPGPTSMDWIWRILFLVGAATGAHSGPQLQLQESGPGLVKPSETLSLTCTVSGDSISSGDYYWGWIRQPPGKGLEWIGHIYYSGVTYYNPSLKSRVTISVDTSRNQFSLKLSSVTAADTAVYYCTREDSSNWRSRGQGTLVTVSSGSGGGGSGGGGSGGGGSFEQVKLQQSGPELVKPGASVKISCKASGYSFTGYYMHWVKQSHGNILDWIGYIYPYNGVSSYNQKFKGKATLTVDKSSSTAYMELRSLTSEDSAVYYCARERGLYQLRAMDYWGQGTSVTVSSTRASTKGPSVFPLAPSSKSTSGGTAALGCLVKDYFPEPVTVSWNSGALTSGVHTFPAVLQSSGLYSLSSVVTVPSSSLGTQTYICNVNHKPSNTKVDKRVEPKSCIPEDTFFPSPESSCDVKLVEKSFETDTNLNFQNLSVIGFRILLLKVAGFNLLMTLRLWSS

SEQ ID NO: 14127 - protein, 892 aa, Artificial Sequence
  Synthetic Polypeptide
MALPVTALLLPLALLLHAARPEVQLVESGGGLVQPGGSLRLSCAASGFSFSDFWMSWVRQAPGKGLEWVATISQAGSEKDYVDSVKGRFTISRDNAKKSLYLQMNSLRAEDTAVYYCASGVYSFDYRGQGTLVTVSSGTGGGGSGGGGSGGGGSEFDDIVMTQTPAIMSASPGQKVTITCSASSSVNYMHWYQQKLGSSPKLWIYDTSKLAPGVPARFSGSGSGTSYSLTISSMEAEDAASYFCHQWSSYPYTFGSGTKLEIKLEGQPKANPTVTLFPPSSEELQANKATLVCLISDFYPGAVTVAWKADGSPVKAGVETTKPSKQSNNKYAASSYLSLTPEQWKSHRSYSCQVTHEGSTVEKTVAPTECSGRADCGFTSESYQQGVLSATILYEILLGKATLYAVLVSALVLMAMVKRKDSRGRAKRSGSGVKQTLNFDLLKLAGDVESNPGPTSMDWIWRILFLVGAATGAHSGPQLQLQESGPGLVKPSETLSLTCTVSGDSISSGDYYWGWIRQPPGKGLEWIGHIYYSGVTYYNPSLKSRVTISVDTSRNQFSLKLSSVTAADTAVYYCTREDSSNWRSRGQGTLVTVSSGSGGGGSGGGGSGGGGSFEEVQLQESGPDLVKPSQSLSLTCTVTGYSITSGYGWHWIRQFPGNKLEWMGYIHYSGSTTYNPSLKSRISISRDTSKNQFFLQLNSVTTEDTATYYCARSLRYWGQGTTLTVSSTRASTKGPSVFPLAPSSKSTSGGTAALGCLVKDYFPEPVTVSWNSGALTSGVHTFPAVLQSSGLYSLSSVVTVPSSSLGTQTYICNVNHKPSNTKVDKRVEPKSCIPEDTFFPSPESSCDVKLVEKSFETDTNLNFQNLSVIGFRILLLKVAGFNLLMTLRLWSS

SEQ ID NO: 14128 - protein, 895 aa, Artificial Sequence
  Synthetic Polypeptide
MALPVTALLLPLALLLHAARPEVQLVESGGGLVQPGGSLRLSCAASGFSFSDFWMSWVRQAPGKGLEWVATISQAGSEKDYVDSVKGRFTISRDNAKKSLYLQMNSLRAEDTAVYYCASGVYSFDYRGQGTLVTVSSGTGGGGSGGGGSGGGGSEFDDIQMTQSPSSLSASVGDRVTITCSATSSISYMHWYQQKPGKAPKGWIYDTSKLAHGVPSRFSGSGSGTDFTLTISSLQPEDFATYYCHQRRSYPFTFGQGTKVEIKLEGQPKANPTVTLFPPSSEELQANKATLVCLISDFYPGAVTVAWKADGSPVKAGVETTKPSKQSNNKYAASSYLSLTPEQWKSHRSYSCQVTHEGSTVEKTVAPTECSGRADCGFTSESYQQGVLSATILYEILLGKATLYAVLVSALVLMAMVKRKDSRGRAKRSGSGVKQTLNFDLLKLAGDVESNPGPTSMDWIWRILFLVGAATGAHSGPQLQLQESGPGLVKPSETLSLTCTVSGDSISSGDYYWGWIRQPPGKGLEWIGHIYYSGVTYYNPSLKSRVTISVDTSRNQFSLKLSSVTAADTAVYYCTREDSSNWRSRGQGTLVTVSSGSGGGGSGGGGSGGGGSFEEVQLVQSGAEVKKPGASVKVSCKASGYTFTNFWIHWVRQAPGQGLEWIGEIDPSDSYTNYNQKFKGRVTITRDTSTSTAYLELSSLRSEDTAVYYCAREITTVDYWGQGTLVTVSSTRASTKGPSVFPLAPSSKSTSGGTAALGCLVKDYFPEPVTVSWNSGALTSGVHTFPAVLQSSGLYSLSSVVTVPSSSLGTQTYICNVNHKPSNTKVDKRVEPKSCIPEDTFFPSPESSCDVKLVEKSFETDTNLNFQNLSVIGFRILLLKVAGFNLLMTLRLWSS

SEQ ID NO: 14129 - protein, 902 aa, Artificial Sequence
  Synthetic Polypeptide
MALPVTALLLPLALLLHAARPEVQLVESGGGLVQPGGSLRLSCAASGFSFSDFWMSWVRQAPGKGLEWVATISQAGSEKDYVDSVKGRFTISRDNAKKSLYLQMNSLRAEDTAVYYCASGVYSFDYRGQGTLVTVSSGTGGGGSGGGGSGGGGSEFDDIQMTQSPSSLSASVGDRVTITCKASQGFNKYVAWYQQKPGKAPKLLIYYTSTLQPGVPSRFSGSGSGRDYTLTISSLQPEDFATYYCLQYGNLLYAFGQGTKVEIKRLEGQPKANPTVTLFPPSSEELQANKATLVCLISDFYPGAVTVAWKADGSPVKAGVETTKPSKQSNNKYAASSYLSLTPEQWKSHRSYSCQVTHEGSTVEKTVAPTECSGRADCGFTSESYQQGVLSATILYEILLGKATLYAVLVSALVLMAMVKRKDSRGRAKRSGSGVKQTLNFDLLKLAGDVESNPGPTSMDWIWRILFLVGAATGAHSGPQLQLQESGPGLVKPSETLSLTCTVSGDSISSGDYYWGWIRQPPGKGLEWIGHIYYSGVTYYNPSLKSRVTISVDTSRNQFSLKLSSVTAADTAVYYCTREDSSNWRSRGQGTLVTVSSGSGGGGSGGGGSGGGGSFEEVQLVQSGAEVKKPGASVKVSCKASGYTFTSYWIGWVRQAPGQGLEWIGDIYPGGGYTNYNEKFKGRVTITRDTSTSTAYLELSSLRSEDTAVYYCARLDGSSYRGAMDSWGQGTLVTVSSTRASTKGPSVFPLAPSSKSTSGGTAALGCLVKDYFPEPVTVSWNSGALTSGVHTFPAVLQSSGLYSLSSVVTVPSSSLGTQTYICNVNHKPSNTKVDKRVEPKSCIPEDTFFPSPESSCDVKLVEKSFETDTNLNFQNLSVIGFRILLLKVAGFNLLMTLRLWSS

SEQ ID NO: 14130 - protein, 898 aa, Artificial Sequence
  Synthetic Polypeptide
MALPVTALLLPLALLLHAARPEVQLVESGGGLVQPGGSLRLSCAASGFSFSDFWMSWVRQAPGKGLEWVATISQAGSEKDYVDSVKGRFTISRDNAKKSLYLQMNSLRAEDTAVYYCASGVYSFDYRGQGTLVTVSSGTGGGGSGGGGSGGGGSEFDDIQMTQSPSSLSASVGDRVTITCRASQDIRYYLNWYQQKPGKAPKLLIYVASSLQSGVPSRFSGSGSGTEFTLTVSSLQPEDFATYYCLQVYSTPRTFGQGTKVEIKLEGQPKANPTVTLFPPSSEELQANKATLVCLISDFYPGAVTVAWKADGSPVKAGVETTKPSKQSNNKYAASSYLSLTPEQWKSHRSYSCQVTHEGSTVEKTVAPTECSGRADCGFTSESYQQGVLSATILYEILLGKATLYAVLVSALVLMAMVKRKDSRGRAKRSGSGVKQTLNFDLLKLAGDVESNPGPTSMDWIWRILFLVGAATGAHSGPQLQLQESGPGLVKPSETLSLTCTVSGDSISSGDYYWGWIRQPPGKGLEWIGHIYYSGVTYYNPSLKSRVTISVDTSRNQFSLKLSSVTAADTAVYYCTREDSSNWRSRGQGTLVTVSSGSGGGGSGGGGSGGGGSFEEVQLVESGGGLAKPGGSLRLSCAASGFRFTFNNYYMDWVRQAPGQGLEWVSRISSSGDPTWYADSVKGRFTISRENAKNTLFLQMNSLRAEDTAVYYCASLTTGSDSWGQGVLVTVSSTRASTKGPSVFPLAPSSKSTSGGTAALGCLVKDYFPEPVTVSWNSGALTSGVHTFPAVLQSSGLYSLSSVVTVPSSSLGTQTYICNVNHKPSNTKVDKRVEPKSCIPEDTFFPSPESSCDVKLVEKSFETDTNLNFQNLSVIGFRILLLKVAGFNLLMTLRLWSS

SEQ ID NO: 14131 - protein, 898 aa, Artificial Sequence
  Synthetic Polypeptide
MALPVTALLLPLALLLHAARPEVQLVESGGGLVQPGGSLRLSCAASGFSFSDFWMSWVRQAPGKGLEWVATISQAGSEKDYVDSVKGRFTISRDNAKKSLYLQMNSLRAEDTAVYYCASGVYSFDYRGQGTLVTVSSGTGGGGSGGGGSGGGGSEFEIVMTQSPATLSVSPGERATLSCRASQSVSRNLAWYQQKPGQAPRLLIYGASTRATGIPARFSGSGSGTEFTLTIGSLQSEDFAVYYCQQYKTWPRTFGQGTNVEIKLEGQPKANPTVTLFPPSSEELQANKATLVCLISDFYPGAVTVAWKADGSPVKAGVETTKPSKQSNNKYAASSYLSLTPEQWKSHRSYSCQVTHEGSTVEKTVAPTECSGRADCGFTSESYQQGVLSATILYEILLGKATLYAVLVSALVLMAMVKRKDSRGRAKRSGSGVKQTLNFDLLKLAGDVESNPGPTSMDWIWRILFLVGAATGAHSGPQLQLQESGPGLVKPSETLSLTCTVSGDSISSGDYYWGWIRQPPGKGLEWIGHIYYSGVTYYNPSLKSRVTISVDTSRNQFSLKLSSVTAADTAVYYCTREDSSNWRSRGQGTLVTVSSGSGGGGSGGGGSGGGGSFEQVQLQQWGAGLLKPSETLSLTCAVFGGSFSGYYWSWIRQPPGKGLEWIGEINHRGNTNDNPSLKSRVTISVDTSKNQFALKLSSVTAADTAVYYCARERGYTYGNFDHWGQGTLVTVSSTRASTKGPSVFPLAPSSKSTSGGTAALGCLVKDYFPEPVTVSWNSGALTSGVHTFPAVLQSSGLYSLSSVVTVPSSSLGTQTYICNVNHKPSNTKVDKRVEPKSCIPEDTFFPSPESSCDVKLVEKSFETDTNLNFQNLSVIGFRILLLKVAGFNLLMTLRLWSS

SEQ ID NO: 14132 - protein, 899 aa, Artificial Sequence
  Synthetic Polypeptide
MALPVTALLLPLALLLHAARPEVQLVESGGGLVQPGGSLRLSCAASGFSFSDFWMSWVRQAPGKGLEWVATISQAGSEKDYVDSVKGRFTISRDNAKKSLYLQMNSLRAEDTAVYYCASGVYSFDYRGQGTLVTVSSGTGGGGSGGGGSGGGGSEFEIVMTPSSATLSVSPGERATLSCRASQSVSRNLAWYQQKPGQAPRLLIYGASTRATGIPARFSGSGSGTEFTLTISSLQSEDFAVYYCHQYSNWMCSFGQGTKLEIKLEGQPKANPTVTLFPPSSEELQANKATLVCLISDFYPGAVTVAWKADGSPVKAGVETTKPSKQSNNKYAASSYLSLTPEQWKSHRSYSCQVTHEGSTVEKTVAPTECSGRADCGFTSESYQQGVLSATILYEILLGKATLYAVLVSALVLMAMVKRKDSRGRAKRSGSGVKQTLNFDLLKLAGDVESNPGPTSMDWIWRILFLVGAATGAHSGPQLQLQESGPGLVKPSETLSLTCTVSGDSISSGDYYWGWIRQPPGKGLEWIGHIYYSGVTYYNPSLKSRVTISVDTSRNQFSLKLSSVTAADTAVYYCTREDSSNWRSRGQGTLVTVSSGSGGGGSGGGGSGGGGSFEEVQLLESGGGLVQPGGSLRLSCAASGFTFSRYAMNWVRQAPGKGLEWVSGISGSGGRTYYADSVKGRFTISRDNSKNTLYLQMNSLRAEDTAVYYCAKDRDFWSGPFDYWGQGTLVTVSSTRASTKGPSVFPLAPSSKSTSGGTAALGCLVKDYFPEPVTVSWNSGALTSGVHTFPAVLQSSGLYSLSSVVTVPSSSLGTQTYICNVNHKPSNTKVDKRVEPKSCIPEDTFFPSPESSCDVKLVEKSFETDTNLNFQNLSVIGFRILLLKVAGFNLLMTLRLWSS

SEQ ID NO: 14133 - protein, 904 aa, Artificial Sequence
  Synthetic Polypeptide
MALPVTALLLPLALLLHAARPEVQLVESGGGLVQPGGSLRLSCAASGFSFSDFWMSWVRQAPGKGLEWVATISQAGSEKDYVDSVKGRFTISRDNAKKSLYLQMNSLRAEDTAVYYCASGVYSFDYRGQGTLVTVSSGTGGGGSGGGGSGGGGSEFDIQMTQSPSSLSASVGDRVTITCKASKNIRSYLAWYQQKPGKAPKLLIYSGSTLHSGVPSRFSGSGSGTDFTLTISSLQPEDFATYYCQQHHEYPLTFGQGTKVEIKRLEGQPKANPTVTLFPPSSEELQANKATLVCLISDFYPGAVTVAWKADGSPVKAGVETTKPSKQSNNKYAASSYLSLTPEQWKSHRSYSCQVTHEGSTVEKTVAPTECSGRADCGFTSESYQQGVLSATILYEILLGKATLYAVLVSALVLMAMVKRKDSRGRAKRSGSGVKQTLNFDLLKLAGDVESNPGPTSMDWIWRILFLVGAATGAHSGPQLQLQESGPGLVKPSETLSLTCTVSGDSISSGDYYWGWIRQPPGKGLEWIGHIYYSGVTYYNPSLKSRVTISVDTSRNQFSLKLSSVTAADTAVYYCTREDSSNWRSRGQGTLVTVSSGSGGGGSGGGGSGGGGSFEQVQLQESGPGLVKPSETLSLTCTVSGYTITSGYDWSWIRQPPGKGLEWIGYINYGGSTNYKPSLGSRVTISVDTSKNQFSLKLSSVTAADTAVYYCARYNEYKSYIYDWYFDFWGQGTLVTVSSTRASTKGPSVFPLAPSSKSTSGGTAALGCLVKDYFPEPVTVSWNSGALTSGVHTFPAVLQSSGLYSLSSVVTVPSSSLGTQTYICNVNHKPSNTKVDKRVEPKSCIPEDTFFPSPESSCDVKLVEKSFETDTNLNFQNLSVIGFRILLLKVAGFNLLMTLRLWSS

SEQ ID NO: 14134 - protein, 906 aa, Artificial Sequence
  Synthetic Polypeptide
MALPVTALLLPLALLLHAARPEVQLVESGGGLVQPGGSLRLSCAASGFSFSDFWMSWVRQAPGKGLEWVATISQAGSEKDYVDSVKGRFTISRDNAKKSLYLQMNSLRAEDTAVYYCASGVYSFDYRGQGTLVTVSSGTGGGGSGGGGSGGGGSEFQSVVTQPPSVSAAPGQKVTISCSGSSSNIGNNYVSWYQQLPGTAPKLLIYDNNKRPSGIPDRFSGSKSGTSATLGITGLQTGDEADYYCGTWDGSLYTMLFGGGTKLTVLLEGQPKANPTVTLFPPSSEELQANKATLVCLISDFYPGAVTVAWKADGSPVKAGVETTKPSKQSNNKYAASSYLSLTPEQWKSHRSYSCQVTHEGSTVEKTVAPTECSGRADCGFTSESYQQGVLSATILYEILLGKATLYAVLVSALVLMAMVKRKDSRGRAKRSGSGVKQTLNFDLLKLAGDVESNPGPTSMDWIWRILFLVGAATGAHSGPQLQLQESGPGLVKPSETLSLTCTVSGDSISSGDYYWGWIRQPPGKGLEWIGHIYYSGVTYYNPSLKSRVTISVDTSRNQFSLKLSSVTAADTAVYYCTREDSSNWRSRGQGTLVTVSSGSGGGGSGGGGSGGGGSFEEVQLVESGGGLVKPGGSLRLSCAASGFTFSNAWMSWVRQAPGKGLEWVGFIRSKAYGGTTEYAASVKGRFTISRDDSKSIAYLQMNNLKTEDTAVYYCARDGLYSSSWYDSDYWGQGTLVTVSSTRASTKGPSVFPLAPSSKSTSGGTAALGCLVKDYFPEPVTVSWNSGALTSGVHTFPAVLQSSGLYSLSSVVTVPSSSLGTQTYICNVNHKPSNTKVDKRVEPKSCIPEDTFFPSPESSCDVKLVEKSFETDTNLNFQNLSVIGFRILLLKVAGFNLLMTLRLWSS

SEQ ID NO: 14135 - protein, 911 aa, Artificial Sequence
  Synthetic Polypeptide
MALPVTALLLPLALLLHAARPEVQLVESGGGLVQPGGSLRLSCAASGFSFSDFWMSWVRQAPGKGLEWVATISQAGSEKDYVDSVKGRFTISRDNAKKSLYLQMNSLRAEDTAVYYCASGVYSFDYRGQGTLVTVSSGTGGGGSGGGGSGGGGSEFQSVLTQPPSVSGAPGQRVTISCTGSSSNIGAGYDVHWYQQLPGTAPKLLIFGNSNRPSGVPDRFSGFKSGTSASLAITGLQAEDEADYFCQSYDSSLSGSGVFGTGTKVTVLGLEGQPKANPTVTLFPPSSEELQANKATLVCLISDFYPGAVTVAWKADGSPVKAGVETTKPSKQSNNKYAASSYLSLTPEQWKSHRSYSCQVTHEGSTVEKTVAPTECSGRADCGFTSESYQQGVLSATILYEILLGKATLYAVLVSALVLMAMVKRKDSRGRAKRSGSGVKQTLNFDLLKLAGDVESNPGPTSMDWIWRILFLVGAATGAHSGPQLQLQESGPGLVKPSETLSLTCTVSGDSISSGDYYWGWIRQPPGKGLEWIGHIYYSGVTYYNPSLKSRVTISVDTSRNQFSLKLSSVTAADTAVYYCTREDSSNWRSRGQGTLVTVSSGSGGGGSGGGGSGGGGSFEQMQLVQSGGGLVQPGRSLRLSCAASGFTFDDYAMHWVRQAPGKGLEWVSGISWNSGSIGYADSVKGRFTISRDNAKNSLYLQMNSLRAEDTALYYCAKDIHSGSYYGLLYYAMDVWGQGTTVTVSSTRASTKGPSVFPLAPSSKSTSGGTAALGCLVKDYFPEPVTVSWNSGALTSGVHTFPAVLQSSGLYSLSSVVTVPSSSLGTQTYICNVNHKPSNTKVDKRVEPKSCIPEDTFFPSPESSCDVKLVEKSFETDTNLNFQNLSVIGFRILLLKVAGFNLLMTLRLWSS

SEQ ID NO: 14136 - protein, 911 aa, Artificial Sequence
  Synthetic Polypeptide
MALPVTALLLPLALLLHAARPEVQLVESGGGLVQPGGSLRLSCAASGFSFSDFWMSWVRQAPGKGLEWVATISQAGSEKDYVDSVKGRFTISRDNAKKSLYLQMNSLRAEDTAVYYCASGVYSFDYRGQGTLVTVSSGTGGGGSGGGGSGGGGSEFLPVLTQPPSASGTPGQRVTISCSGRSSNIGSNSVNWYRQLPGAAPKLLIYSNNQRPPGVPVRFSGSKSGTSASLAISGLQSEDEATYYCATWDDNLNVHYVFGTGTKVTVLGSRLEGQPKANPTVTLFPPSSEELQANKATLVCLISDFYPGAVTVAWKADGSPVKAGVETTKPSKQSNNKYAASSYLSLTPEQWKSHRSYSCQVTHEGSTVEKTVAPTECSGRADCGFTSESYQQGVLSATILYEILLGKATLYAVLVSALVLMAMVKRKDSRGRAKRSGSGVKQTLNFDLLKLAGDVESNPGPTSMDWIWRILFLVGAATGAHSGPQLQLQESGPGLVKPSETLSLTCTVSGDSISSGDYYWGWIRQPPGKGLEWIGHIYYSGVTYYNPSLKSRVTISVDTSRNQFSLKLSSVTAADTAVYYCTREDSSNWRSRGQGTLVTVSSGSGGGGSGGGGSGGGGSFELEMAQVQLVQSGAEVKKPGSSVKVSCKASGGTFSSYAISWVRQAPGQGLEWMGRIIPILGIANYAQKFQGRVTITADKSTSTAYMELSSLRSEDTAVYYCARGGYYSHDMWSEDWGQGTLVTVSSTRASTKGPSVFPLAPSSKSTSGGTAALGCLVKDYFPEPVTVSWNSGALTSGVHTFPAVLQSSGLYSLSSVVTVPSSSLGTQTYICNVNHKPSNTKVDKRVEPKSCIPEDTFFPSPESSCDVKLVEKSFETDTNLNFQNLSVIGFRILLLKVAGFNLLMTLRLWSS

SEQ ID NO: 14137 - protein, 905 aa, Artificial Sequence
  Synthetic Polypeptide
MALPVTALLLPLALLLHAARPEVQLVESGGGLVQPGGSLRLSCAASGFSFSDFWMSWVRQAPGKGLEWVATISQAGSEKDYVDSVKGRFTISRDNAKKSLYLQMNSLRAEDTAVYYCASGVYSFDYRGQGTLVTVSSGTGGGGSGGGGSGGGGSEFDFVMTQSPDSLAVSLGERVTMSCKSSQSLLNSGNQKNYLTWYQQKPGQPPKLLIYWASTRESGVPDRFSGSGSGTDFTLTISSLQAEDVAVYYCQNDYSYPYTFGQGTKLEIKLEGQPKANPTVTLFPPSSEELQANKATLVCLISDFYPGAVTVAWKADGSPVKAGVETTKPSKQSNNKYAASSYLSLTPEQWKSHRSYSCQVTHEGSTVEKTVAPTECSGRADCGFTSESYQQGVLSATILYEILLGKATLYAVLVSALVLMAMVKRKDSRGRAKRSGSGVKQTLNFDLLKLAGDVESNPGPTSMDWIWRILFLVGAATGAHSGPQLQLQESGPGLVKPSETLSLTCTVSGDSISSGDYYWGWIRQPPGKGLEWIGHIYYSGVTYYNPSLKSRVTISVDTSRNQFSLKLSSVTAADTAVYYCTREDSSNWRSRGQGTLVTVSSGSGGGGSGGGGSGGGGSFEEVQLVQSGAELKKPGASVKVSCKASGYTFTDYYMKWVRQAPGQGLEWIGDIIPSNGATFYNQKFKGRVTITVDKSTSTAYMELSSLRSEDTAVYYCARSHLLRASWFAYWGQGTLVTVSSTRASTKGPSVFPLAPSSKSTSGGTAALGCLVKDYFPEPVTVSWNSGALTSGVHTFPAVLQSSGLYSLSSVVTVPSSSLGTQTYICNVNHKPSNTKVDKRVEPKSCIPEDTFFPSPESSCDVKLVEKSFETDTNLNFQNLSVIGFRILLLKVAGFNLLMTLRLWSS

SEQ ID NO: 14138 - protein, 905 aa, Artificial Sequence
  Synthetic Polypeptide
MALPVTALLLPLALLLHAARPEVQLVESGGGLVQPGGSLRLSCAASGFSFSDFWMSWVRQAPGKGLEWVATISQAGSEKDYVDSVKGRFTISRDNAKKSLYLQMNSLRAEDTAVYYCASGVYSFDYRGQGTLVTVSSGTGGGGSGGGGSGGGGSEFDFVMTQSPDSLAVSLGERVTMSCKSSQSLLNSGNQKNYLTWYQQKPGQPPKLLIYWASTRESGVPDRFSGSGSGTDFTLTISSLQAEDVAVYYCQNDYSYPYTFGQGTKLEIKLEGQPKANPTVTLFPPSSEELQANKATLVCLISDFYPGAVTVAWKADGSPVKAGVETTKPSKQSNNKYAASSYLSLTPEQWKSHRSYSCQVTHEGSTVEKTVAPTECSGRADCGFTSESYQQGVLSATILYEILLGKATLYAVLVSALVLMAMVKRKDSRGRAKRSGSGVKQTLNFDLLKLAGDVESNPGPTSMDWIWRILFLVGAATGAHSGPQLQLQESGPGLVKPSETLSLTCTVSGDSISSGDYYWGWIRQPPGKGLEWIGHIYYSGVTYYNPSLKSRVTISVDTSRNQFSLKLSSVTAADTAVYYCTREDSSNWRSRGQGTLVTVSSGSGGGGSGGGGSGGGGSFEQVQLVQSGAELKKPGASVKVSCKASGYTFTDYYMKWVRQAPGQGLEWIGDIIPSNGATFYNQKFKGRVTITVDKSTSTAYMELSSLRSEDTAVYYCARSHLLRASWFAYWGQGTLVTVSSTRASTKGPSVFPLAPSSKSTSGGTAALGCLVKDYFPEPVTVSWNSGALTSGVHTFPAVLQSSGLYSLSSVVTVPSSSLGTQTYICNVNHKPSNTKVDKRVEPKSCIPEDTFFPSPESSCDVKLVEKSFETDTNLNFQNLSVIGFRILLLKVAGFNLLMTLRLWSS

SEQ ID NO: 14139 - protein, 895 aa, Artificial Sequence
  Synthetic Polypeptide
MALPVTALLLPLALLLHAARPEVQLVESGGGLVQPGGSLRLSCAASGFSFSDFWMSWVRQAPGKGLEWVATISQAGSEKDYVDSVKGRFTISRDNAKKSLYLQMNSLRAEDTAVYYCASGVYSFDYRGQGTLVTVSSGTGGGGSGGGGSGGGGSEFDVQITQSPSYLAASPGETITINCRASKSISKDLAWYQEKPGKTNKLLIYSGSTLQSGIPSRFSGSGSGTDFTLTISSLEPEDFAMYYCQQHNKYPYTFGGGTKLEIKRLEGQPKANPTVTLFPPSSEELQANKATLVCLISDFYPGAVTVAWKADGSPVKAGVETTKPSKQSNNKYAASSYLSLTPEQWKSHRSYSCQVTHEGSTVEKTVAPTECSGRADCGFTSESYQQGVLSATILYEILLGKATLYAVLVSALVLMAMVKRKDSRGRAKRSGSGVKQTLNFDLLKLAGDVESNPGPTSMDWIWRILFLVGAATGAHSGPQLQLQESGPGLVKPSETLSLTCTVSGDSISSGDYYWGWIRQPPGKGLEWIGHIYYSGVTYYNPSLKSRVTISVDTSRNQFSLKLSSVTAADTAVYYCTREDSSNWRSRGQGTLVTVSSGSGGGGSGGGGSGGGGSFEQVQLQQPGAELVRPGASVKLSCKASGYTFTSYWMNWVKQRPDQGLEWIGRIDPYDSETHYNQKFKDKAILTVDKSSSTAYMQLSSLTSEDSAVYYCARGNWDDYWGQGTTLTVSSTRASTKGPSVFPLAPSSKSTSGGTAALGCLVKDYFPEPVTVSWNSGALTSGVHTFPAVLQSSGLYSLSSVVTVPSSSLGTQTYICNVNHKPSNTKVDKRVEPKSCIPEDTFFPSPESSCDVKLVEKSFETDTNLNFQNLSVIGFRILLLKVAGFNLLMTLRLWSS

SEQ ID NO: 14140 - protein, 897 aa, Artificial Sequence
  Synthetic Polypeptide
MALPVTALLLPLALLLHAARPEVQLVESGGGLVQPGGSLRLSCAASGFSFSDFWMSWVRQAPGKGLEWVATISQAGSEKDYVDSVKGRFTISRDNAKKSLYLQMNSLRAEDTAVYYCASGVYSFDYRGQGTLVTVSSGTGGGGSGGGGSGGGGSEFEIVLTQSPTSMTASPGEQVTITCRASSSINYMHWYQQKPGASPRPWIYETSKLASGVPDRFSGSASGTSYSLTINNMEAEDAATYYCQQWNYPSWTFGGGTKLELKLEGQPKANPTVTLFPPSSEELQANKATLVCLISDFYPGAVTVAWKADGSPVKAGVETTKPSKQSNNKYAASSYLSLTPEQWKSHRSYSCQVTHEGSTVEKTVAPTECSGRADCGFTSESYQQGVLSATILYEILLGKATLYAVLVSALVLMAMVKRKDSRGRAKRSGSGVKQTLNFDLLKLAGDVESNPGPTSMDWIWRILFLVGAATGAHSGPQLQLQESGPGLVKPSETLSLTCTVSGDSISSGDYYWGWIRQPPGKGLEWIGHIYYSGVTYYNPSLKSRVTISVDTSRNQFSLKLSSVTAADTAVYYCTREDSSNWRSRGQGTLVTVSSGSGGGGSGGGGSGGGGSFEEVQLVESGGGLVQPGRSLKLSCAASGFTFSDYNMAWVRQAPKKGLEWVATILYDGGRTYYRGSVKGRFTISRDNAKSTLYLRMDSLRSEDTATYYCATHSRGTDYFDYWGQGVMVTVSSTRASTKGPSVFPLAPSSKSTSGGTAALGCLVKDYFPEPVTVSWNSGALTSGVHTFPAVLQSSGLYSLSSVVTVPSSSLGTQTYICNVNHKPSNTKVDKRVEPKSCIPEDTFFPSPESSCDVKLVEKSFETDTNLNFQNLSVIGFRILLLKVAGFNLLMTLRLWSS

SEQ ID NO: 14141 - protein, 906 aa, Artificial Sequence
  Synthetic Polypeptide
MALPVTALLLPLALLLHAARPEVQLVESGGGLVQPGGSLRLSCAASGFSFSDFWMSWVRQAPGKGLEWVATISQAGSEKDYVDSVKGRFTISRDNAKKSLYLQMNSLRAEDTAVYYCASGVYSFDYRGQGTLVTVSSGTGGGGSGGGGSGGGGSEFDIVMTQSPSSLAVSEGETVTINCKSSQSFLSSGDGKNYVAWYQYKPGQSPKLLIYWASTRQSGVPDRFIGSGSGTDFTLTISTVQAEDLAIYYCQQYYDTPLTFGSGTKLEIKLEGQPKANPTVTLFPPSSEELQANKATLVCLISDFYPGAVTVAWKADGSPVKAGVETTKPSKQSNNKYAASSYLSLTPEQWKSHRSYSCQVTHEGSTVEKTVAPTECSGRADCGFTSESYQQGVLSATILYEILLGKATLYAVLVSALVLMAMVKRKDSRGRAKRSGSGVKQTLNFDLLKLAGDVESNPGPTSMDWIWRILFLVGAATGAHSGPQLQLQESGPGLVKPSETLSLTCTVSGDSISSGDYYWGWIRQPPGKGLEWIGHIYYSGVTYYNPSLKSRVTISVDTSRNQFSLKLSSVTAADTAVYYCTREDSSNWRSRGQGTLVTVSSGSGGGGSGGGGSGGGGSFEEVKLQESGPSLVQSSQTLSLTCTVSGFSLTSYHIHWVRQTPGKGLEWMGVMWSDGDTSYNSALKSRLSISRDTSQSQVFLKMNSLQTEDTATYYCARGYYSSYLYLWFAYWGQGTLVTVSSTRASTKGPSVFPLAPSSKSTSGGTAALGCLVKDYFPEPVTVSWNSGALTSGVHTFPAVLQSSGLYSLSSVVTVPSSSLGTQTYICNVNHKPSNTKVDKRVEPKSCIPEDTFFPSPESSCDVKLVEKSFETDTNLNFQNLSVIGFRILLLKVAGFNLLMTLRLWSS

SEQ ID NO: 14142 - protein, 910 aa, Artificial Sequence
  Synthetic Polypeptide
MALPVTALLLPLALLLHAARPEVQLVESGGGLVQPGGSLRLSCAASGFSFSDFWMSWVRQAPGKGLEWVATISQAGSEKDYVDSVKGRFTISRDNAKKSLYLQMNSLRAEDTAVYYCASGVYSFDYRGQGTLVTVSSGTGGGGSGGGGSGGGGSEFDVLMTQTPVSLPVSLGGQVSISCRSSQSLVHSDGDTYLHWYLQKPGQSPQLLIYRVSNRFSGVPDRFSGSGSGTDFTLKISRVEPEDLGLYYCLQTTHFPPWTFGGGTKLEMKLEGQPKANPTVTLFPPSSEELQANKATLVCLISDFYPGAVTVAWKADGSPVKAGVETTKPSKQSNNKYAASSYLSLTPEQWKSHRSYSCQVTHEGSTVEKTVAPTECSGRADCGFTSESYQQGVLSATILYEILLGKATLYAVLVSALVLMAMVKRKDSRGRAKRSGSGVKQTLNFDLLKLAGDVESNPGPTSMDWIWRILFLVGAATGAHSGPQLQLQESGPGLVKPSETLSLTCTVSGDSISSGDYYWGWIRQPPGKGLEWIGHIYYSGVTYYNPSLKSRVTISVDTSRNQFSLKLSSVTAADTAVYYCTREDSSNWRSRGQGTLVTVSSGSGGGGSGGGGSGGGGSFEQVQLQQSGPELRRPGSSVRLSCKASGYRIKDFLIHWIKNRPEHGLEWIGWIDPEDGETKYAQKFQTKATLTADTSSNTAYMQLSSLTSEDTATYFCARWGDVYYGLMRGHVMDAWGQGTSVTVSSTRASTKGPSVFPLAPSSKSTSGGTAALGCLVKDYFPEPVTVSWNSGALTSGVHTFPAVLQSSGLYSLSSVVTVPSSSLGTQTYICNVNHKPSNTKVDKRVEPKSCIPEDTFFPSPESSCDVKLVEKSFETDTNLNFQNLSVIGFRILLLKVAGFNLLMTLRLWSS

SEQ ID NO: 14143 - protein, 905 aa, Artificial Sequence
  Synthetic Polypeptide
MALPVTALLLPLALLLHAARPEVQLVESGGGLVQPGGSLRLSCAASGFSFSDFWMSWVRQAPGKGLEWVATISQAGSEKDYVDSVKGRFTISRDNAKKSLYLQMNSLRAEDTAVYYCASGVYSFDYRGQGTLVTVSSGTGGGGSGGGGSGGGGSEFDIVMTQSPATLSLSPGERATLSCRSSKSLQNVNGNTYLYWFQQKPGQSPQLLIYRMSNLNSGVPDRFSGSGSGTEFTLTISSLEPEDFAVYYCMQHLEYPITFGAGTKLEIKLEGQPKANPTVTLFPPSSEELQANKATLVCLISDFYPGAVTVAWKADGSPVKAGVETTKPSKQSNNKYAASSYLSLTPEQWKSHRSYSCQVTHEGSTVEKTVAPTECSGRADCGFTSESYQQGVLSATILYEILLGKATLYAVLVSALVLMAMVKRKDSRGRAKRSGSGVKQTLNFDLLKLAGDVESNPGPTSMDWIWRILFLVGAATGAHSGPQLQLQESGPGLVKPSETLSLTCTVSGDSISSGDYYWGWIRQPPGKGLEWIGHIYYSGVTYYNPSLKSRVTISVDTSRNQFSLKLSSVTAADTAVYYCTREDSSNWRSRGQGTLVTVSSGSGGGGSGGGGSGGGGSFEEVQLVESGGGLVKPGGSLKLSCAASGYTFTSYVMHWVRQAPGKGLEWIGYINPYNDGTKYNEKFQGRVTISSDKSISTAYMELSSLRSEDTAMYYCARGTYYYGTRVFDYWGQGTLVTVSSTRASTKGPSVFPLAPSSKSTSGGTAALGCLVKDYFPEPVTVSWNSGALTSGVHTFPAVLQSSGLYSLSSVVTVPSSSLGTQTYICNVNHKPSNTKVDKRVEPKSCIPEDTFFPSPESSCDVKLVEKSFETDTNLNFQNLSVIGFRILLLKVAGFNLLMTLRLWSS

SEQ ID NO: 14144 - protein, 901 aa, Artificial Sequence
  Synthetic Polypeptide
MALPVTALLLPLALLLHAARPEVQLVESGGGLVQPGGSLRLSCAASGFSFSDFWMSWVRQAPGKGLEWVATISQAGSEKDYVDSVKGRFTISRDNAKKSLYLQMNSLRAEDTAVYYCASGVYSFDYRGQGTLVTVSSGTGGGGSGGGGSGGGGSEFDIQMTQSPSSLSASVGDRVTITCKASDHINNWLAWYQQKPGQAPKLLIYGATTLETGVPSRFSGSGSGTDYTLTISSLQPEDFATYYCQQSWNTPWTFGQGTKLEIKRLEGQPKANPTVTLFPPSSEELQANKATLVCLISDFYPGAVTVAWKADGSPVKAGVETTKPSKQSNNKYAASSYLSLTPEQWKSHRSYSCQVTHEGSTVEKTVAPTECSGRADCGFTSESYQQGVLSATILYEILLGKATLYAVLVSALVLMAMVKRKDSRGRAKRSGSGVKQTLNFDLLKLAGDVESNPGPTSMDWIWRILFLVGAATGAHSGPQLQLQESGPGLVKPSETLSLTCTVSGDSISSGDYYWGWIRQPPGKGLEWIGHIYYSGVTYYNPSLKSRVTISVDTSRNQFSLKLSSVTAADTAVYYCTREDSSNWRSRGQGTLVTVSSGSGGGGSGGGGSGGGGSFEQVQLQQPGAELVKPGASVKMSCKASGYAFSSYWINWMKQKPGQGLEWIGQIYPGDGDTNYNGKFKGRATLTADTSSSTAYMQLSSLTSEDSAVYFCARSITTVVGCAMDYWGQGTSVTVSSTRASTKGPSVFPLAPSSKSTSGGTAALGCLVKDYFPEPVTVSWNSGALTSGVHTFPAVLQSSGLYSLSSVVTVPSSSLGTQTYICNVNHKPSNTKVDKRVEPKSCIPEDTFFPSPESSCDVKLVEKSFETDTNLNFQNLSVIGFRILLLKVAGFNLLMTLRLWSS

SEQ ID NO: 14145 - protein, 903 aa, Artificial Sequence
  Synthetic Polypeptide
MALPVTALLLPLALLLHAARPEVQLVESGGGLVQPGGSLRLSCAASGFSFSDFWMSWVRQAPGKGLEWVATISQAGSEKDYVDSVKGRFTISRDNAKKSLYLQMNSLRAEDTAVYYCASGVYSFDYRGQGTLVTVSSGTGGGGSGGGGSGGGGSEFQIVLSQSPAILSASPGEKVTMTCRASSSVSYMHWYQQKPGSSPKPWIYATSNLASGVPARFSGSGSGTSYSFTISRVEAEDAATYYCQQWTFNPPTFGGGTRLEIKRTVAALEGQPKANPTVTLFPPSSEELQANKATLVCLISDFYPGAVTVAWKADGSPVKAGVETTKPSKQSNNKYAASSYLSLTPEQWKSHRSYSCQVTHEGSTVEKTVAPTECSGRADCGFTSESYQQGVLSATILYEILLGKATLYAVLVSALVLMAMVKRKDSRGRAKRSGSGVKQTLNFDLLKLAGDVESNPGPTSMDWIWRILFLVGAATGAHSGPQLQLQESGPGLVKPSETLSLTCTVSGDSISSGDYYWGWIRQPPGKGLEWIGHIYYSGVTYYNPSLKSRVTISVDTSRNQFSLKLSSVTAADTAVYYCTREDSSNWRSRGQGTLVTVSSGSGGGGSGGGGSGGGGSFEQAYLQQSGAELVRPGASVKMSCKASGYTFTSYNMHWVKQTPRQGLEWIGGIYPGNGDTSYNQKFKGKATLTVGKSSSTAYMQLSSLTSEDSAVYFCARYDYNYAMDYWGQGTSVTVSSASTRASTKGPSVFPLAPSSKSTSGGTAALGCLVKDYFPEPVTVSWNSGALTSGVHTFPAVLQSSGLYSLSSVVTVPSSSLGTQTYICNVNHKPSNTKVDKRVEPKSCIPEDTFFPSPESSCDVKLVEKSFETDTNLNFQNLSVIGFRILLLKVAGFNLLMTLRLWSS

SEQ ID NO: 14146 - protein, 901 aa, Artificial Sequence
  Synthetic Polypeptide
MALPVTALLLPLALLLHAARPEVQLVESGGGLVQPGGSLRLSCAASGFSFSDFWMSWVRQAPGKGLEWVATISQAGSEKDYVDSVKGRFTISRDNAKKSLYLQMNSLRAEDTAVYYCASGVYSFDYRGQGTLVTVSSGTGGGGSGGGGSGGGGSEFEIVLTQSPATLSLSPGERATLSCRASQSVSSYLAWYQQKPGQAPRLLIYDASNRATGIPARFSGSGSGTDFTLTISSLEPEDFAVYYCQQRSNWPITFGQGTRLEIKLEGQPKANPTVTLFPPSSEELQANKATLVCLISDFYPGAVTVAWKADGSPVKAGVETTKPSKQSNNKYAASSYLSLTPEQWKSHRSYSCQVTHEGSTVEKTVAPTECSGRADCGFTSESYQQGVLSATILYEILLGKATLYAVLVSALVLMAMVKRKDSRGRAKRSGSGVKQTLNFDLLKLAGDVESNPGPTSMDWIWRILFLVGAATGAHSGPQLQLQESGPGLVKPSETLSLTCTVSGDSISSGDYYWGWIRQPPGKGLEWIGHIYYSGVTYYNPSLKSRVTISVDTSRNQFSLKLSSVTAADTAVYYCTREDSSNWRSRGQGTLVTVSSGSGGGGSGGGGSGGGGSFEEVQLVESGGGLVQPDRSLRLSCAASGFTFHDYAMHWVRQAPGKGLEWVSTISWNSGTIGYADSVKGRFTISRDNAKNSLYLQMNSLRAEDTALYYCAKDIQYGNYYYGMDVWGQGTTVTVSSTRASTKGPSVFPLAPSSKSTSGGTAALGCLVKDYFPEPVTVSWNSGALTSGVHTFPAVLQSSGLYSLSSVVTVPSSSLGTQTYICNVNHKPSNTKVDKRVEPKSCIPEDTFFPSPESSCDVKLVEKSFETDTNLNFQNLSVIGFRILLLKVAGFNLLMTLRLWSS

SEQ ID NO: 14147 - protein, 896 aa, Artificial Sequence
  Synthetic Polypeptide
MALPVTALLLPLALLLHAARPEVQLVESGGGLVQPGGSLRLSCAASGFSFSDFWMSWVRQAPGKGLEWVATISQAGSEKDYVDSVKGRFTISRDNAKKSLYLQMNSLRAEDTAVYYCASGVYSFDYRGQGTLVTVSSGTGGGGSGGGGSGGGGSEFDIQMTQSPSSLSASVGDRVTINCKASQDINSYLSWFQQKPGKAPKTLIYRANRLVDGVPSRFSGSGSGQDYTLTISSLQPEDFATYYCLQYDEFPLTFGGGTKVEIKLEGQPKANPTVTLFPPSSEELQANKATLVCLISDFYPGAVTVAWKADGSPVKAGVETTKPSKQSNNKYAASSYLSLTPEQWKSHRSYSCQVTHEGSTVEKTVAPTECSGRADCGFTSESYQQGVLSATILYEILLGKATLYAVLVSALVLMAMVKRKDSRGRAKRSGSGVKQTLNFDLLKLAGDVESNPGPTSMDWIWRILFLVGAATGAHSGPQLQLQESGPGLVKPSETLSLTCTVSGDSISSGDYYWGWIRQPPGKGLEWIGHIYYSGVTYYNPSLKSRVTISVDTSRNQFSLKLSSVTAADTAVYYCTREDSSNWRSRGQGTLVTVSSGSGGGGSGGGGSGGGGSFEQVQLVQSGAEVKKPGASVKVSCKASGYTFTNYDINWVRQAPGQGLEWIGWIYPGDGSTKYNEKFKAKATLTADTSTSTAYMELRSLRSDDTAVYYCASGYEDAMDYWGQGTTVTVSSTRASTKGPSVFPLAPSSKSTSGGTAALGCLVKDYFPEPVTVSWNSGALTSGVHTFPAVLQSSGLYSLSSVVTVPSSSLGTQTYICNVNHKPSNTKVDKRVEPKSCIPEDTFFPSPESSCDVKLVEKSFETDTNLNFQNLSVIGFRILLLKVAGFNLLMTLRLWSS

SEQ ID NO: 14148 - protein, 898 aa, Artificial Sequence
  Synthetic Polypeptide
MALPVTALLLPLALLLHAARPEVQLVESGGGLVQPGGSLRLSCAASGFSFSDFWMSWVRQAPGKGLEWVATISQAGSEKDYVDSVKGRFTISRDNAKKSLYLQMNSLRAEDTAVYYCASGVYSFDYRGQGTLVTVSSGTGGGGSGGGGSGGGGSEFDIVMTQTPLSLSVTPGQPASISCKSSQSLLDGDGKTYLNWLLQKPGQSPQRLIYLVSKLDSGVPDRFSGSGSGTDFTLKISRVEAEDVGVYYCWQGTHFPRTFGQGTKLEIKLEGQPKANPTVTLFPPSSEELQANKATLVCLISDFYPGAVTVAWKADGSPVKAGVETTKPSKQSNNKYAASSYLSLTPEQWKSHRSYSCQVTHEGSTVEKTVAPTECSGRADCGFTSESYQQGVLSATILYEILLGKATLYAVLVSALVLMAMVKRKDSRGRAKRSGSGVKQTLNFDLLKLAGDVESNPGPTSMDWIWRILFLVGAATGAHSGPQLQLQESGPGLVKPSETLSLTCTVSGDSISSGDYYWGWIRQPPGKGLEWIGHIYYSGVTYYNPSLKSRVTISVDTSRNQFSLKLSSVTAADTAVYYCTREDSSNWRSRGQGTLVTVSSGSGGGGSGGGGSGGGGSFEQVQLVQSGAEVKKPGASVKVSCKASGYTFKDTYIHWVRQAPGQGLEWMGRIDPANGNTKYDPKFQGRVTMTRDTSISTAYMELSRLRSDDTAVYYCARRGGVDWGQGTLVTVSSTRASTKGPSVFPLAPSSKSTSGGTAALGCLVKDYFPEPVTVSWNSGALTSGVHTFPAVLQSSGLYSLSSVVTVPSSSLGTQTYICNVNHKPSNTKVDKRVEPKSCIPEDTFFPSPESSCDVKLVEKSFETDTNLNFQNLSVIGFRILLLKVAGFNLLMTLRLWSS

SEQ ID NO: 14149 - protein, 899 aa, Artificial Sequence
  Synthetic Polypeptide
MALPVTALLLPLALLLHAARPEVQLVESGGGLVQPGGSLRLSCAASGFSFSDFWMSWVRQAPGKGLEWVATISQAGSEKDYVDSVKGRFTISRDNAKKSLYLQMNSLRAEDTAVYYCASGVYSFDYRGQGTLVTVSSGTGGGGSGGGGSGGGGSEFDIQMTQSPSSLSASVGDRVTITCKASQDVSTAVAWFQQKPGKAPKLLIYSPSYRYTGVPSRFSGSGSGTDFTLTISSLQPEDFTYYCQQLYSTPYTFGQGTKVEIKLEGQPKANPTVTLFPPSSEELQANKATLVCLISDFYPGAVTVAWKADGSPVKAGVETTKPSKQSNNKYAASSYLSLTPEQWKSHRSYSCQVTHEGSTVEKTVAPTECSGRADCGFTSESYQQGVLSATILYEILLGKATLYAVLVSALVLMAMVKRKDSRGRAKRSGSGVKQTLNFDLLKLAGDVESNPGPTSMDWIWRILFLVGAATGAHSGPQLQLQESGPGLVKPSETLSLTCTVSGDSISSGDYYWGWIRQPPGKGLEWIGHIYYSGVTYYNPSLKSRVTISVDTSRNQFSLKLSSVTAADTAVYYCTREDSSNWRSRGQGTLVTVSSGSGGGGSGGGGSGGGGSFEEVQLVQSGAEVKKPGASVKVSCKASGYTFTDYYLDVVVRQAPGQGLEWIGRVNPYNGGTIYNQKFKGRVTLTRDTSTSTAYLELSSLRSEDTAVYYCARDHYRYDPLLDYWGQGTLVTVSSTRASTKGPSVFPLAPSSKSTSGGTAALGCLVKDYFPEPVTVSWNSGALTSGVHTFPAVLQSSGLYSLSSVVTVPSSSLGTQTYICNVNHKPSNTKVDKRVEPKSCIPEDTFFPSPESSCDVKLVEKSFETDTNLNFQNLSVIGFRILLLKVAGFNLLMTLRLWSS

SEQ ID NO: 14150 - protein, 905 aa, Artificial Sequence
  Synthetic Polypeptide
MALPVTALLLPLALLLHAARPEVQLVESGGGLVQPGGSLRLSCAASGFSFSDFWMSWVRQAPGKGLEWVATISQAGSEKDYVDSVKGRFTISRDNAKKSLYLQMNSLRAEDTAVYYCASGVYSFDYRGQGTLVTVSSGTGGGGSGGGGSGGGGSEFDIQMTQSPSSLSASVGDRVTITCRASQSVSTSSYNYMHWYQQKPGKPPKLLIKYASNLESGVPSRFSGSGSGTDFTLTISSLQPEDFATYYCQHSWEIPLTFGQGTKVEIKLEGQPKANPTVTLFPPSSEELQANKATLVCLISDFYPGAVTVAWKADGSPVKAGVETTKPSKQSNNKYAASSYLSLTPEQWKSHRSYSCQVTHEGSTVEKTVAPTECSGRADCGFTSESYQQGVLSATILYEILLGKATLYAVLVSALVLMAMVKRKDSRGRAKRSGSGVKQTLNFDLLKLAGDVESNPGPTSMDWIWRILFLVGAATGAHSGPQLQLQESGPGLVKPSETLSLTCTVSGDSISSGDYYWGWIRQPPGKGLEWIGHIYYSGVTYYNPSLKSRVTISVDTSRNQFSLKLSSVTAADTAVYYCTREDSSNWRSRGQGTLVTVSSGSGGGGSGGGGSGGGGSFEEVQLVQSGAEVKKPGASVKVSCKASGYSFTDYYMHWVRQAPGQGLEWIGRINPYNGAAFYSQNFKDRVTLTVDTSTSTAYLELSSLRSEDTAVYYCAIERGADLEGYAMDYWGQGTLVTVSSTRASTKGPSVFPLAPSSKSTSGGTAALGCLVKDYFPEPVTVSWNSGALTSGVHTFPAVLQSSGLYSLSSVVTVPSSSLGTQTYICNVNHKPSNTKVDKRVEPKSCIPEDTFFPSPESSCDVKLVEKSFETDTNLNFQNLSVIGFRILLLKVAGFNLLMTLRLWSS

SEQ ID NO: 14151 - protein, 903 aa, Artificial Sequence
  Synthetic Polypeptide
MALPVTALLLPLALLLHAARPEVQLVESGGGLVQPGGSLRLSCAASGFSFSDFWMSWVRQAPGKGLEWVATISQAGSEKDYVDSVKGRFTISRDNAKKSLYLQMNSLRAEDTAVYYCASGVYSFDYRGQGTLVTVSSGTGGGGSGGGGSGGGGSEFEIVLTQSPATLSASPGERVTLTCRASSNVISSYVHWYQQKPGSSPRLFLYSTSNLASGVPSRFSGSGSGTDFTFTISSLEAEDAATYYCQQYSGYPLTFGQGTRLEIKLEGQPKANPTVTLFPPSSEELQANKATLVCLISDFYPGAVTVAWKADGSPVKAGVETTKPSKQSNNKYAASSYLSLTPEQWKSHRSYSCQVTHEGSTVEKTVAPTECSGRADCGFTSESYQQGVLSATILYEILLGKATLYAVLVSALVLMAMVKRKDSRGRAKRSGSGVKQTLNFDLLKLAGDVESNPGPTSMDWIWRILFLVGAATGAHSGPQLQLQESGPGLVKPSETLSLTCTVSGDSISSGDYYWGWIRQPPGKGLEWIGHIYYSGVTYYNPSLKSRVTISVDTSRNQFSLKLSSVTAADTAVYYCTREDSSNWRSRGQGTLVTVSSGSGGGGSGGGGSGGGGSFEQVQLQESGPGLVKPSETLSLTCAVSGYSITSAYYWNWIRQPPGKGLEWIGYISYDGRNNYNPSLKNRITINPDTSKNQFSLQLNSVTPEDTAVYYCAREGDYDVGNYYAMDYWGQGTLVTVSSTRASTKGPSVFPLAPSSKSTSGGTAALGCLVKDYFPEPVTVSWNSGALTSGVHTFPAVLQSSGLYSLSSVVTVPSSSLGTQTYICNVNHKPSNTKVDKRVEPKSCIPEDTFFPSPESSCDVKLVEKSFETDTNLNFQNLSVIGFRILLLKVAGFNLLMTLRLWSS

SEQ ID NO: 14152 - protein, 903 aa, Artificial Sequence
  Synthetic Polypeptide
MALPVTALLLPLALLLHAARPEVQLVESGGGLVQPGGSLRLSCAASGFSFSDFWMSWVRQAPGKGLEWVATISQAGSEKDYVDSVKGRFTISRDNAKKSLYLQMNSLRAEDTAVYYCASGVYSFDYRGQGTLVTVSSGTGGGGSGGGGSGGGGSEFEIVLTQSPATLSLSPGERATLSCRASSNVISSYVHWYQQKPGQAPRLLIYSTSNLASGIPARFSGSGSGTDFTLTISSLEPEDFAVYYCQQYSGYPLTFGQGTRLEIKLEGQPKANPTVTLFPPSSEELQANKATLVCLISDFYPGAVTVAWKADGSPVKAGVETTKPSKQSNNKYAASSYLSLTPEQWKSHRSYSCQVTHEGSTVEKTVAPTECSGRADCGFTSESYQQGVLSATILYEILLGKATLYAVLVSALVLMAMVKRKDSRGRAKRSGSGVKQTLNFDLLKLAGDVESNPGPTSMDWIWRILFLVGAATGAHSGPQLQLQESGPGLVKPSETLSLTCTVSGDSISSGDYYWGWIRQPPGKGLEWIGHIYYSGVTYYNPSLKSRVTISVDTSRNQFSLKLSSVTAADTAVYYCTREDSSNWRSRGQGTLVTVSSGSGGGGSGGGGSGGGGSFEEVQLVESGGGLVQPGRSLRLSCAASGYSITSAYYWNWVRQAPGKGLEWVSYISYDGRNNYNPSLKNRFTISRDNAKKSLYLQMNSLRAEDTALYYCAKEGDYDVGNYYAMDYWGQGTTVTVSSTRASTKGPSVFPLAPSSKSTSGGTAALGCLVKDYFPEPVTVSWNSGALTSGVHTFPAVLQSSGLYSLSSVVTVPSSSLGTQTYICNVNHKPSNTKVDKRVEPKSCIPEDTFFPSPESSCDVKLVEKSFETDTNLNFQNLSVIGFRILLLKVAGFNLLMTLRLWSS

SEQ ID NO: 14153 - protein, 902 aa, Artificial Sequence
  Synthetic Polypeptide
MALPVTALLLPLALLLHAARPEVQLVESGGGLVQPGGSLRLSCAASGFSFSDFWMSWVRQAPGKGLEWVATISQAGSEKDYVDSVKGRFTISRDNAKKSLYLQMNSLRAEDTAVYYCASGVYSFDYRGQGTLVTVSSGTGGGGSGGGGSGGGGSEFDVVMTQTPLSLPVSLGDQASISCRSSQSLVHSNGNTYLRWYLQKPGQSPKVLIYKVSNRVSGVPDRFSGSGSGTDFTLKINRVEAEDLGVYFCSQSTHVPWTFGGGTKLEIKLEGQPKANPTVTLFPPSSEELQANKATLVCLISDFYPGAVTVAWKADGSPVKAGVETTKPSKQSNNKYAASSYLSLTPEQWKSHRSYSCQVTHEGSTVEKTVAPTECSGRADCGFTSESYQQGVLSATILYEILLGKATLYAVLVSALVLMAMVKRKDSRGRAKRSGSGVKQTLNFDLLKLAGDVESNPGPTSMDWIWRILFLVGAATGAHSGPQLQLQESGPGLVKPSETLSLTCTVSGDSISSGDYYWGWIRQPPGKGLEWIGHIYYSGVTYYNPSLKSRVTISVDTSRNQFSLKLSSVTAADTAVYYCTREDSSNWRSRGQGTLVTVSSGSGGGGSGGGGSGGGGSFEGVKLDETGGGLVQPGGAMKLSCVTSGFTFGHYWMNWVRQSPEKGLEWVAQFRNKPYNYETYYSDSVKGRFTISRDDSKSSVYLQMNNLRVEDTGIYYCTGASYGMEYLGQGTSVTVSTTRASTKGPSVFPLAPSSKSTSGGTAALGCLVKDYFPEPVTVSWNSGALTSGVHTFPAVLQSSGLYSLSSVVTVPSSSLGTQTYICNVNHKPSNTKVDKRVEPKSCIPEDTFFPSPESSCDVKLVEKSFETDTNLNFQNLSVIGFRILLLKVAGFNLLMTLRLWSS

SEQ ID NO: 14154 - protein, 908 aa, Artificial Sequence
  Synthetic Polypeptide
MALPVTALLLPLALLLHAARPEVQLVESGGGLVQPGGSLRLSCAASGFSFSDFWMSWVRQAPGKGLEWVATISQAGSEKDYVDSVKGRFTISRDNAKKSLYLQMNSLRAEDTAVYYCASGVYSFDYRGQGTLVTVSSGTGGGGSGGGGSGGGGSEFQVQLVESGGNLVQPGGSLRLSCAASGFTFGSFSMSWVRQAPGGGLEWVAGLSARSSLTHYADSVKGRFTISRDNAKNSVYLQMNSLRVEDTAVYYCARRSYDSSGYWGHFYSYMDVWGQGTLVTVSLEGQPKANPTVTLFPPSSEELQANKATLVCLISDFYPGAVTVAWKADGSPVKAGVETTKPSKQSNNKYAASSYLSLTPEQWKSHRSYSCQVTHEGSTVEKTVAPTECSGRADCGFTSESYQQGVLSATILYEILLGKATLYAVLVSALVLMAMVKRKDSRGRAKRSGSGVKQTLNFDLLKLAGDVESNPGPTSMDWIWRILFLVGAATGAHSGPQLQLQESGPGLVKPSETLSLTCTVSGDSISSGDYYWGWIRQPPGKGLEWIGHIYYSGVTYYNPSLKSRVTISVDTSRNQFSLKLSSVTAADTAVYYCTREDSSNWRSRGQGTLVTVSSGSGGGGSGGGGSGGGGSFESVLTQPSSVSAAPGQKVTISCSGSTSNIGNNYVSWYQQHPGKAPKLMIYDVSKRPSGVPDRFSGSKSGNSASLDISGLQSEDEADYYCAAWDDSLSEFLFGTGTKLTVLGTRASTKGPSVFPLAPSSKSTSGGTAALGCLVKDYFPEPVTVSWNSGALTSGVHTFPAVLQSSGLYSLSSVVTVPSSSLGTQTYICNVNHKPSNTKVDKRVEPKSCIPEDTFFPSPESSCDVKLVEKSFETDTNLNFQNLSVIGFRILLLKVAGFNLLMTLRLWSS

SEQ ID NO: 14155 - protein, 903 aa, Artificial Sequence
  Synthetic Polypeptide
MALPVTALLLPLALLLHAARPEVQLVESGGGLVQPGGSLRLSCAASGFSFSDFWMSWVRQAPGKGLEWVATISQAGSEKDYVDSVKGRFTISRDNAKKSLYLQMNSLRAEDTAVYYCASGVYSFDYRGQGTLVTVSSGTGGGGSGGGGSGGGGSEFDVVMTQSPSSLSASVGDRVTITCQSSLDISHYLNWYQQKPGKAPKLLIYDASNLETGVPSRFSGSGSGTHFTFTISSLQPEDFATYYCQQYDNLPLTFGGGTKLEIKRLEGQPKANPTVTLFPPSSEELQANKATLVCLISDFYPGAVTVAWKADGSPVKAGVETTKPSKQSNNKYAASSYLSLTPEQWKSHRSYSCQVTHEGSTVEKTVAPTECSGRADCGFTSESYQQGVLSATILYEILLGKATLYAVLVSALVLMAMVKRKDSRGRAKRSGSGVKQTLNFDLLKLAGDVESNPGPTSMDWIWRILFLVGAATGAHSGPQLQLQESGPGLVKPSETLSLTCTVSGDSISSGDYYWGWIRQPPGKGLEWIGHIYYSGVTYYNPSLKSRVTISVDTSRNQFSLKLSSVTAADTAVYYCTREDSSNWRSRGQGTLVTVSSGSGGGGSGGGGSGGGGSFEQVQLVQSGGGVVQPGGSLRVSCAASGVTLSDYGMHWVRQAPGKGLEWVAFIRNDGSDKYYADSVKGRFTISRDNSEKTVSLQMSSLRAEDTAVYYCAKNGESGPLDYWYLDLWGRGTLVTVSSTRASTKGPSVFPLAPSSKSTSGGTAALGCLVKDYFPEPVTVSWNSGALTSGVHTFPAVLQSSGLYSLSSVVTVPSSSLGTQTYICNVNHKPSNTKVDKRVEPKSCIPEDTFFPSPESSCDVKLVEKSFETDTNLNFQNLSVIGFRILLLKVAGFNLLMTLRLWSS

SEQ ID NO: 14156 - protein, 907 aa, Artificial Sequence
  Synthetic Polypeptide
MALPVTALLLPLALLLHAARPEVQLVESGGGLVQPGGSLRLSCAASGFSFSDFWMSWVRQAPGKGLEWVATISQAGSEKDYVDSVKGRFTISRDNAKKSLYLQMNSLRAEDTAVYYCASGVYSFDYRGQGTLVTVSSGTGGGGSGGGGSGGGGSEFSYELTQPPSVSGTPGQRVAISCSGSSSNIGTRMVTWYQHVPGTAPKLLIFNNNQRPSGVPDRFSASKSGTSASLAIIGLQSDDEADYYCATWDDNVKSYVFGTGTKVTVLGSRLEGQPKANPTVTLFPPSSEELQANKATLVCLISDFYPGAVTVAWKADGSPVKAGVETTKPSKQSNNKYAASSYLSLTPEQWKSHRSYSCQVTHEGSTVEKTVAPTECSGRADCGFTSESYQQGVLSATILYEILLGKATLYAVLVSALVLMAMVKRKDSRGRAKRSGSGVKQTLNFDLLKLAGDVESNPGPTSMDWIWRILFLVGAATGAHSGPQLQLQESGPGLVKPSETLSLTCTVSGDSISSGDYYWGWIRQPPGKGLEWIGHIYYSGVTYYNPSLKSRVTISVDTSRNQFSLKLSSVTAADTAVYYCTREDSSNWRSRGQGTLVTVSSGSGGGGSGGGGSGGGGSFELEMAQVQLQQWGAGLLKPSETLSLTCAVYGGSFSGYYWSWIRQPPGKGLEWIGEINHSGSTNYNPSLKSRVTISVDTSKNQFSLKLSSVTAADTAVYYCARAPQSWYVGDVWGQGTLVTVSSTRASTKGPSVFPLAPSSKSTSGGTAALGCLVKDYFPEPVTVSWNSGALTSGVHTFPAVLQSSGLYSLSSVVTVPSSSLGTQTYICNVNHKPSNTKVDKRVEPKSCIPEDTFFPSPESSCDVKLVEKSFETDTNLNFQNLSVIGFRILLLKVAGFNLLMTLRLWSS

SEQ ID NO: 14157 - protein, 904 aa, Artificial Sequence
  Synthetic Polypeptide
MALPVTALLLPLALLLHAARPEVQLVESGGGLVQPGGSLRLSCAASGFSFSDFWMSWVRQAPGKGLEWVATISQAGSEKDYVDSVKGRFTISRDNAKKSLYLQMNSLRAEDTAVYYCASGVYSFDYRGQGTLVTVSSGTGGGGSGGGGSGGGGSEFQSVLTQPPSLSVAPGKTASITCGGNNIGMKSVHWYQQRPGQAPVLVIYYDSDRPSGIPGRFSGSNSGNTATLTISRVEAGDEADYYCQVWDTTGDHPGYVFGTGTKVTVLLEGQPKANPTVTLFPPSSEELQANKATLVCLISDFYPGAVTVAWKADGSPVKAGVETTKPSKQSNNKYAASSYLSLTPEQWKSHRSYSCQVTHEGSTVEKTVAPTECSGRADCGFTSESYQQGVLSATILYEILLGKATLYAVLVSALVLMAMVKRKDSRGRAKRSGSGVKQTLNFDLLKLAGDVESNPGPTSMDWIWRILFLVGAATGAHSGPQLQLQESGPGLVKPSETLSLTCTVSGDSISSGDYYWGWIRQPPGKGLEWIGHIYYSGVTYYNPSLKSRVTISVDTSRNQFSLKLSSVTAADTAVYYCTREDSSNWRSRGQGTLVTVSSGSGGGGSGGGGSGGGGSFEQVQLVQSGAEVKKPGSSVKVSCKASGGTFSSYAISWVRQAPGQGLEWMGGIIPIFGTANYAQKFQGRVTITADESTSTAYMELSSLRSEDTAVYYCARGVYGYSGSAPYDEWGQGTLVTVSSTRASTKGPSVFPLAPSSKSTSGGTAALGCLVKDYFPEPVTVSWNSGALTSGVHTFPAVLQSSGLYSLSSVVTVPSSSLGTQTYICNVNHKPSNTKVDKRVEPKSCIPEDTFFPSPESSCDVKLVEKSFETDTNLNFQNLSVIGFRILLLKVAGFNLLMTLRLWSS

SEQ ID NO: 14158 - protein, 902 aa, Artificial Sequence
  Synthetic Polypeptide
MALPVTALLLPLALLLHAARPEVQLVESGGGLVQPGGSLRLSCAASGFSFSDFWMSWVRQAPGKGLEWVATISQAGSEKDYVDSVKGRFTISRDNAKKSLYLQMNSLRAEDTAVYYCASGVYSFDYRGQGTLVTVSSGTGGGGSGGGGSGGGGSEFEVQLVESGGGLVQPGRSLRLSCAASGFTFDDYAMHWVRQAPGKGLEWVSGISWNSGSIGYADSVKGRFTISRDNAKNSLYLQMNSLRAEDTALYYCAKDKGGGYYDFWSGSDYWGQGTLVTVSSLEGQPKANPTVTLFPPSSEELQANKATLVCLISDFYPGAVTVAWKADGSPVKAGVETTKPSKQSNNKYAASSYLSLTPEQWKSHRSYSCQVTHEGSTVEKTVAPTECSGRADCGFTSESYQQGVLSATILYEILLGKATLYAVLVSALVLMAMVKRKDSRGRAKRSGSGVKQTLNFDLLKLAGDVESNPGPTSMDWIWRILFLVGAATGAHSGPQLQLQESGPGLVKPSETLSLTCTVSGDSISSGDYYWGWIRQPPGKGLEWIGHIYYSGVTYYNPSLKSRVTISVDTSRNQFSLKLSSVTAADTAVYYCTREDSSNWRSRGQGTLVTVSSGSGGGGSGGGGSGGGGSFESSELTQDPAVSVALGQTVRITCQGDSLRSYYASWYQQKPGQAPVLVIYGKNNRPSGIPDRFSGSSSGNTASLTITGAQAEDEADYYCNSRDSSGWVFGGGTKLTVLTRASTKGPSVFPLAPSSKSTSGGTAALGCLVKDYFPEPVTVSWNSGALTSGVHTFPAVLQSSGLYSLSSVVTVPSSSLGTQTYICNVNHKPSNTKVDKRVEPKSCIPEDTFFPSPESSCDVKLVEKSFETDTNLNFQNLSVIGFRILLLKVAGFNLLMTLRLWSS

SEQ ID NO: 14159 - protein, 911 aa, Artificial Sequence
  Synthetic Polypeptide
MALPVTALLLPLALLLHAARPEVQLVESGGGLVQPGGSLRLSCAASGFSFSDFWMSWVRQAPGKGLEWVATISQAGSEKDYVDSVKGRFTISRDNAKKSLYLQMNSLRAEDTAVYYCASGVYSFDYRGQGTLVTVSSGTGGGGSGGGGSGGGGSEFEVQLQQSGPGLVKPSQTLSLTCAISGDSVLSNSDTWNWIRQSPSRGLEWLGRTYHRSTWYDDYASSVRGRVSINVDTSKNQYSLQLNAVTPEDTGVYYCARDRLQDGNSWSDAFDVWGQGTMVTVSSLEGQPKANPTVTLFPPSSEELQANKATLVCLISDFYPGAVTVAWKADGSPVKAGVETTKPSKQSNNKYAASSYLSLTPEQWKSHRSYSCQVTHEGSTVEKTVAPTECSGRADCGFTSESYQQGVLSATILYEILLGKATLYAVLVSALVLMAMVKRKDSRGRAKRSGSGVKQTLNFDLLKLAGDVESNPGPTSMDWIWRILFLVGAATGAHSGPQLQLQESGPGLVKPSETLSLTCTVSGDSISSGDYYWGWIRQPPGKGLEWIGHIYYSGVTYYNPSLKSRVTISVDTSRNQFSLKLSSVTAADTAVYYCTREDSSNWRSRGQGTLVTVSSGSGGGGSGGGGSGGGGSFEQSALTQPASVSGSPGQSITISCTGTSSDVGGYNYVSWYQQHPGKAPKLMIYDVSNRPSGVSNRFSGSKSGNTASLTISGLQAEDEADYYCSSYTSSSTLVYVFGTGTKVTVLTRASTKGPSVFPLAPSSKSTSGGTAALGCLVKDYFPEPVTVSWNSGALTSGVHTFPAVLQSSGLYSLSSVVTVPSSSLGTQTYICNVNHKPSNTKVDKRVEPKSCIPEDTFFPSPESSCDVKLVEKSFETDTNLNFQNLSVIGFRILLLKVAGFNLLMTLRLWSS

SEQ ID NO: 14160 - protein, 889 aa, Artificial Sequence
  Synthetic Polypeptide
MALPVTALLLPLALLLHAARPEVQLVESGGGLVQPGGSLRLSCAASGFSFSDFWMSWVRQAPGKGLEWVATISQAGSEKDYVDSVKGRFTISRDNAKKSLYLQMNSLRAEDTAVYYCASGVYSFDYRGQGTLVTVSSGTGGGGSGGGGSGGGGSEFQVQLVQSGAEVKKPGASVKVSCKASGYTFTSYDINWVRQATGQGLEWMGWMNPNSGNTGYAQKFQGRVTMTRNTSISTAYMELSSLRSEDTAVYYCARGDSTKVEIKLEGQPKANPTVTLFPPSSEELQANKATLVCLISDFYPGAVTVAWKADGSPVKAGVETTKPSKQSNNKYAASSYLSLTPEQWKSHRSYSCQVTHEGSTVEKTVAPTECSGRADCGFTSESYQQGVLSATILYEILLGKATLYAVLVSALVLMAMVKRKDSRGRAKRSGSGVKQTLNFDLLKLAGDVESNPGPTSMDWIWRILFLVGAATGAHSGPQLQLQESGPGLVKPSETLSLTCTVSGDSISSGDYYWGWIRQPPGKGLEWIGHIYYSGVTYYNPSLKSRVTISVDTSRNQFSLKLSSVTAADTAVYYCTREDSSNWRSRGQGTLVTVSSGSGGGGSGGGGSGGGGSFEQSVLTQPRSVSGSPGQSVTISCTGTSSDVGGYNYVSWYQQHPGEAPKLIIYDADKRPSGISNRFSSGKSGNTASLTISGLQVEDEADYYCCSYAGGSTWVFGGGTKVTVLTRASTKGPSVFPLAPSSKSTSGGTAALGCLVKDYFPEPVTVSWNSGALTSGVHTFPAVLQSSGLYSLSSVVTVPSSSLGTQTYICNVNHKPSNTKVDKRVEPKSCIPEDTFFPSPESSCDVKLVEKSFETDTNLNFQNLSVIGFRILLLKVAGFNLLMTLRLWSS

SEQ ID NO: 14161 - protein, 911 aa, Artificial Sequence
  Synthetic Polypeptide
MALPVTALLLPLALLLHAARPEVQLVESGGGLVQPGGSLRLSCAASGFSFSDFWMSWVRQAPGKGLEWVATISQAGSEKDYVDSVKGRFTISRDNAKKSLYLQMNSLRAEDTAVYYCASGVYSFDYRGQGTLVTVSSGTGGGGSGGGGSGGGGSEFEVQLQQSGPGLVKPSQTLSLTCAISGDSVSSNSAAWNWIRQSPSRGLEWLGRTYYRSKWYSDYAVSVKSRITINPDTSKNQFSLQLNSVTPEDTAVYYCARDPYDFWSGYPDAFDIWGQGTMVTVSSLEGQPKANPTVTLFPPSSEELQANKATLVCLISDFYPGAVTVAWKADGSPVKAGVETTKPSKQSNNKYAASSYLSLTPEQWKSHRSYSCQVTHEGSTVEKTVAPTECSGRADCGFTSESYQQGVLSATILYEILLGKATLYAVLVSALVLMAMVKRKDSRGRAKRSGSGVKQTLNFDLLKLAGDVESNPGPTSMDWIWRILFLVGAATGAHSGPQLQLQESGPGLVKPSETLSLTCTVSGDSISSGDYYWGWIRQPPGKGLEWIGHIYYSGVTYYNPSLKSRVTISVDTSRNQFSLKLSSVTAADTAVYYCTREDSSNWRSRGQGTLVTVSSGSGGGGSGGGGSGGGGSFEQSALTQPASVSGSPGQSITISCTGTSSDVGGYNYVSWYQQHPGKAPKVIISEVNNRPSGVSHRFSGSKSGNTASLTISGLQAEDEADYFCSSYTSGRTLYVFGTGSKVTVLGTRASTKGPSVFPLAPSSKSTSGGTAALGCLVKDYFPEPVTVSWNSGALTSGVHTFPAVLQSSGLYSLSSVVTVPSSSLGTQTYICNVNHKPSNTKVDKRVEPKSCIPEDTFFPSPESSCDVKLVEKSFETDTNLNFQNLSVIGFRILLLKVAGFNLLMTLRLWSS

SEQ ID NO: 14162 - protein, 910 aa, Artificial Sequence
  Synthetic Polypeptide
MALPVTALLLPLALLLHAARPEVQLVESGGGLVQPGGSLRLSCAASGFSFSDFWMSWVRQAPGKGLEWVATISQAGSEKDYVDSVKGRFTISRDNAKKSLYLQMNSLRAEDTAVYYCASGVYSFDYRGQGTLVTVSSGTGGGGSGGGGSGGGGSEFQSALTQPASASGSPGQSVTISCTGTSSDVGGYNYVSWYQQHPGKAPKLMIYDVSNRPSGVSNRFSGSKSGNTASLTISGLQAEDEADYYCSSYTSSSTLYVFGTGTQLTVLLEGQPKANPTVTLFPPSSEELQANKATLVCLISDFYPGAVTVAWKADGSPVKAGVETTKPSKQSNNKYAASSYLSLTPEQWKSHRSYSCQVTHEGSTVEKTVAPTECSGRADCGFTSESYQQGVLSATILYEILLGKATLYAVLVSALVLMAMVKRKDSRGRAKRSGSGVKQTLNFDLLKLAGDVESNPGPTSMDWIWRILFLVGAATGAHSGPQLQLQESGPGLVKPSETLSLTCTVSGDSISSGDYYWGWIRQPPGKGLEWIGHIYYSGVTYYNPSLKSRVTISVDTSRNQFSLKLSSVTAADTAVYYCTREDSSNWRSRGQGTLVTVSSGSGGGGSGGGGSGGGGSFEEVQLQQSGPGLVKPSQTLSLTCAISGDSMLSNSDTWNWIRQSPSRGLEWLGRTYHRSTWYDDYASSVRGRVSINVDTSKNQYSLQLNAVTPEDTGVYYCARVRLQDGNSWSDAFDVWGQGTMVTVSSTRASTKGPSVFPLAPSSKSTSGGTAALGCLVKDYFPEPVTVSWNSGALTSGVHTFPAVLQSSGLYSLSSVVTVPSSSLGTQTYICNVNHKPSNTKVDKRVEPKSCIPEDTFFPSPESSCDVKLVEKSFETDTNLNFQNLSVIGFRILLLKVAGFNLLMTLRLWSS

SEQ ID NO: 14163 - protein, 910 aa, Artificial Sequence
  Synthetic Polypeptide
MALPVTALLLPLALLLHAARPEVQLVESGGGLVQPGGSLRLSCAASGFSFSDFWMSWVRQAPGKGLEWVATISQAGSEKDYVDSVKGRFTISRDNAKKSLYLQMNSLRAEDTAVYYCASGVYSFDYRGQGTLVTVSSGTGGGGSGGGGSGGGGSEFDVMLTQTPLSLPVSLGDQASISCRSSQSILHSTGDTYLEWYLQKPGQSPKLLINKVSNRLSGVPDRFSGSGSGTDFTLKISRVEAEDLGVYYCFQGSHVPWTFGGGTKLEIKRADAAPTVSIFPLEGQPKANPTVTLFPPSSEELQANKATLVCLISDFYPGAVTVAWKADGSPVKAGVETTKPSKQSNNKYAASSYLSLTPEQWKSHRSYSCQVTHEGSTVEKTVAPTECSGRADCGFTSESYQQGVLSATILYEILLGKATLYAVLVSALVLMAMVKRKDSRGRAKRSGSGVKQTLNFDLLKLAGDVESNPGPTSMDWIWRILFLVGAATGAHSGPQLQLQESGPGLVKPSETLSLTCTVSGDSISSGDYYWGWIRQPPGKGLEWIGHIYYSGVTYYNPSLKSRVTISVDTSRNQFSLKLSSVTAADTAVYYCTREDSSNWRSRGQGTLVTVSSGSGGGGSGGGGSGGGGSFEQVKLQQSGPSLVKPGASVKMSCKASGYTFTDFYMKWVKQSHGKSLEWIGDINPNIGDTFYNQKFKGKATLTVDKSSSTAYMQLNSLTSEDSAVYFCSVGYFDVWGAGTTVTVSSTRASTKGPSVFPLAPSSKSTSGGTAALGCLVKDYFPEPVTVSWNSGALTSGVHTFPAVLQSSGLYSLSSVVTVPSSSLGTQTYICNVNHKPSNTKVDKRVEPKSCIPEDTFFPSPESSCDVKLVEKSFETDTNLNFQNLSVIGFRILLLKVAGFNLLMTLRLWSS

SEQ ID NO: 14164 - protein, 906 aa, Artificial Sequence
  Synthetic Polypeptide
MALPVTALLLPLALLLHAARPEVQLVESGGGLVQPGGSLRLSCAASGFSFSDFWMSWVRQAPGKGLEWVATISQAGSEKDYVDSVKGRFTISRDNAKKSLYLQMNSLRAEDTAVYYCASGVYSFDYRGQGTLVTVSSGTGGGGSGGGGSGGGGSEFEIVLTQSPATLSLSPGERATLSCRASQSVSIYLAWYQQKPGQAPRLLIYDASNRATGIPARFSGSGSGTDFTLTISSLEPEDFAVYYCQQRSNWPPFTFGPGTKVDIKLEGQPKANPTVTLFPPSSEELQANKATLVCLISDFYPGAVTVAWKADGSPVKAGVETTKPSKQSNNKYAASSYLSLTPEQWKSHRSYSCQVTHEGSTVEKTVAPTECSGRADCGFTSESYQQGVLSATILYEILLGKATLYAVLVSALVLMAMVKRKDSRGRAKRSGSGVKQTLNFDLLKLAGDVESNPGPTSMDWIWRILFLVGAATGAHSGPQLQLQESGPGLVKPSETLSLTCTVSGDSISSGDYYWGWIRQPPGKGLEWIGHIYYSGVTYYNPSLKSRVTISVDTSRNQFSLKLSSVTAADTAVYYCTREDSSNWRSRGQGTLVTVSSGSGGGGSGGGGSGGGGSFEQVQLVESGGGVVQPGRSLRLSCAASGFTFSSYGMHWVRQAPGKGLEWVAVIWDDGSNKYYVDSVKGRFTISRDNSKNTLYLQMNSLRAEDTAVYYCARDDYYGSGSFNSYYGTDVWGQGTTVTVSSTRASTKGPSVFPLAPSSKSTSGGTAALGCLVKDYFPEPVTVSWNSGALTSGVHTFPAVLQSSGLYSLSSVVTVPSSSLGTQTYICNVNHKPSNTKVDKRVEPKSCIPEDTFFPSPESSCDVKLVEKSFETDTNLNFQNLSVIGFRILLLKVAGFNLLMTLRLWSS

SEQ ID NO: 14165 - protein, 891 aa, Artificial Sequence
  Synthetic Polypeptide
MALPVTALLLPLALLLHAARPEVQLVESGGGLVQPGGSLRLSCAASGFSFSDFWMSWVRQAPGKGLEWVATISQAGSEKDYVDSVKGRFTISRDNAKKSLYLQMNSLRAEDTAVYYCASGVYSFDYRGQGTLVTVSSGTGGGGSGGGGSGGGGSEFDIQMTQSPSSLSASVGDRVTITCRASQGISSWLAWYQQKPEKAPKSLIYAASSLQSGVPSRFSGSGSGTDFTLTISSLQPEDFATYYCQQYNSYPYTFGQGTKLEIKLEGQPKANPTVTLFPPSSEELQANKATLVCLISDFYPGAVTVAWKADGSPVKAGVETTKPSKQSNNKYAASSYLSLTPEQWKSHRSYSCQVTHEGSTVEKTVAPTECSGRADCGFTSESYQQGVLSATILYEILLGKATLYAVLVSALVLMAMVKRKDSRGRAKRSGSGVKQTLNFDLLKLAGDVESNPGPTSMDWIWRILFLVGAATGAHSGPQLQLQESGPGLVKPSETLSLTCTVSGDSISSGDYYWGWIRQPPGKGLEWIGHIYYSGVTYYNPSLKSRVTISVDTSRNQFSLKLSSVTAADTAVYYCTREDSSNWRSRGQGTLVTVSSGSGGGGSGGGGSGGGGSFEEVQLVQSGGGLVHPGGSLRLSCAGSGFTFSTYLMYWVRQAPGKTLEWVSAIGSGGDTYYADSVKGRFTISRDNAKNSLYLQMNSLRAEDMAVYYCARGLGYWGQGTLVTVSSTRASTKGPSVFPLAPSSKSTSGGTAALGCLVKDYFPEPVTVSWNSGALTSGVHTFPAVLQSSGLYSLSSVVTVPSSSLGTQTYICNVNHKPSNTKVDKRVEPKSCIPEDTFFPSPESSCDVKLVEKSFETDTNLNFQNLSVIGFRILLLKVAGFNLLMTLRLWSS

SEQ ID NO: 14166 - protein, 910 aa, Artificial Sequence
  Synthetic Polypeptide
MALPVTALLLPLALLLHAARPEVQLVESGGGLVQPGGSLRLSCAASGFSFSDFWMSWVRQAPGKGLEWVATISQAGSEKDYVDSVKGRFTISRDNAKKSLYLQMNSLRAEDTAVYYCASGVYSFDYRGQGTLVTVSSGTGGGGSGGGGSGGGGSEFLPVLTQPPSVSVAPGKTARITCGGNNIGSKSVHWYQQKPGQAPVLVVYDDSDRPSGIPERFSGSNSGNTATLTISRVEAGDEADYYCQVWDSSSDYVVFGGGTKLTVLLEGQPKANPTVTLFPPSSEELQANKATLVCLISDFYPGAVTVAWKADGSPVKAGVETTKPSKQSNNKYAASSYLSLTPEQWKSHRSYSCQVTHEGSTVEKTVAPTECSGRADCGFTSESYQQGVLSATILYEILLGKATLYAVLVSALVLMAMVKRKDSRGRAKRSGSGVKQTLNFDLLKLAGDVESNPGPTSMDWIWRILFLVGAATGAHSGPQLQLQESGPGLVKPSETLSLTCTVSGDSISSGDYYWGWIRQPPGKGLEWIGHIYYSGVTYYNPSLKSRVTISVDTSRNQFSLKLSSVTAADTAVYYCTREDSSNWRSRGQGTLVTVSSGSGGGGSGGGGSGGGGSFEEVQLVQSGAEVKKPGESLKISCKGSGYSFTSYWIGWVRQMPGKGLEWMGIIYPGDSDTRYSPSFQGQVTISADKSISTAYLQWSSLKASDTAMYYCARQVWGWQGGMYPRSNWWYNLDSWGQGTLVTVSSTRASTKGPSVFPLAPSSKSTSGGTAALGCLVKDYFPEPVTVSWNSGALTSGVHTFPAVLQSSGLYSLSSVVTVPSSSLGTQTYICNVNHKPSNTKVDKRVEPKSCIPEDTFFPSPESSCDVKLVEKSFETDTNLNFQNLSVIGFRILLLKVAGFNLLMTLRLWSS

SEQ ID NO: 14167 - protein, 903 aa, Artificial Sequence
  Synthetic Polypeptide
MALPVTALLLPLALLLHAARPEVQLVESGGGLVQPGGSLRLSCAASGFSFSDFWMSWVRQAPGKGLEWVATISQAGSEKDYVDSVKGRFTISRDNAKKSLYLQMNSLRAEDTAVYYCASGVYSFDYRGQGTLVTVSSGTGGGGSGGGGSGGGGSEFELVMTQSPASLAVSLGQRATISCRASESVDSYGKSFMHWYQLKPGQPPKLLIYRASNLESGVPARFSGSGSRTDFTLTIDPVEADDAATYYCQQNNEDPWTFGGGTKLEIKLEGQPKANPTVTLFPPSSEELQANKATLVCLISDFYPGAVTVAWKADGSPVKAGVETTKPSKQSNNKYAASSYLSLTPEQWKSHRSYSCQVTHEGSTVEKTVAPTECSGRADCGFTSESYQQGVLSATILYEILLGKATLYAVLVSALVLMAMVKRKDSRGRAKRSGSGVKQTLNFDLLKLAGDVESNPGPTSMDWIWRILFLVGAATGAHSGPQLQLQESGPGLVKPSETLSLTCTVSGDSISSGDYYWGWIRQPPGKGLEWIGHIYYSGVTYYNPSLKSRVTISVDTSRNQFSLKLSSVTAADTAVYYCTREDSSNWRSRGQGTLVTVSSGSGGGGSGGGGSGGGGSFEEVQLEQSGPELVKPGASVKMSCKASGYTFTNYYMKWVKQSHGKSLEWIGDLNPNNGDTFYNQKFKGKATLTVDKSSNTAYMQLNSLTSEDSAVYYCARTGRYEENAMDYWGQGTSVTVSSTRASTKGPSVFPLAPSSKSTSGGTAALGCLVKDYFPEPVTVSWNSGALTSGVHTFPAVLQSSGLYSLSSVVTVPSSSLGTQTYICNVNHKPSNTKVDKRVEPKSCIPEDTFFPSPESSCDVKLVEKSFETDTNLNFQNLSVIGFRILLLKVAGFNLLMTLRLWSS

SEQ ID NO: 14168 - protein, 897 aa, Artificial Sequence
  Synthetic Polypeptide
MALPVTALLLPLALLLHAARPEVQLVESGGGLVQPGGSLRLSCAASGFSFSDFWMSWVRQAPGKGLEWVATISQAGSEKDYVDSVKGRFTISRDNAKKSLYLQMNSLRAEDTAVYYCASGVYSFDYRGQGTLVTVSSGTGGGGSGGGGSGGGGSEFDVVMTQSPSSLSASVGDRVTITCMASEDIYIRLAWYQQKPGNAPKLLIYAATSLETGVPSRFSGSGSGTDFTLTISSLQPEDFATYYCQQYWSSPWTFGGGTKVEIKLEGQPKANPTVTLFPPSSEELQANKATLVCLISDFYPGAVTVAWKADGSPVKAGVETTKPSKQSNNKYAASSYLSLTPEQWKSHRSYSCQVTHEGSTVEKTVAPTECSGRADCGFTSESYQQGVLSATILYEILLGKATLYAVLVSALVLMAMVKRKDSRGRAKRSGSGVKQTLNFDLLKLAGDVESNPGPTSMDWIWRILFLVGAATGAHSGPQLQLQESGPGLVKPSETLSLTCTVSGDSISSGDYYWGWIRQPPGKGLEWIGHIYYSGVTYYNPSLKSRVTISVDTSRNQFSLKLSSVTAADTAVYYCTREDSSNWRSRGQGTLVTVSSGSGGGGSGGGGSGGGGSFEQVQLQESGPGLVKPSQTLSLTCTVSGYSITSDYTWNWIRQPPGNGLEWIGYITYSGSTSYNPSLKSRVLISVDTSKNQVSLKLSSVTAADTAVYYCARLGRRYTMDYWGQGTTVTVSSTRASTKGPSVFPLAPSSKSTSGGTAALGCLVKDYFPEPVTVSWNSGALTSGVHTFPAVLQSSGLYSLSSVVTVPSSSLGTQTYICNVNHKPSNTKVDKRVEPKSCIPEDTFFPSPESSCDVKLVEKSFETDTNLNFQNLSVIGFRILLLKVAGFNLLMTLRLWSS

SEQ ID NO: 14169 - protein, 901 aa, Artificial Sequence; identical to SEQ ID NO: 14032
  Synthetic Polypeptide

SEQ ID NO: 14170 - protein, 901 aa, Artificial Sequence
  Synthetic Polypeptide
MALPVTALLLPLALLLHAARPEVQLVESGGGLVQPGGSLRLSCAASGFSFSDFWMSWVRQAPGKGLEWVATISQAGSEKDYVDSVKGRFTISRDNAKKSLYLQMNSLRAEDTAVYYCASGVYSFDYRGQGTLVTVSSGTGGGGSGGGGSGGGGSEFDIVLTQSPATLSLSPGDRATLSCRASESVTILGSHLIYWYQQKPGQAPRLLIQLASNVQTGIPARFSGSGSRTDFTLTISSLEPEDFAVYYCLQSRTIPRTFGQGTKLEIKRLEGQPKANPTVTLFPPSSEELQANKATLVCLISDFYPGAVTVAWKADGSPVKAGVETTKPSKQSNNKYAASSYLSLTPEQWKSHRSYSCQVTHEGSTVEKTVAPTECSGRADCGFTSESYQQGVLSATILYEILLGKATLYAVLVSALVLMAMVKRKDSRGRAKRSGSGVKQTLNFDLLKLAGDVESNPGPTSMDWIWRILFLVGAATGAHSGPQLQLQESGPGLVKPSETLSLTCTVSGDSISSGDYYWGWIRQPPGKGLEWIGHIYYSGVTYYNPSLKSRVTISVDTSRNQFSLKLSSVTAADTAVYYCTREDSSNWRSRGQGTLVTVSSGSGGGGSGGGGSGGGGSFEQVQLVQSGSELKKPGESVKISCKASGYTFTHYSMNWVRQAPGQGLEWMGRINTETGEPLYADDFKGRFVFSLDTSASTAYLQISSLKAEDTAVYYCSNDYLYSLDYWGQGTLVTVSSTRASTKGPSVFPLAPSSKSTSGGTAALGCLVKDYFPEPVTVSWNSGALTSGVHTFPAVLQSSGLYSLSSVVTVPSSSLGTQTYICNVNHKPSNTKVDKRVEPKSCIPEDTFFPSPESSCDVKLVEKSFETDTNLNFQNLSVIGFRILLLKVAGFNLLMTLRLWSS

SEQ ID NO: 14171 - protein, 902 aa, Artificial Sequence
  Synthetic Polypeptide
MALPVTALLLPLALLLHAARPEVQLVESGGGLVQPGGSLRLSCAASGFSFSDFWMSWVRQAPGKGLEWVATISQAGSEKDYVDSVKGRFTISRDNAKKSLYLQMNSLRAEDTAVYYCASGVYSFDYRGQGTLVTVSSGTGGGGSGGGGSGGGGSEFDIQLTQSPSFLSASVGDRVTITCRASQGISTDLNWYQQKPGKAPKLLIYAASNLESGVPSRFSGSGSGTEFTLTISSLQPEDFATYYCQQSYNWPYTFGGGTKVEIKRLEGQPKANPTVTLFPPSSEELQANKATLVCLISDFYPGAVTVAWKADGSPVKAGVETTKPSKQSNNKYAASSYLSLTPEQWKSHRSYSCQVTHEGSTVEKTVAPTECSGRADCGFTSESYQQGVLSATILYEILLGKATLYAVLVSALVLMAMVKRKDSRGRAKRSGSGVKQTLNFDLLKLAGDVESNPGPTSMDWIWRILFLVGAATGAHSGPQLQLQESGPGLVKPSETLSLTCTVSGDSISSGDYYWGWIRQPPGKGLEWIGHIYYSGVTYYNPSLKSRVTISVDTSRNQFSLKLSSVTAADTAVYYCTREDSSNWRSRGQGTLVTVSSGSGGGGSGGGGSGGGGSFEEVQLVESGGGLVKPGGSLRLSCAASGFTFSNFEMNWVRQAPGKGLEWVSGISSNGRYINYADSVKGRFTISRDNAKNSLYLQMNSLRAEDTAVYYCARVVDFDQDYNGFDYWGQGTLVTVSSTRASTKGPSVFPLAPSSKSTSGGTAALGCLVKDYFPEPVTVSWNSGALTSGVHTFPAVLQSSGLYSLSSVVTVPSSSLGTQTYICNVNHKPSNTKVDKRVEPKSCIPEDTFFPSPESSCDVKLVEKSFETDTNLNFQNLSVIGFRILLLKVAGFNLLMTLRLWSS

SEQ ID NO: 14172 - protein, 900 aa, Artificial Sequence
  Synthetic Polypeptide
MALPVTALLLPLALLLHAARPEVQLVESGGGLVQPGGSLRLSCAASGFSFSDFWMSWVRQAPGKGLEWVATISQAGSEKDYVDSVKGRFTISRDNAKKSLYLQMNSLRAEDTAVYYCASGVYSFDYRGQGTLVTVSSGTGGGGSGGGGSGGGGSEFDIQLTQSPSFLSASVGDRVTITCSLSLGISTWRDWFPPRLGRGLEPLTYAASTLQSGVPSRFSGSGSGTEFTLTISSLQPEDFATYYCQQLNSYPLTFGGGTKVEIKRLEGQPKANPTVTLFPPSSEELQANKATLVCLISDFYPGAVTVAWKADGSPVKAGVETTKPSKQSNNKYAASSYLSLTPEQWKSHRSYSCQVTHEGSTVEKTVAPTECSGRADCGFTSESYQQGVLSATILYEILLGKATLYAVLVSALVLMAMVKRKDSRGRAKRSGSGVKQTLNFDLLKLAGDVESNPGPTSMDWIWRILFLVGAATGAHSGPQLQLQESGPGLVKPSETLSLTCTVSGDSISSGDYYWGWIRQPPGKGLEWIGHIYYSGVTYYNPSLKSRVTISVDTSRNQFSLKLSSVTAADTAVYYCTREDSSNWRSRGQGTLVTVSSGSGGGGSGGGGSGGGGSFEEVQLVESGGGLVKPGGSLRLSCAASGFTFSTYGMSWVRQAPGKGLEWVAYINNGSGYIYYADSVKGRFTISRDNAKNSLYLQMNSLRAEDTAVYYCARGQWWSGGDFDYWGQGTLVTVSSTRASTKGPSVFPLAPSSKSTSGGTAALGCLVKDYFPEPVTVSWNSGALTSGVHTFPAVLQSSGLYSLSSVVTVPSSSLGTQTYICNVNHKPSNTKVDKRVEPKSCIPEDTFFPSPESSCDVKLVEKSFETDTNLNFQNLSVIGFRILLLKVAGFNLLMTLRLWSS

SEQ ID NO: 14173 - protein, 901 aa, Artificial Sequence
  Synthetic Polypeptide
MALPVTALLLPLALLLHAARPEVQLVESGGGLVQPGGSLRLSCAASGFSFSDFWMSWVRQAPGKGLEWVATISQAGSEKDYVDSVKGRFTISRDNAKKSLYLQMNSLRAEDTAVYYCASGVYSFDYRGQGTLVTVSSGTGGGGSGGGGSGGGGSEFEIVLTQSPATLSLSPGERATLSCSASSSVSYMYWYQQKPGQAPRLLIYRTSNLASGIPARFSGSGSGTDFTLTISSLEPEDFAVYYCQQYHSYPTTFGQGTKVEIKRTVLEGQPKANPTVTLFPPSSEELQANKATLVCLISDFYPGAVTVAWKADGSPVKAGVETTKPSKQSNNKYAASSYLSLTPEQWKSHRSYSCQVTHEGSTVEKTVAPTECSGRADCGFTSESYQQGVLSATILYEILLGKATLYAVLVSALVLMAMVKRKDSRGRAKRSGSGVKQTLNFDLLKLAGDVESNPGPTSMDWIWRILFLVGAATGAHSGPQLQLQESGPGLVKPSETLSLTCTVSGDSISSGDYYWGWIRQPPGKGLEWIGHIYYSGVTYYNPSLKSRVTISVDTSRNQFSLKLSSVTAADTAVYYCTREDSSNWRSRGQGTLVTVSSGSGGGGSGGGGSGGGGSFEEVQLVESGGGLVQPGGSLRLSCAASGFSFNTYAMNWVRQAPGKGLEWVSHIRSKSNNFATYYADSVKDRFTISRDNAKNSLYLQMNSLRAEDTAVYYCARQGGDFPMDYWGQGTLVTVSSTRASTKGPSVFPLAPSSKSTSGGTAALGCLVKDYFPEPVTVSWNSGALTSGVHTFPAVLQSSGLYSLSSVVTVPSSSLGTQTYICNVNHKPSNTKVDKRVEPKSCIPEDTFFPSPESSCDVKLVEKSFETDTNLNFQNLSVIGFRILLLKVAGFNLLMTLRLWSS

SEQ ID NO: 14174 - protein, 897 aa, Artificial Sequence
  Synthetic Polypeptide
MALPVTALLLPLALLLHAARPEVQLVESGGGLVQPGGSLRLSCAASGFSFSDFWMSWVRQAPGKGLEWVATISQAGSEKDYVDSVKGRFTISRDNAKKSLYLQMNSLRAEDTAVYYCASGVYSFDYRGQGTLVTVSSGTGGGGSGGGGSGGGGSEFDVVMTQSPSSLSASVGDRVTITCKASEDIYIRLAWYQQKPGKAPKLLIYAATSLETGVPSRFSGSGSGTDFTLTISSLQPEDFATYYCQQYWTTPWTFGGGTKVEIKLEGQPKANPTVTLFPPSSEELQANKATLVCLISDFYPGAVTVAWKADGSPVKAGVETTKPSKQSNNKYAASSYLSLTPEQWKSHRSYSCQVTHEGSTVEKTVAPTECSGRADCGFTSESYQQGVLSATILYEILLGKATLYAVLVSALVLMAMVKRKDSRGRAKRSGSGVKQTLNFDLLKLAGDVESNPGPTSMDWIWRILFLVGAATGAHSGPQLQLQESGPGLVKPSETLSLTCTVSGDSISSGDYYWGWIRQPPGKGLEWIGHIYYSGVTYYNPSLKSRVTISVDTSRNQFSLKLSSVTAADTAVYYCTREDSSNWRSRGQGTLVTVSSGSGGGGSGGGGSGGGGSFEQVQLQESGPGLVKPSQTLSLTCTVSGYSITIDYTWNWIRQPPGKGLEWIGYITYSGSTDYNPSLKSRVLISVDTSKNQVSLKLSSVTAADTAVYYCARLGRRYALDYWGQGTTVTVSSTRASTKGPSVFPLAPSSKSTSGGTAALGCLVKDYFPEPVTVSWNSGALTSGVHTFPAVLQSSGLYSLSSVVTVPSSSLGTQTYICNVNHKPSNTKVDKRVEPKSCIPEDTFFPSPESSCDVKLVEKSFETDTNLNFQNLSVIGFRILLLKVAGFNLLMTLRLWSS

SEQ ID NO: 14175 - protein, 901 aa, Artificial Sequence
  Synthetic Polypeptide
MALPVTALLLPLALLLHAARPEVQLVESGGGLVQPGGSLRLSCAASGFSFSDFWMSWVRQAPGKGLEWVATISQAGSEKDYVDSVKGRFTISRDNAKKSLYLQMNSLRAEDTAVYYCASGVYSFDYRGQGTLVTVSSGTGGGGSGGGGSGGGGSEFDIQMTQTTSSLSASLGDRVTISCRASQDISNYLNWYQQKPDGTVKLLIYYTSILHSGVPSRFSGSGSGTDYSLTISNLEQEDFATYFCQQGNTLPWTFGGGTKLEIKALEGQPKANPTVTLFPPSSEELQANKATLVCLISDFYPGAVTVAWKADGSPVKAGVETTKPSKQSNNKYAASSYLSLTPEQWKSHRSYSCQVTHEGSTVEKTVAPTECSGRADCGFTSESYQQGVLSATILYEILLGKATLYAVLVSALVLMAMVKRKDSRGRAKRSGSGVKQTLNFDLLKLAGDVESNPGPTSMDWIWRILFLVGAATGAHSGPQLQLQESGPGLVKPSETLSLTCTVSGDSISSGDYYWGWIRQPPGKGLEWIGHIYYSGVTYYNPSLKSRVTISVDTSRNQFSLKLSSVTAADTAVYYCTREDSSNWRSRGQGTLVTVSSGSGGGGSGGGGSGGGGSFEVQLVESGGGLVKPGGSLKLSCAASGFAFSIYDMSWVRQTPEKRLEWVAYISSGGGTYYPDTVKGRFTISRDNAKNTLYLQMSSLKSEDTAMYYCARHSGYGTHWGVLFAYWGQGTLVTVSATRASTKGPSVFPLAPSSKSTSGGTAALGCLVKDYFPEPVTVSWNSGALTSGVHTFPAVLQSSGLYSLSSVVTVPSSSLGTQTYICNVNHKPSNTKVDKRVEPKSCIPEDTFFPSPESSCDVKLVEKSFETDTNLNFQNLSVIGFRILLLKVAGFNLLMTLRLWSS

SEQ ID NO: 14176 - protein, 912 aa, Artificial Sequence
  Synthetic Polypeptide
MALPVTALLLPLALLLHAARPEVQLVESGGGLVQPGGSLRLSCAASGFSFSDFWMSWVRQAPGKGLEWVATISQAGSEKDYVDSVKGRFTISRDNAKKSLYLQMNSLRAEDTAVYYCASGVYSFDYRGQGTLVTVSSGTGGGGSGGGGSGGGGSEFDIVMTQSPDSLAVSLGERATINCKSSQSLLYRSNQKNYLAWYQQKPGQPPKLLIYWASTRESGVPDRFSGSGSGTDFTLTISSLQAEDVAVYYCQQYYNYPRTFGQGTKVEIKRTVLEGQPKANPTVTLFPPSSEELQANKATLVCLISDFYPGAVTVAWKADGSPVKAGVETTKPSKQSNNKYAASSYLSLTPEQWKSHRSYSCQVTHEGSTVEKTVAPTECSGRADCGFTSESYQQGVLSATILYEILLGKATLYAVLVSALVLMAMVKRKDSRGRAKRSGSGVKQTLNFDLLKLAGDVESNPGPTSMDWIWRILFLVGAATGAHSGPQLQLQESGPGLVKPSETLSLTCTVSGDSISSGDYYWGWIRQPPGKGLEWIGHIYYSGVTYYNPSLKSRVTISVDTSRNQFSLKLSSVTAADTAVYYCTREDSSNWRSRGQGTLVTVSSGSGGGGSGGGGSGGGGSFEEVQLLESGGGLVQPGGSLRLSCAASGYSITSDYAWNWVRQAPGKGLEWVSYISNSGSTSYNPSLKSRFTISRDNSKNTLYLQMNSLRAEDTAVYYCAKERNYDYDDYYYAMDYWGQGTLVTVSSTRASTKGPSVFPLAPSSKSTSGGTAALGCLVKDYFPEPVTVSWNSGALTSGVHTFPAVLQSSGLYSLSSVVTVPSSSLGTQTYICNVNHKPSNTKVDKRVEPKSCIPEDTFFPSPESSCDVKLVEKSFETDTNLNFQNLSVIGFRILLLKVAGFNLLMTLRLWSS

SEQ ID NO: 14177 - protein, 905 aa, Artificial Sequence
  Synthetic Polypeptide
MALPVTALLLPLALLLHAARPEVQLVESGGGLVQPGGSLRLSCAASGFSFSDFWMSWVRQAPGKGLEWVATISQAGSEKDYVDSVKGRFTISRDNAKKSLYLQMNSLRAEDTAVYYCASGVYSFDYRGQGTLVTVSSGTGGGGSGGGGSGGGGSEFDVVMTQSPLSLPVTLGQPASISCRSSQSLLHSSGNTYLEWYQQRPGQSPRPLIYKISTRFSGVPDRFSGSGSGTDFTLKISRVEAEDVGVYYCFQGSHVPYTFGGGTKVEIKRLEGQPKANPTVTLFPPSSEELQANKATLVCLISDFYPGAVTVAWKADGSPVKAGVETTKPSKQSNNKYAASSYLSLTPEQWKSHRSYSCQVTHEGSTVEKTVAPTECSGRADCGFTSESYQQGVLSATILYEILLGKATLYAVLVSALVLMAMVKRKDSRGRAKRSGSGVKQTLNFDLLKLAGDVESNPGPTSMDWIWRILFLVGAATGAHSGPQLQLQESGPGLVKPSETLSLTCTVSGDSISSGDYYWGWIRQPPGKGLEWIGHIYYSGVTYYNPSLKSRVTISVDTSRNQFSLKLSSVTAADTAVYYCTREDSSNWRSRGQGTLVTVSSGSGGGGSGGGGSGGGGSFEQVQLVQSGAEVKKPGASVKVSCKASGLTIEDYYMHWVRQAPGQGLEWMGWIDPENGDTEYGPKFQGRVTMTRDTSINTAYMELSRLRSDDTAVYYCAVHNAHYGTWFAYWGQGTLVTVSSTRASTKGPSVFPLAPSSKSTSGGTAALGCLVKDYFPEPVTVSWNSGALTSGVHTFPAVLQSSGLYSLSSVVTVPSSSLGTQTYICNVNHKPSNTKVDKRVEPKSCIPEDTFFPSPESSCDVKLVEKSFETDTNLNFQNLSVIGFRILLLKVAGFNLLMTLRLWSS

SEQ ID NO: 14178 - protein, 897 aa, Artificial Sequence
  Synthetic Polypeptide
MALPVTALLLPLALLLHAARPEVQLVESGGGLVQPGGSLRLSCAASGFSFSDFWMSWVRQAPGKGLEWVATISQAGSEKDYVDSVKGRFTISRDNAKKSLYLQMNSLRAEDTAVYYCASGVYSFDYRGQGTLVTVSSGTGGGGSGGGGSGGGGSEFDIQMTQSPSSLSASVGDRVTITCRASENIYSNLAWYQQKPGKAPKLLIYAATNLADGVPSRFSGSGSGTDFTLTISSLQPEDFATYYCQHFWGTPTFGQGTKVEIKRTVLEGQPKANPTVTLFPPSSEELQANKATLVCLISDFYPGAVTVAWKADGSPVKAGVETTKPSKQSNNKYAASSYLSLTPEQWKSHRSYSCQVTHEGSTVEKTVAPTECSGRADCGFTSESYQQGVLSATILYEILLGKATLYAVLVSALVLMAMVKRKDSRGRAKRSGSGVKQTLNFDLLKLAGDVESNPGPTSMDWIWRILFLVGAATGAHSGPQLQLQESGPGLVKPSETLSLTCTVSGDSISSGDYYWGWIRQPPGKGLEWIGHIYYSGVTYYNPSLKSRVTISVDTSRNQFSLKLSSVTAADTAVYYCTREDSSNWRSRGQGTLVTVSSGSGGGGSGGGGSGGGGSFEEVQLVESGGGLVQPGGSLRLSCAASGFSLTNYGVHWVRQAPGKGLEWVSVIWSGGSTDYNAAFISRFTISADTSKNTAYLQMNSLRAEDTAVYYCARELIHAMDNWGQGTLVTVSSTRASTKGPSVFPLAPSSKSTSGGTAALGCLVKDYFPEPVTVSWNSGALTSGVHTFPAVLQSSGLYSLSSVVTVPSSSLGTQTYICNVNHKPSNTKVDKRVEPKSCIPEDTFFPSPESSCDVKLVEKSFETDTNLNFQNLSVIGFRILLLKVAGFNLLMTLRLWSS

SEQ ID NO: 14179 - protein, 904 aa, Artificial Sequence
  Synthetic Polypeptide
MALPVTALLLPLALLLHAARPEVQLVESGGGLVQPGGSLRLSCAASGFSFSDFWMSWVRQAPGKGLEWVATISQAGSEKDYVDSVKGRFTISRDNAKKSLYLQMNSLRAEDTAVYYCASGVYSFDYRGQGTLVTVSSGTGGGGSGGGGSGGGGSEFDFVMTQSPLSLPVTPGEPASISCRSSQSIVHSNGNTYLEWYLQKPGQSPQLLIYKVSNRFSGVPDRFSGSGSGTDFTLKISRVEAEDVGVYYCFQGSHVPLTFGQGTKLEIKRLEGQPKANPTVTLFPPSSEELQANKATLVCLISDFYPGAVTVAWKADGSPVKAGVETTKPSKQSNNKYAASSYLSLTPEQWKSHRSYSCQVTHEGSTVEKTVAPTECSGRADCGFTSESYQQGVLSATILYEILLGKATLYAVLVSALVLMAMVKRKDSRGRAKRSGSGVKQTLNFDLLKLAGDVESNPGPTSMDWIWRILFLVGAATGAHSGPQLQLQESGPGLVKPSETLSLTCTVSGDSISSGDYYWGWIRQPPGKGLEWIGHIYYSGVTYYNPSLKSRVTISVDTSRNQFSLKLSSVTAADTAVYYCTREDSSNWRSRGQGTLVTVSSGSGGGGSGGGGSGGGGSFEEVQLVESGAEVKKPGASVKVSCKASGYTFTSYWIHWVRQAPGQGLEWMGENDPSNGRTNYNEKFKNRVTLTVDTSISTAYMELSRLRSDDTAVYYCARGPNYFYSMDYWGQGTMVTVSSTRASTKGPSVFPLAPSSKSTSGGTAALGCLVKDYFPEPVTVSWNSGALTSGVHTFPAVLQSSGLYSLSSVVTVPSSSLGTQTYICNVNHKPSNTKVDKRVEPKSCIPEDTFFPSPESSCDVKLVEKSFETDTNLNFQNLSVIGFRILLLKVAGFNLLMTLRLWSS

SEQ ID NO: 14180 - protein, 897 aa, Artificial Sequence
  Synthetic Polypeptide
MALPVTALLLPLALLLHAARPEVQLVESGGGLVQPGGSLRLSCAASGFSFSDFWMSWVRQAPGKGLEWVATISQAGSEKDYVDSVKGRFTISRDNAKKSLYLQMNSLRAEDTAVYYCASGVYSFDYRGQGTLVTVSSGTGGGGSGGGGSGGGGSEFDIQLTQSPSFLSASVGDRVTITCSARSSISFMYWYQQKPGKAPKLLIYDTSNLASGVPSRFSGSGSGTEFTLTISSLEAEDAATYYCQQWSSYPLTFGQGTKLEIKLEGQPKANPTVTLFPPSSEELQANKATLVCLISDFYPGAVTVAWKADGSPVKAGVETTKPSKQSNNKYAASSYLSLTPEQWKSHRSYSCQVTHEGSTVEKTVAPTECSGRADCGFTSESYQQGVLSATILYEILLGKATLYAVLVSALVLMAMVKRKDSRGRAKRSGSGVKQTLNFDLLKLAGDVESNPGPTSMDWIWRILFLVGAATGAHSGPQLQLQESGPGLVKPSETLSLTCTVSGDSISSGDYYWGWIRQPPGKGLEWIGHIYYSGVTYYNPSLKSRVTISVDTSRNQFSLKLSSVTAADTAVYYCTREDSSNWRSRGQGTLVTVSSGSGGGGSGGGGSGGGGSFEQVQLVQSGAEVKKPGASVKVSCKASGYTFTGSWMNWVRQAPGQGLEWIGRIYPGDGETNYNGKFKDRVTITADKSTSTAYMELSSLRSEDTAVYYCARIYGNNVYFDVWGQGTTVTVSSTRASTKGPSVFPLAPSSKSTSGGTAALGCLVKDYFPEPVTVSWNSGALTSGVHTFPAVLQSSGLYSLSSVVTVPSSSLGTQTYICNVNHKPSNTKVDKRVEPKSCIPEDTFFPSPESSCDVKLVEKSFETDTNLNFQNLSVIGFRILLLKVAGFNLLMTLRLWSS

SEQ ID NO: 14181 - protein, 905 aa, Artificial Sequence
  Synthetic Polypeptide
MALPVTALLLPLALLLHAARPEVQLVESGGGLVQPGGSLRLSCAASGFSFSDFWMSWVRQAPGKGLEWVATISQAGSEKDYVDSVKGRFTISRDNAKKSLYLQMNSLRAEDTAVYYCASGVYSFDYRGQGTLVTVSSGTGGGGSGGGGSGGGGSEFQLVLTQSPSASASLGSSVKLTCTLSSGHKTDTIDWYQQQPGKAPRYLMKLEGSGSYNKGSGVPDRFSGSSSGADWYLTISSLQSEDEADYYCGTDYPGNYLFGGGTQLTVLGLEGQPKANPTVTLFPPSSEELQANKATLVCLISDFYPGAVTVAWKADGSPVKAGVETTKPSKQSNNKYAASSYLSLTPEQWKSHRSYSCQVTHEGSTVEKTVAPTECSGRADCGFTSESYQQGVLSATILYEILLGKATLYAVLVSALVLMAMVKRKDSRGRAKRSGSGVKQTLNFDLLKLAGDVESNPGPTSMDWIWRILFLVGAATGAHSGPQLQLQESGPGLVKPSETLSLTCTVSGDSISSGDYYWGWIRQPPGKGLEWIGHIYYSGVTYYNPSLKSRVTISVDTSRNQFSLKLSSVTAADTAVYYCTREDSSNWRSRGQGTLVTVSSGSGGGGSGGGGSGGGGSFEQEQLVESGGGLVQPGGSLRLSCAASGFTFSDYYMSWIRQAPGKGLEWVATIYPSSGKTYYADSAKGRLTISSDNAKDSLYLQMNSLRAEDTAVYYCTRDSYADDAALFDIWGQGTTVTVSSTRASTKGPSVFPLAPSSKSTSGGTAALGCLVKDYFPEPVTVSWNSGALTSGVHTFPAVLQSSGLYSLSSVVTVPSSSLGTQTYICNVNHKPSNTKVDKRVEPKSCIPEDTFFPSPESSCDVKLVEKSFETDTNLNFQNLSVIGFRILLLKVAGFNLLMTLRLWSS

SEQ ID NO: 14182 - protein, 866 aa, Artificial Sequence
  Synthetic Polypeptide
MALPVTALLLPLALLLHAARPEVQLVESGGGLVQPGGSLRLSCAASGFSFSDFWMSWVRQAPGKGLEWVATISQAGSEKDYVDSVKGRFTISRDNAKKSLYLQMNSLRAEDTAVYYCASGVYSFDYRGQGTLVTVSSGTGGGGSGGGGSGGGGSEFEIVLTQSPDTLSLSPGEKATLSCRASQSVSSSFLAWYQQKPGQAPSLLIYVASRRAAGIPDRFSGSGSGTDFTLTISRLEPEDFGMFYCQHYGRTPFTFGPGTKVDIKRASRDSLRPILPHCSLQAAKNSRPTRPHLCASPTSTLGLQWLGRPMDLLKPAWKPPSHPSRATTNTPPAPTAHLSSGSPTDPTAAKPTKAAPWKRQWPLQSAAAEPIAALPARATSRACAPPSCTRSCWARPPCTPCWCLPWCWLWSSGRTAGDAPREADLASRPISTCSWLATWNPTQALLVWTGFGASFSLSALLPARIPGPSSSCKSLDLAWSSLARHAPVPCPAIASAAAITTGAGSDSLLAKDWNGSATSTTAAPTTTPASPEPSAWTPAGTSSPSCLAQPPIPPCTTAPERTAATGGVEAREHWSQLALDPAEAEVEAEDLAAEALSNRSSWWNQGAVWCSRVGADCHAWRLASHSRTTACTGCDRPPERVWSGSPSGTTDLMSITEILREGSPSPATIAKICSTCKTHSGRMIRRSTIALAQGLLWPAHSITGDRVPWQYQARVPLQRDPPCFLWLPAASLQAEEQPLWAAWSRITFPSLPCPGIAEHQAACTPFQPCCKAAACTLAAWSQCLALAWAPRPTSAMTTSLATPRWTREWNPRAVSPRTHSSQAPRAAATSWWKRASRQTPTTSRTASASESCCKWPALTCPCGCGP

SEQ ID NO: 14183 - protein, 907 aa, Artificial Sequence
  Synthetic Polypeptide
MALPVTALLLPLALLLHAARPEVQLVESGGGLVQPGGSLRLSCAASGFSFSDFWMSWVRQAPGKGLEWVATISQAGSEKDYVDSVKGRFTISRDNAKKSLYLQMNSLRAEDTAVYYCASGVYSFDYRGQGTLVTVSSGTGGGGSGGGGSGGGGSEFDIQMTQSPSSLSASLGDRVTITCRASQGIRNDLGWYQQKPGKAPKRLIYASSTLQSGVPSRFSGSGSGTEFTLTISSLQPEDFATYYCLQHNNFPWTFGQGTKVEIKRLEGQPKANPTVTLFPPSSEELQANKATLVCLISDFYPGAVTVAWKADGSPVKAGVETTKPSKQSNNKYAASSYLSLTPEQWKSHRSYSCQVTHEGSTVEKTVAPTECSGRADCGFTSESYQQGVLSATILYEILLGKATLYAVLVSALVLMAMVKRKDSRGRAKRSGSGVKQTLNFDLLKLAGDVESNPGPTSMDWIWRILFLVGAATGAHSGPQLQLQESGPGLVKPSETLSLTCTVSGDSISSGDYYWGWIRQPPGKGLEWIGHIYYSGVTYYNPSLKSRVTISVDTSRNQFSLKLSSVTAADTAVYYCTREDSSNWRSRGQGTLVTVSSGSGGGGSGGGGSGGGGSFEQVTLKESGPVLVKPTETLTLTCTVSGFSLINARMGVSWIRQPPGKALEWLAHIFSNAEKSYRTSLKSRLTISKDTSKSQVVLTMTNMDPVDTATYYCARIPGYGGNGDYHYYGMDVWGQGTTVTVSSTRASTKGPSVFPLAPSSKSTSGGTAALGCLVKDYFPEPVTVSWNSGALTSGVHTFPAVLQSSGLYSLSSVVTVPSSSLGTQTYICNVNHKPSNTKVDKRVEPKSCIPEDTFFPSPESSCDVKLVEKSFETDTNLNFQNLSVIGFRILLLKVAGFNLLMTLRLWSS

SEQ ID NO: 14184 - protein, 900 aa, Artificial Sequence
  Synthetic Polypeptide
MALPVTALLLPLALLLHAARPEVQLVESGGGLVQPGGSLRLSCAASGFSFSDFWMSWVRQAPGKGLEWVATISQAGSEKDYVDSVKGRFTISRDNAKKSLYLQMNSLRAEDTAVYYCASGVYSFDYRGQGTLVTVSSGTGGGGSGGGGSGGGGSEFDIVLTQSPPSLAMSLGKRATISCRASESVTILGSHLIHWYQQKPGQPPTLLIQLASNVQTGVPARFSGSGSRTDFTLTIDPVEEDDVAVYYCLQSRTIPRTFGGGTKLEIKLEGQPKANPTVTLFPPSSEELQANKATLVCLISDFYPGAVTVAWKADGSPVKAGVETTKPSKQSNNKYAASSYLSLTPEQWKSHRSYSCQVTHEGSTVEKTVAPTECSGRADCGFTSESYQQGVLSATILYEILLGKATLYAVLVSALVLMAMVKRKDSRGRAKRSGSGVKQTLNFDLLKLAGDVESNPGPTSMDWIWRILFLVGAATGAHSGPQLQLQESGPGLVKPSETLSLTCTVSGDSISSGDYYWGWIRQPPGKGLEWIGHIYYSGVTYYNPSLKSRVTISVDTSRNQFSLKLSSVTAADTAVYYCTREDSSNWRSRGQGTLVTVSSGSGGGGSGGGGSGGGGSFEQIQLVQSGPELKKPGETVKISCKASGYTFTDYSINWVKRAPGKGLKWMGWINTETREPAYAYDFRGRFAFSLETSASTAYLQINNLKYEDTATYFCALDYSYAMDYWGQGTSVTVSSTRASTKGPSVFPLAPSSKSTSGGTAALGCLVKDYFPEPVTVSWNSGALTSGVHTFPAVLQSSGLYSLSSVVTVPSSSLGTQTYICNVNHKPSNTKVDKRVEPKSCIPEDTFFPSPESSCDVKLVEKSFETDTNLNFQNLSVIGFRILLLKVAGFNLLMTLRLWSS

SEQ ID NO: 14185 - protein, 902 aa, Artificial Sequence
  Synthetic Polypeptide
MALPVTALLLPLALLLHAARPEVQLVESGGGLVQPGGSLRLSCAASGFSFSDFWMSWVRQAPGKGLEWVATISQAGSEKDYVDSVKGRFTISRDNAKKSLYLQMNSLRAEDTAVYYCASGVYSFDYRGQGTLVTVSSGTGGGGSGGGGSGGGGSEFDIQLTQSPSSLSASVGDRVSFTCQASQDINNFLNWYQQKPGKAPKLLIYDASNLETGVPSRFSGSGSGTDFTFTISSLQPEDIATYYCQQYGNLPFTFGGGTKVEIKRLEGQPKANPTVTLFPPSSEELQANKATLVCLISDFYPGAVTVAWKADGSPVKAGVETTKPSKQSNNKYAASSYLSLTPEQWKSHRSYSCQVTHEGSTVEKTVAPTECSGRADCGFTSESYQQGVLSATILYEILLGKATLYAVLVSALVLMAMVKRKDSRGRAKRSGSGVKQTLNFDLLKLAGDVESNPGPTSMDWIWRILFLVGAATGAHSGPQLQLQESGPGLVKPSETLSLTCTVSGDSISSGDYYWGWIRQPPGKGLEWIGHIYYSGVTYYNPSLKSRVTISVDTSRNQFSLKLSSVTAADTAVYYCTREDSSNWRSRGQGTLVTVSSGSGGGGSGGGGSGGGGSFEQVQLQESGPGLVKPSETLSLTCTVSGGSISSYYWSWIRQPPGKGLEWIGYIYYSGSTNYNPSLKSRVTISVDTSKNQFSLKLSSVTAADTAVYYCVSLVYCGGDCYSGFDYWGQGTLVTVSSTRASTKGPSVFPLAPSSKSTSGGTAALGCLVKDYFPEPVTVSWNSGALTSGVHTFPAVLQSSGLYSLSSVVTVPSSSLGTQTYICNVNHKPSNTKVDKRVEPKSCIPEDTFFPSPESSCDVKLVEKSFETDTNLNFQNLSVIGFRILLLKVAGFNLLMTLRLWSS

SEQ ID NO: 14186 - protein, 904 aa, Artificial Sequence
  Synthetic Polypeptide
MALPVTALLLPLALLLHAARPEVQLVESGGGLVQPGGSLRLSCAASGFSFSDFWMSWVRQAPGKGLEWVATISQAGSEKDYVDSVKGRFTISRDNAKKSLYLQMNSLRAEDTAVYYCASGVYSFDYRGQGTLVTVSSGTGGGGSGGGGSGGGGSEFDIQLTQSPSSLSASVGDRVSFTCQASQDINNFLNWYQQKPGKAPKLLIYDASNLETGVPSRFSGSGSGTDFTFTISSLQPEDIATYYCQQYGNLPFTFGGGTKVEIKRLEGQPKANPTVTLFPPSSEELQANKATLVCLISDFYPGAVTVAWKADGSPVKAGVETTKPSKQSNNKYAASSYLSLTPEQWKSHRSYSCQVTHEGSTVEKTVAPTECSGRADCGFTSESYQQGVLSATILYEILLGKATLYAVLVSALVLMAMVKRKDSRGRAKRSGSGVKQTLNFDLLKLAGDVESNPGPTSMDWIWRILFLVGAATGAHSGPQLQLQESGPGLVKPSETLSLTCTVSGDSISSGDYYWGWIRQPPGKGLEWIGHIYYSGVTYYNPSLKSRVTISVDTSRNQFSLKLSSVTAADTAVYYCTREDSSNWRSRGQGTLVTVSSGSGGGGSGGGGSGGGGSFEQVQLQESGPGLVKPSQTLSLTCTVSGGSISSGGFYWSWIRQHPGKGLEWIGYIHHSGSTHYNPSLKSRVTISIDTSKNLFSLRLSSVTAADTAVYYCASLVYCGGDCYSGFDYWGQGTLVTVSSTRASTKGPSVFPLAPSSKSTSGGTAALGCLVKDYFPEPVTVSWNSGALTSGVHTFPAVLQSSGLYSLSSVVTVPSSSLGTQTYICNVNHKPSNTKVDKRVEPKSCIPEDTFFPSPESSCDVKLVEKSFETDTNLNFQNLSVIGFRILLLKVAGFNLLMTLRLWSS

SEQ ID NO: 14187 - protein, 900 aa, Artificial Sequence
  Synthetic Polypeptide
MALPVTALLLPLALLLHAARPEVQLVESGGGLVQPGGSLRLSCAASGFSFSDFWMSWVRQAPGKGLEWVATISQAGSEKDYVDSVKGRFTISRDNAKKSLYLQMNSLRAEDTAVYYCASGVYSFDYRGQGTLVTVSSGTGGGGSGGGGSGGGGSEFDIQMTQSPSSLSASVGDRVTITCKSSQSVLYSSNQKNYLAWFQQKPGKAPKLLIYWASTRESGVPSRFSGSGSGTDFTLTISSLQPEDFATYFCHQYLSSYTFGQGTKVEIKRLEGQPKANPTVTLFPPSSEELQANKATLVCLISDFYPGAVTVAWKADGSPVKAGVETTKPSKQSNNKYAASSYLSLTPEQWKSHRSYSCQVTHEGSTVEKTVAPTECSGRADCGFTSESYQQGVLSATILYEILLGKATLYAVLVSALVLMAMVKRKDSRGRAKRSGSGVKQTLNFDLLKLAGDVESNPGPTSMDWIWRILFLVGAATGAHSGPQLQLQESGPGLVKPSETLSLTCTVSGDSISSGDYYWGWIRQPPGKGLEWIGHIYYSGVTYYNPSLKSRVTISVDTSRNQFSLKLSSVTAADTAVYYCTREDSSNWRSRGQGTLVTVSSGSGGGGSGGGGSGGGGSFEEVQLVESGGGLVQPGGSLRLSCAASGYTFTTYWMHWVRQAPGKGLEWVGYIRPSTGYTEYNQKFKDRFTISADTSKNTAYLQMNSLRAEDTAVYYCARSRWLLDYWGQGTLVTVSTRASTKGPSVFPLAPSSKSTSGGTAALGCLVKDYFPEPVTVSWNSGALTSGVHTFPAVLQSSGLYSLSSVVTVPSSSLGTQTYICNVNHKPSNTKVDKRVEPKSCIPEDTFFPSPESSCDVKLVEKSFETDTNLNFQNLSVIGFRILLLKVAGFNLLMTLRLWSS

SEQ ID NO: 14188 - protein, 897 aa, Artificial Sequence
  Synthetic Polypeptide
MALPVTALLLPLALLLHAARPEVQLVESGGGLVQPGGSLRLSCAASGFSFSDFWMSWVRQAPGKGLEWVATISQAGSEKDYVDSVKGRFTISRDNAKKSLYLQMNSLRAEDTAVYYCASGVYSFDYRGQGTLVTVSSGTGGGGSGGGGSGGGGSEFDIQMTQSPSSLSASVGDRVTITCRASQDISNYLNWYQQKPGKAPKLLIYYTSRLHSGVPSRFSGSGSGTDFTLTISSLQPEDFATYYCQQGNTLPYTFGQGTKVEIKRLEGQPKANPTVTLFPPSSEELQANKATLVCLISDFYPGAVTVAWKADGSPVKAGVETTKPSKQSNNKYAASSYLSLTPEQWKSHRSYSCQVTHEGSTVEKTVAPTECSGRADCGFTSESYQQGVLSATILYEILLGKATLYAVLVSALVLMAMVKRKDSRGRAKRSGSGVKQTLNFDLLKLAGDVESNPGPTSMDWIWRILFLVGAATGAHSGPQLQLQESGPGLVKPSETLSLTCTVSGDSISSGDYYWGWIRQPPGKGLEWIGHIYYSGVTYYNPSLKSRVTISVDTSRNQFSLKLSSVTAADTAVYYCTREDSSNWRSRGQGTLVTVSSGSGGGGSGGGGSGGGGSFEEVQLVESGGGLVQPGGSLRLSCAASGFTFSDYFMSWVRQAPGKGLEWVATISNGGTYTYYPDSVKGRFTISRDNSKNTLYLQMNSLRAEDTAVYYCARFDGYIFDYWGQGTLVTVSSTRASTKGPSVFPLAPSSKSTSGGTAALGCLVKDYFPEPVTVSWNSGALTSGVHTFPAVLQSSGLYSLSSVVTVPSSSLGTQTYICNVNHKPSNTKVDKRVEPKSCIPEDTFFPSPESSCDVKLVEKSFETDTNLNFQNLSVIGFRILLLKVAGFNLLMTLRLWSS

SEQ ID NO: 14189 - protein, 639 aa, Artificial Sequence
  Synthetic Polypeptide
MDWIWRILFLVGAATGAHSGPQVQLQESGGGLAQAGGSLRLSCAASGRTFSMGWFRQAPGKEREFVAAITYSGGSPYYASSVRGRFTISRDNAKNTVYLQMNSLKPEDTAVYYCAANPTYGSDWNAENWGQGTQVTVSSGSGGGGSGGGGSGGGGSFEQVQLQQPGAELVKPGASVKMSCKASGYAFSSYWINWMKQKPGQGLEWIGQIYPGDGTENRFSVNFQKAAKSFSLKISDSQLGDAAMYFCAYRSAVNARLMFGDGTQLVVKPNGGGGSGGGGSGGGGSEADIYQTPRYLVIGTGKKITLECSQTMGHDKMYWYQQDPGMELHLIHYSYGVNSTEKGDLSSESTVSRIRTEHFPLTLESARPSHTSQYLCASSEARGLAEFTDTQYFGPGTRLTVTREQKLISEEDLAKPTTTPAPRPPTPAPTIASQPLSLRPEACRPAAGGAVHTRGLDFACDIYIWAPLAGTCGVLLLSLVITLYCKRGRKKLLYIFKQPFMRPVQTTQEEDGCSCRFPEEEEGGCELRVKFSRSADAPAYQQGQNQLYNELNLGRREEYDVLDKRRGRDPEMGGKPRRKNPQEGLYNELQKDKMAEAYSEIGMKGERRRGKGHDGLYQGLSTATKDTYDALHMQALPPR

SEQ ID NO: 14190 - protein, 992 aa, Artificial Sequence
  Synthetic Polypeptide
MALPVTALLLPLALLLHAARPEADIYQTPRYLVIGTGKKITLECSQTMGHDKMYWYQQDPGMELHLIHYSYGVNSTEKGDLSSESTVSRIRTEHFPLTLESARPSHTSQYLCASSEARGLAEFTDTQYFGPGTRLTVLEIQNPDPAVYQLRDSKSSDKSVCLFTDFDSQTNVSQSKDSDVYITDKCVLDMRSMDFKSNSAVAWSNKSDFACANAFNNSIIPEDTFFPSSDVPCDVKLVEKSFETDTNLNFQNLSVIGFRILLLKVAGFNLLMTLRLWSSRAKRSGSGVKQTLNFDLLKLAGDVESNPGPTSMDWIWRILFLVGAATGAHSGPQVQLQESGGGLAQAGGSLRLSCAASGRTFSMGWFRQAPGKEREFVAAITYSGGSPYYASSVRGRFTISRDNAKNTVYLQMNSLKPEDTAVYYCAANPTYGSDWNAENWGQGTQVTVSSGSGGGGSGGGGSGGGGSFEQVQLQQPGAELVKPGASVKMSCKASGYAFSSYWINWMKQKPGQGLEWIGQIYPGDGTENRFSVNFQKAAKSFSLKISDSQLGDAAMYFCAYRSAVNARLMFGDGTQLVVKPNTREDLKNVFPPEVAVFEPSKAEIAHTQKATLVCLATGFYPDHVELSWWVNGKEVHSGVCTDPQPLKEQPALNDSRYCLSSRLRVSATFWQNPRNHFRCQVQFYGLSENDEWTQDRAKPVTQIVSAEAWGRADCGITSASYHQGVLSATILYEILLGKATLYAVLVSALVLMAMVKRKDSRGRAKRSGSGATNFSLLKQAGDVEENPGPSRGHMTEYKPTVRLATRDDVPRAVRTLAAAFADYPATRHTVDPDRHIERVTELQELFLTRVGLDIGKVWVADDGAAVAVWTTPESVEAGAVFAEIGPRMAELSGSRLAAQQQMEGLLAPHRPKEPAWFLATVGVSPDHQGKGLGSAVVLPGVEAAERAGVPAFLETSAPRNLPFYERLGFTVTADVEVPEGPRTWCMTRKPGA

SEQ ID NO: 14191 - protein, 991 aa, Artificial Sequence
  Synthetic Polypeptide
MALPVTALLLPLALLLHAARPEADIYQTPRYLVIGTGKKITLECSQTMGHDKMYWYQQDPGMELHLIHYSYGVNSTEKGDLSSESTVSRIRTEHFPLTLESARPSHTSQYLCASSEARGLAEFTDTQYFGPGTRLTVLEDLKNVFPPEVAVFEPSKAEIAHTQKATLVCLATGFYPDHVELSWWVNGKEVHSGVCTDPQPLKEQPALNDSRYCLSSRLRVSATFWQNPRNHFRCQVQFYGLSENDEWTQDRAKPVTQIVSAEAWGRADCGITSASYHQGVLSATILYEILLGKATLYAVLVSALVLMAMVKRKDSRGRAKRSGSGATNFSLLKQAGDVEENPGPTSMDWIWRILFLVGAATGAHSGPQVQLQESGGGLAQAGGSLRLSCAASGRTFSMGWFRQAPGKEREFVAAITYSGGSPYYASSVRGRFTISRDNAKNTVYLQMNSLKPEDTAVYYCAANPTYGSDWNAENWGQGTQVTVSSGSGGGGSGGGGSGGGGSFEQVQLQQPGAELVKPGASVKMSCKASGYAFSSYWINWMKQKPGQGLEWIGQIYPGDGTENRFSVNFQKAAKSFSLKISDSQLGDAAMYFCAYRSAVNARLMFGDGTQLVVKPNTRIQNPDPAVYQLRDSKSSDKSVCLFTDFDSQTNVSQSKDSDVYITDKCVLDMRSMDFKSNSAVAWSNKSDFACANAFNNSIIPEDTFFPSSDVPCDVKLVEKSFETDTNLNFQNLSVIGFRILLLKVAGFNLLMTLRLWSSRAKRSGSGVKQTLNFDLLKLAGDVESNPGPSRGHMTEYKPTVRLATRDDVPRAVRTLAAAFADYPATRHTVDPDRHIERVTELQELFLTRVGLDIGKVWVADDGAAVAVWTTPESVEAGAVFAEIGPRMAELSGSRLAAQQQMEGLLAPHRPKEPAWFLATVGVSPDHQGKGLGSAVVLPGVEAAERAGVPAFLETSAPRNLPFYERLGFTVTADVEVPEGPRTWCMTRKPGA

SEQ ID NO: 14192 - protein, 991 aa, Artificial Sequence
  Synthetic Polypeptide
MALPVTALLLPLALLLHAARPEADIYQTPRYLVIGTGKKITLECSQTMGHDKMYWYQQDPGMELHLIHYSYGVNSTEKGDLSSESTVSRIRTEHFPLTLESARPSHTSQYLCASSEARGLAEFTDTQYFGPGTRLTVLEDLKNVFPPEVAVFEPSEAEISHTQKATLVCLATGFYPDHVELSWWVNGKEVHSGVCTDPQPLKEQPALNDSRYCLSSRLRVSATFWQNPRNHFRCQVQFYGLSENDEWTQDRAKPVTQIVSAEAWGRADCGFTSESYQQGVLSATILYEILLGKATLYAVLVSALVLMAMVKRKDSRGRAKRSGSGATNFSLLKQAGDVEENPGPTSMDWIWRILFLVGAATGAHSGPQVQLQESGGGLAQAGGSLRLSCAASGRTFSMGWFRQAPGKEREFVAAITYSGGSPYYASSVRGRFTISRDNAKNTVYLQMNSLKPEDTAVYYCAANPTYGSDWNAENWGQGTQVTVSSGSGGGGSGGGGSGGGGSFEQVQLQQPGAELVKPGASVKMSCKASGYAFSSYWINWMKQKPGQGLEWIGQIYPGDGTENRFSVNFQKAAKSFSLKISDSQLGDAAMYFCAYRSAVNARLMFGDGTQLVVKPNTRIQNPDPAVYQLRDSKSSDKSVCLFTDFDSQTNVSQSKDSDVYITDKCVLDMRSMDFKSNSAVAWSNKSDFACANAFNNSIIPEDTFFPSPESSCDVKLVEKSFETDTNLNFQNLSVIGFRILLLKVAGFNLLMTLRLWSSRAKRSGSGVKQTLNFDLLKLAGDVESNPGPSRGHMTEYKPTVRLATRDDVPRAVRTLAAAFADYPATRHTVDPDRHIERVTELQELFLTRVGLDIGKVWVADDGAAVAVWTTPESVEAGAVFAEIGPRMAELSGSRLAAQQQMEGLLAPHRPKEPAWFLATVGVSPDHQGKGLGSAVVLPGVEAAERAGVPAFLETSAPRNLPFYERLGFTVTADVEVPEGPRTWCMTRKPGA

SEQ ID NO: 14193 - protein, 758 aa, Artificial Sequence
  Synthetic Polypeptide
MALPVTALLLPLALLLHAARPEADIYQTPRYLVIGTGKKITLECSQTMGHDKMYWYQQDPGMELHLIHYSYGVNSTEKGDLSSESTVSRIRTEHFPLTLESARPSHTSQYLCASSEARGLAEFTDTQYFGPGTRLTVLEDLKNVFPPEVAVFEPSEAEISHTQKATLVCLATGFYPDHVELSWWVNGKEVHSGVCTDPQPLKEQPALNDSRYCLSSRLRVSATFWQNPRNHFRCQVQFYGLSENDEWTQDRAKPVTQIVSAEAWGRADCGFTSESYQQGVLSATILYEILLGKATLYAVLVSALVLMAMVKRKDSRGRAKRSGSGATNFSLLKQAGDVEENPGPTSMDWIWRILFLVGAATGAHSGPQVQLQESGGGLAQAGGSLRLSCAASGRTFSMGWFRQAPGKEREFVAAITYSGGSPYYASSVRGRFTISRDNAKNTVYLQMNSLKPEDTAVYYCAANPTYGSDWNAENWGQGTQVTVSSGSGGGGSGGGGSGGGGSFEQVQLQQPGAELVKPGASVKMSCKASGYAFSSYWINWMKQKPGQGLEWIGQIYPGDGTENRFSVNFQKAAKSFSLKISDSQLGDAAMYFCAYRSAVNARLMFGDGTQLVVKPNTRIQNPDPAVYQLRDSKSSDKSVCLFTDFDSQTNVSQSKDSDVYITDKCVLDMRSMDFKSNSAVAWSNKSDFACANAFNNSIIPEDTFFPSPESSCDVKLVEKSFETDTNLNFQNLSVIGFRILLLKVAGFNLLMTLRLWSS

SEQ ID NO: 14194 - protein, 983 aa, Artificial Sequence
  Synthetic Polypeptide
MALPVTALLLPLALLLHAARPEADIYQTPRYLVIGTGKKITLECSQTMGHDKMYWYQQDPGMELHLIHYSYGVNSTEKGDLSSESTVSRIRTEHFPLTLESARPSHTSQYLCASSEARGLAEFTDTQYFGPGTRLTVLEDLKNVFPPEVAVFEPSEAEISHTQKATLVCLATGFYPDHVELSWWVNGKEVHSGVCTDPQPLKEQPALNDSRYCLSSRLRVSATFWQNPRNHFRCQVQFYGLSENDEWTQDRAKPVTQIVSAEAWGRADCGFTSESYQQGVLSATILYEILLGKATLYAVLVSALVLMAMVKRKDSRGRAKRSGSGATNFSLLKQAGDVEENPGPTSMDWIWRILFLVGAATGAHSGPQVQLQESGGGLAQAGGSLRLSCAASGRTFSMGWFRQAPGKEREFVAAITYSGGSPYYASSVRGRFTISRDNAKNTVYLQMNSLKPEDTAVYYCAANPTYGSDWNAENWGQGTQVTVSSGSGGGGSGGGGSGGGGSFEQVQLQQPGAELVKPGASVKMSCKASGYAFSSYWINWMKQKPGQGLEWIGQIYPGDGTENRFSVNFQKAAKSFSLKISDSQLGDAAMYFCAYRSAVNARLMFGDGTQLVVKPNTRIQNPDPAVYQLRDSKSSDKSVCLFTDFDSQTNVSQSKDSDVYITDKCVLDMRSMDFKSNSAVAWSNKSDFACANAFNNSIIPEDTFFPSPESSCDVKLVEKSFETDTNLNFQNLSVIGFRILLLKVAGFNLLMTLRLWSSRAKRSGSGVKQTLNFDLLKLAGDVESNPGPSRGGIHTMATYEVLCEVARKLGTDDREVVLFLLNVFIPQPTLAQLIGALRALKEEGRLTFPLLAECLFRAGRRDLLRDLLHLDPRFLERHLAGTMSYFSPYQLTVLHVDGELCARDIRSLIFLSKDTIGSRSTPQTFLHWVYCMENLDLLGPTDVDALMSMLRSLSRVDLQRQVQTLMGLHLSGPSHSQHYRHTP

SEQ ID NO: 14195 - protein, 762 aa, Artificial Sequence
  Synthetic Polypeptide
MALPVTALLLPLALLLHAARPEADIYQTPRYLVIGTGKKITLECSQTMGHDKMYWYQQDPGMELHLIHYSYGVNSTEKGDLSSESTVSRIRTEHFPLTLESARPSHTSQYLCASSEARGLAEFTDTQYFGPGTRLTVLEIQNPDPAVYQLRDSKSSDKSVCLFTDFDSQTNVSQSKDSDVYITDKCVLDMRSMDFKSNSAVAWSNKSDFACANAFNNSIIPEDTFFPSPESSCDVKLVEKSFETDTNLNFQNLSVIGFRILLLKVAGFNLLMTLRLWSSRAKRSGSGVKQTLNFDLLKLAGDVESNPGPTSMDWIWRILFLVGAATGAHSGPQVQLQESGGGLAQAGGSLRLSCAASGRTFSMGWFRQAPGKEREFVAAITYSGGSPYYASSVRGRFTISRDNAKNTVYLQMNSLKPEDTAVYYCAANPTYGSDWNAENWGQGTQVTVSSGSGGGGSGGGGSGGGGSFEQVQLQQPGAELVKPGASVKMSCKASGYAFSSYWINWMKQKPGQGLEWIGQIYPGDGTENRFSVNFQKAAKSFSLKISDSQLGDAAMYFCAYRSAVNARLMFGDGTQLVVKPNTREDLKNVFPPEVAVFEPSEAEISHTQKATLVCLATGFYPDHVELSWWVNGKEVHSGVCTDPQPLKEQPALNDSRYCLSSRLRVSATFWQNPRNHFRCQVQFYGLSENDEWTQDRAKPVTQIVSAEAWGRADCGFTSESYQQGVLSATILYEILLGKATLYAVLVSALVLMAMVKRKDSRG

SEQ ID NO: 14196 - protein, 984 aa, Artificial Sequence
  Synthetic Polypeptide
MALPVTALLLPLALLLHAARPEADIYQTPRYLVIGTGKKITLECSQTMGHDKMYWYQQDPGMELHLIHYSYGVNSTEKGDLSSESTVSRIRTEHFPLTLESARPSHTSQYLCASSEARGLAEFTDTQYFGPGTRLTVLEIQNPDPAVYQLRDSKSSDKSVCLFTDFDSQTNVSQSKDSDVYITDKCVLDMRSMDFKSNSAVAWSNKSDFACANAFNNSIIPEDTFFPSPESSCDVKLVEKSFETDTNLNFQNLSVIGFRILLLKVAGFNLLMTLRLWSSRAKRSGSGVKQTLNFDLLKLAGDVESNPGPTSMDWIWRILFLVGAATGAHSGPQVQLQESGGGLAQAGGSLRLSCAASGRTFSMGWFRQAPGKEREFVAAITYSGGSPYYASSVRGRFTISRDNAKNTVYLQMNSLKPEDTAVYYCAANPTYGSDWNAENWGQGTQVTVSSGSGGGGSGGGGSGGGGSFEQVQLQQPGAELVKPGASVKMSCKASGYAFSSYWINWMKQKPGQGLEWIGQIYPGDGTENRFSVNFQKAAKSFSLKISDSQLGDAAMYFCAYRSAVNARLMFGDGTQLVVKPNTREDLKNVFPPEVAVFEPSEAEISHTQKATLVCLATGFYPDHVELSWWVNGKEVHSGVCTDPQPLKEQPALNDSRYCLSSRLRVSATFWQNPRNHFRCQVQFYGLSENDEWTQDRAKPVTQIVSAEAWGRADCGFTSESYQQGVLSATILYEILLGKATLYAVLVSALVLMAMVKRKDSRGRAKRSGSGATNFSLLKQAGDVEENPGPSRGGIHTMATYEVLCEVARKLGTDDREVVLFLLNVFIPQPTLAQLIGALRALKEEGRLTFPLLAECLFRAGRRDLLRDLLHLDPRFLERHLAGTMSYFSPYQLTVLHVDGELCARDIRSLIFLSKDTIGSRSTPQTFLHWVYCMENLDLLGPTDVDALMSMLRSLSRVDLQRQVQTLMGLHLSGPSHSQHYRHTP

SEQ ID NO: 14197 - protein, 991 aa, Artificial Sequence
  Synthetic Polypeptide
MALPVTALLLPLALLLHAARPEADIYQTPRYLVIGTGKKITLECSQTMGHDKMYWYQQDPGMELHLIHYSYGVNSTEKGDLSSESTVSRIRTEHFPLTLESARPSHTSQYLCASSEARGLAEFTDTQYFGPGTRLTVLEDLKNVFPPEVAVFEPSEAEISHTQKATLVCLATGFYPDHVELSWWVNGKEVHSGVSTDPQPLKEQPALNDSRYCLSSRLRVSATFWQNPRNHFRCQVQFYGLSENDEWTQDRAKPVTQIVSAEAWGRADCGFTSESYQQGVLSATILYEILLGKATLYAVLVSALVLMAMVKRKDSRGRAKRSGSGATNFSLLKQAGDVEENPGPTSMDWIWRILFLVGAATGAHSGPQVQLQESGGGLAQAGGSLRLSCAASGRTFSMGWFRQAPGKEREFVAAITYSGGSPYYASSVRGRFTISRDNAKNTVYLQMNSLKPEDTAVYYCAANPTYGSDWNAENWGQGTQVTVSSGSGGGGSGGGGSGGGGSFEQVQLQQPGAELVKPGASVKMSCKASGYAFSSYWINWMKQKPGQGLEWIGQIYPGDGTENRFSVNFQKAAKSFSLKISDSQLGDAAMYFCAYRSAVNARLMFGDGTQLVVKPNTRIQNPDPAVYQLRDSKSSDKSVCLFTDFDSQTNVSQSKDSDVYITDKTVLDMRSMDFKSNSAVAWSNKSDFACANAFNNSIIPEDTFFPSPESSCDVKLVEKSFETDTNLNFQNLSVIGFRILLLKVAGFNLLMTLRLWSSRAKRSGSGVKQTLNFDLLKLAGDVESNPGPSRGHMTEYKPTVRLATRDDVPRAVRTLAAAFADYPATRHTVDPDRHIERVTELQELFLTRVGLDIGKVWVADDGAAVAVWTTPESVEAGAVFAEIGPRMAELSGSRLAAQQQMEGLLAPHRPKEPAWFLATVGVSPDHQGKGLGSAVVLPGVEAAERAGVPAFLETSAPRNLPFYERLGFTVTADVEVPEGPRTWCMTRKPGA

SEQ ID NO: 14198 - protein, 1073 aa, Artificial Sequence
  Synthetic Polypeptide
MALPVTALLLPLALLLHAARPEADIYQTPRYLVIGTGKKITLECSQTMGHDKMYWYQQDPGMELHLIHYSYGVNSTEKGDLSSESTVSRIRTEHFPLTLESARPSHTSQYLCASSEARGLAEFTDTQYFGPGTRLTVLEDLKNVFPPEVAVFEPSEAEISHTQKATLVCLATGFYPDHVELSWWVNGKEVHSGVSTDPQPLKEQPALNDSRYCLSSRLRVSATFWQNPRNHFRCQVQFYGLSENDEWTQDRAKPVTQIVSAEAWGRADCGFTSESYQQGVLSATILYEILLGKATLYAVLVSALVLMAMVKRKDSRGRAKRSGSGATNFSLLKQAGDVEENPGPTSMDWIWRILFLVGAATGAHSGPQVQLQESGGGLAQAGGSLRLSCAASGRTFSMGWFRQAPGKEREFVAAITYSGGSPYYASSVRGRFTISRDNAKNTVYLQMNSLKPEDTAVYYCAANPTYGSDWNAENWGQGTQVTVSSGSGGGGSGGGGSGGGGSFEQVQLQQPGAELVKPGASVKMSCKASGYAFSSYWINWMKQKPGQGLEWIGQIYPGDGTENRFSVNFQKAAKSFSLKISDSQLGDAAMYFCAYRSAVNARLMFGDGTQLVVKPNTREQKLISEEDGSGTPFPSLAPPIMLLVDGKQQMVVVCLVLDVAPPGLDSPIWFSAGNGSALDAFTYGPSPATDGTWTNLAHLSLPSEELASWEPLVCHTGPGAEGHSRSTQPMHLSGEASTARTCPQEPLRGTPGGALWLGVLRLLLFKLLLFDLLLTCSCLCDPAGPLPSPATTTRLRALGSHRLHPATETGGREATSSPRPQPRDRRWGDTPPGRKPGSPVRAKRSGSGVKQTLNFDLLKLAGDVESNPGPSRGHMTEYKPTVRLATRDDVPRAVRTLAAAFADYPATRHTVDPDRHIERVTELQELFLTRVGLDIGKVWVADDGAAVAVWTTPESVEAGAVFAEIGPRMAELSGSRLAAQQQMEGLLAPHRPKEPAWFLATVGVSPDHQGKGLGSAVVLPGVEAAERAGVPAFLETSAPRNLPFYERLGFTVTADVEVPEGPRTWCMTRKPGA

SEQ ID NO: 14199 - protein, 1028 aa, Artificial Sequence
  Synthetic Polypeptide
MALPVTALLLPLALLLHAARPEADIYQTPRYLVIGTGKKITLECSQTMGHDKMYWYQQDPGMELHLIHYSYGVNSTEKGDLSSESTVSRIRTEHFPLTLESARPSHTSQYLCASSEARGLAEFTDTQYFGPGTRLTVLEGKPIPNPLLGLDSTGSGDKQLDADVSPKPTIFLPSIAETKLQKAGTYLCLLEKFFPDVIKIHWQEKKSNTILGSQEGNTMKTNDTYMKFSWLTVPEKSLDKEHRCIVRHENNKNGVDQEIIFPPIKTDVITMDPKDNCSKDANDTLLLQLTNTSAYYMYLLLLLKSVVYFAIITCCLLRRTAFCCNGEKSRAKRSGSGATNFSLLKQAGDVEENPGPTSMDWIWRILFLVGAATGAHSGPQVQLQESGGGLAQAGGSLRLSCAASGRTFSMGWFRQAPGKEREFVAAITYSGGSPYYASSVRGRFTISRDNAKNTVYLQMNSLKPEDTAVYYCAANPTYGSDWNAENWGQGTQVTVSSGSGGGGSGGGGSGGGGSFEQVQLQQPGAELVKPGASVKMSCKASGYAFSSYWINWMKQKPGQGLEWIGQIYPGDGTENRFSVNFQKAAKSFSLKISDSQLGDAAMYFCAYRSAVNARLMFGDGTQLVVKPNTREQKLISEEDGSGSQPHTKPSVFVMKNGTNVACLVKEFYPKDIRINLVSSKKITEFDPAIVISPSGKYNAVKLGKYEDSNSVTCSVQHDNKTVHSTDFEVKTDSTDHVKPKETENTKQPSKSCHKPKAIVHTEKVNMMSLTVLGLRMLFAKTVAVNFLLTAKLFFLRAKRSGSGVKQTLNFDLLKLAGDVESNPGPSRGHMTEYKPTVRLATRDDVPRAVRTLAAAFADYPATRHTVDPDRHIERVTELQELFLTRVGLDIGKVWVADDGAAVAVWTTPESVEAGAVFAEIGPRMAELSGSRLAAQQQMEGLLAPHRPKEPAWFLATVGVSPDHQGKGLGSAVVLPGVEAAERAGVPAFLETSAPRNLPFYERLGFTVTADVEVPEGPRTWCMTRKPGA

SEQ ID NO: 14200 - protein, 766 aa, Artificial Sequence
  Synthetic Polypeptide
MALPVTALLLPLALLLHAARPEADIYQTPRYLVIGTGKKITLECSQTMGHDKMYWYQQDPGMELHLIHYSYGVNSTEKGDLSSESTVSRIRTEHFPLTLESARPSHTSQYLCASSEARGLAEFTDTQYFGPGTRLTVLESQPHTKPSVFVMKNGTNVACLVKEFYPKDIRINLVSSKKITEFDPAIVISPSGKYNAVKLGKYEDSNSVTCSVQHDNKTVHSTDFEVKTDSTDHVKPKETENTKQPSKSCHKPKAIVHTEKVNMMSLTVLGLRMLFAKTVAVNFLLTAKLFFLRAKRSGSGATNFSLLKQAGDVEENPGPTSMDWIWRILFLVGAATGAHSGPQVQLQESGGGLAQAGGSLRLSCAASGRTFSMGWFRQAPGKEREFVAAITYSGGSPYYASSVRGRFTISRDNAKNTVYLQMNSLKPEDTAVYYCAANPTYGSDWNAENWGQGTQVTVSSGSGGGGSGGGGSGGGGSFEQVQLQQPGAELVKPGASVKMSCKASGYAFSSYWINWMKQKPGQGLEWIGQIYPGDGTENRFSVNFQKAAKSFSLKISDSQLGDAAMYFCAYRSAVNARLMFGDGTQLVVKPNTRDKQLDADVSPKPTIFLPSIAETKLQKAGTYLCLLEKFFPDVIKIHWQEKKSNTILGSQEGNTMKTNDTYMKFSWLTVPEKSLDKEHRCIVRHENNKNGVDQEIIFPPIKTDVITMDPKDNCSKDANDTLLLQLTNTSAYYMYLLLLLKSVVYFAIITCCLLRRTAFCCNGEKS

SEQ ID NO: 14201 - protein, 1168 aa, Artificial Sequence
  Synthetic Polypeptide
MALPVTALLLPLALLLHAARPEADIYQTPRYLVIGTGKKITLECSQTMGHDKMYWYQQDPGMELHLIHYSYGVNSTEKGDLSSESTVSRIRTEHFPLTLESARPSHTSQYLCASSEARGLAEFTDTQYFGPGTRLTVGQPKANPTVTLFPPSSEELQANKATLVCLISDFYPGAVTVAWKADGSPVKAGVETTKPSKQSNNKYAASSYLSLTPEQWKSHRSYSCQVTHEGSTVEKTVAPTECSGSQSFGLLDPKLCYLLDGILFIYGVILTALFLRVKFSRSADAPAYQQGQNQLYNELNLGRREEYDVLDKRRGRDPEMGGKPQRRKNPQEGLYNELQKDKMAEAYSEIGMKGERRRGKGHDGLYQGLSTATKDTYDALHMQALPPRRAKRSGSGATNFSLLKQAGDVEENPGPTSMDWIWRILFLVGAATGAHSGPQVQLQESGGGLAQAGGSLRLSCAASGRTFSMGWFRQAPGKEREFVAAITYSGGSPYYASSVRGRFTISRDNAKNTVYLQMNSLKPEDTAVYYCAANPTYGSDWNAENWGQGTQVTVSSGSGGGGSGGGGSGGGGSFEQVQLQQPGAELVKPGASVKMSCKASGYAFSSYWINWMKQKPGQGLEWIGQIYPGDGTENRFSVNFQKAAKSFSLKISDSQLGDAAMYFCAYRSAVNARLMFGDGTQLVVKPNASTKGPSVFPLAPSSKSTSGGTAALGCLVKDYFPEPVTVSWNSGALTSGVHTFPAVLQSSGLYSLSSVVTVPSSSLGTQTYICNVNHKPSNTKVDKRVEPKSCGTQSFGLLDPKLCYLLDGILFIYGVILTALFLRVKFSRSADAPAYQQGQNQLYNELNLGRREEYDVLDKRRGRDPEMGGKPQRRKNPQEGLYNELQKDKMAEAYSEIGMKGERRRGKGHDGLYQGLSTATKDTYDALHMQALPPRRAKRSGSGVKQTLNFDLLKLAGDVESNPGPSRGHMTEYKPTVRLATRDDVPRAVRTLAAAFADYPATRHTVDPDRHIERVTELQELFLTRVGLDIGKVWVADDGAAVAVWTTPESVEAGAVFAEIGPRMAELSGSRLAAQQQMEGLLAPHRPKEPAWFLATVGVSPDHQGKGLGSAVVLPGVEAAERAGVPAFLETSAPRNLPFYERLGFTVTADVEVPEGPRTWCMTRKPGA

SEQ ID NO: 14202 - protein, 954 aa, Artificial Sequence
  Synthetic Polypeptide
MALPVTALLLPLALLLHAARPEADIYQTPRYLVIGTGKKITLECSQTMGHDKMYWYQQDPGMELHLIHYSYGVNSTEKGDLSSESTVSRIRTEHFPLTLESARPSHTSQYLCASSEARGLAEFTDTQYFGPGTRLTVLEDLKNVFPPEVAVFEPSEAEISHTQKATLVCLATGFYPDHVELSWWVNGKEVHSGVSTDPQPLKEQPALNDSRYCLSSRLRVSATFWQNPRNHFRCQVQFYGLSENDEWTQDRAKPVTQIVSAEAWGRADCGSQSFGLLDPKLCYLLDGILFIYGVILTALFLRVKFSRSADAPAYQQGQNQLYNELNLGRREEYDVLDKRRGRDPEMGGKPQRRKNPQEGLYNELQKDKMAEAYSEIGMKGERRRGKGHDGLYQGLSTATKDTYDALHMQALPPRRAKRSGSGATNFSLLKQAGDVEENPGPTSMDWIWRILFLVGAATGAHSGPQVQLQESGGGLAQAGGSLRLSCAASGRTFSMGWFRQAPGKEREFVAAITYSGGSPYYASSVRGRFTISRDNAKNTVYLQMNSLKPEDTAVYYCAANPTYGSDWNAENWGQGTQVTVSSGSGGGGSGGGGSGGGGSFEQVQLQQPGAELVKPGASVKMSCKASGYAFSSYWINWMKQKPGQGLEWIGQIYPGDGTENRFSVNFQKAAKSFSLKISDSQLGDAAMYFCAYRSAVNARLMFGDGTQLVVKPNTRIQNPDPAVYQLRDSKSSDKSVCLFTDFDSQTNVSQSKDSDVYITDKTVLDMRSMDFKSNSAVAWSNKSDFACANAFNNSIIPEDTFFPSPESSCGTQSFGLLDPKLCYLLDGILFIYGVILTALFLRVKFSRSADAPAYQQGQNQLYNELNLGRREEYDVLDKRRGRDPEMGGKPQRRKNPQEGLYNELQKDKMAEAYSEIGMKGERRRGKGHDGLYQGLSTATKDTYDALHMQALPPR

SEQ ID NO: 14203 - protein, 954 aa, Artificial Sequence
  Synthetic Polypeptide
MALPVTALLLPLALLLHAARPEADIYQTPRYLVIGTGKKITLECSQTMGHDKMYWYQQDPGMELHLIHYSYGVNSTEKGDLSSESTVSRIRTEHFPLTLESARPSHTSQYLCASSEARGLAEFTDTQYFGPGTRLTVLEDLKNVFPPEVAVFEPSKAEIAHTQKATLVCLATGFYPDHVELSWWVNGKEVHSGVCTDPQPLKEQPALNDSRYCLSSRLRVSATFWQNPRNHFRCQVQFYGLSENDEWTQDRAKPVTQIVSAEAWGRADCGSQSFGLLDPKLCYLLDGILFIYGVILTALFLRVKFSRSADAPAYQQGQNQLYNELNLGRREEYDVLDKRRGRDPEMGGKPQRRKNPQEGLYNELQKDKMAEAYSEIGMKGERRRGKGHDGLYQGLSTATKDTYDALHMQALPPRRAKRSGSGATNFSLLKQAGDVEENPGPTSMDWIWRILFLVGAATGAHSGPQVQLQESGGGLAQAGGSLRLSCAASGRTFSMGWFRQAPGKEREFVAAITYSGGSPYYASSVRGRFTISRDNAKNTVYLQMNSLKPEDTAVYYCAANPTYGSDWNAENWGQGTQVTVSSGSGGGGSGGGGSGGGGSFEQVQLQQPGAELVKPGASVKMSCKASGYAFSSYWINWMKQKPGQGLEWIGQIYPGDGTENRFSVNFQKAAKSFSLKISDSQLGDAAMYFCAYRSAVNARLMFGDGTQLVVKPNTRIQNPDPAVYQLRDSKSSDKSVCLFTDFDSQTNVSQSKDSDVYITDKCVLDMRSMDFKSNSAVAWSNKSDFACANAFNNSIIPEDTFFPSSDVPCGTQSFGLLDPKLCYLLDGILFIYGVILTALFLRVKFSRSADAPAYQQGQNQLYNELNLGRREEYDVLDKRRGRDPEMGGKPQRRKNPQEGLYNELQKDKMAEAYSEIGMKGERRRGKGHDGLYQGLSTATKDTYDALHMQALPPR

SEQ ID NO: 14204 - protein, 1025 aa, Artificial Sequence
  Synthetic Polypeptide
MALPVTALLLPLALLLHAARPEADIYQTPRYLVIGTGKKITLECSQTMGHDKMYWYQQDPGMELHLIHYSYGVNSTEKGDLSSESTVSRIRTEHFPLTLESARPSHTSQYLCASSEARGLAEFTDTQYFGPGTRLTVLEGKPIPNPLLGLDSTGSGEDLKNVFPPEVAVFEPSEAEISHTQKATLVCLATGFYPDHVELSWWVNGKEVHSGVSTDPQPLKEQPALNDSRYCLSSRLRVSATFWQNPRNHFRCQVQFYGLSENDEWTQDRAKPVTQIVSAEAWGRADCGSQSFGLLDPKLCYLLDGILFIYGVILTALFLRVKFSRSADAPAYQQGQNQLYNELNLGRREEYDVLDKRRGRDPEMGGKPQRRKNPQEGLYNELQKDKMAEAYSEIGMKGERRRGKGHDGLYQGLSTATKDTYDALHMQALPPRRAKRSGSGATNFSLLKQAGDVEENPGPTSMDWIWRILFLVGAATGAHSGPQVQLQESGGGLAQAGGSLRLSCAASGRTFSMGWFRQAPGKEREFVAAITYSGGSPYYASSVRGRFTISRDNAKNTVYLQMNSLKPEDTAVYYCAANPTYGSDWNAENWGQGTQVTVSSGSGGGGSGGGGSGGGGSFEQVQLQQPGAELVKPGASVKMSCKASGYAFSSYWINWMKQKPGQGLEWIGQIYPGDGTENRFSVNFQKAAKSFSLKISDSQLGDAAMYFCAYRSAVNARLMFGDGTQLVVKPNTREQKLISEEDGSGIQNPDPAVYQLRDSKSSDKSVCLFTDFDSQTNVSQSKDSDVYITDKTVLDMRSMDFKSNSAVAWSNKSDFACANAFNNSIIPEDTFFPSPESSCGTQSFGLLDPKLCYLLDGILFIYGVILTALFLRSKRSRLLHSDYMNMTPRRPGPTRKHYQPYAPPRDFAAYRSRVKFSRSADAPAYQQGQNQLYNELNLGRREEYDVLDKRRGRDPEMGGKPQRRKNPQEGLYNELQKDKMAEAYSEIGMKGERRRGKGHDGLYQGLSTATKDTYDALHMQALPPR

SEQ ID NO: 14205 - protein, 1066 aa, Artificial Sequence
  Synthetic Polypeptide
MALPVTALLLPLALLLHAARPEADIYQTPRYLVIGTGKKITLECSQTMGHDKMYWYQQDPGMELHLIHYSYGVNSTEKGDLSSESTVSRIRTEHFPLTLESARPSHTSQYLCASSEARGLAEFTDTQYFGPGTRLTVLEGKPIPNPLLGLDSTGSGEDLKNVFPPEVAVFEPSEAEISHTQKATLVCLATGFYPDHVELSWWVNGKEVHSGVSTDPQPLKEQPALNDSRYCLSSRLRVSATFWQNPRNHFRCQVQFYGLSENDEWTQDRAKPVTQIVSAEAWGRADCGSQSFGLLDPKLCYLLDGILFIYGVILTALFLRSKRSRLLHSDYMNMTPRRPGPTRKHYQPYAPPRDFAAYRSRVKFSRSADAPAYQQGQNQLYNELNLGRREEYDVLDKRRGRDPEMGGKPQRRKNPQEGLYNELQKDKMAEAYSEIGMKGERRRGKGHDGLYQGLSTATKDTYDALHMQALPPRRAKRSGSGATNFSLLKQAGDVEENPGPTSMDWIWRILFLVGAATGAHSGPQVQLQESGGGLAQAGGSLRLSCAASGRTFSMGWFRQAPGKEREFVAAITYSGGSPYYASSVRGRFTISRDNAKNTVYLQMNSLKPEDTAVYYCAANPTYGSDWNAENWGQGTQVTVSSGSGGGGSGGGGSGGGGSFEQVQLQQPGAELVKPGASVKMSCKASGYAFSSYWINWMKQKPGQGLEWIGQIYPGDGTENRFSVNFQKAAKSFSLKISDSQLGDAAMYFCAYRSAVNARLMFGDGTQLVVKPNTREQKLISEEDGSGIQNPDPAVYQLRDSKSSDKSVCLFTDFDSQTNVSQSKDSDVYITDKTVLDMRSMDFKSNSAVAWSNKSDFACANAFNNSIIPEDTFFPSPESSCGTQSFGLLDPKLCYLLDGILFIYGVILTALFLRSKRSRLLHSDYMNMTPRRPGPTRKHYQPYAPPRDFAAYRSRVKFSRSADAPAYQQGQNQLYNELNLGRREEYDVLDKRRGRDPEMGGKPQRRKNPQEGLYNELQKDKMAEAYSEIGMKGERRRGKGHDGLYQGLSTATKDTYDALHMQALPPR

SEQ ID NO: 14206 - protein, 1027 aa, Artificial Sequence
  Synthetic Polypeptide
MALPVTALLLPLALLLHAARPEADIYQTPRYLVIGTGKKITLECSQTMGHDKMYWYQQDPGMELHLIHYSYGVNSTEKGDLSSESTVSRIRTEHFPLTLESARPSHTSQYLCASSEARGLAEFTDTQYFGPGTRLTVLEGKPIPNPLLGLDSTGSGEDLKNVFPPEVAVFEPSEAEISHTQKATLVCLATGFYPDHVELSWWVNGKEVHSGVSTDPQPLKEQPALNDSRYCLSSRLRVSATFWQNPRNHFRCQVQFYGLSENDEWTQDRAKPVTQIVSAEAWGRADCGSQSFGLLDPKLCYLLDGILFIYGVILTALFLRVKFSRSADAPAYQQGQNQLYNELNLGRREEYDVLDKRRGRDPEMGGKPQRRKNPQEGLYNELQKDKMAEAYSEIGMKGERRRGKGHDGLYQGLSTATKDTYDALHMQALPPRRAKRSGSGATNFSLLKQAGDVEENPGPTSMDWIWRILFLVGAATGAHSGPQVQLQESGGGLAQAGGSLRLSCAASGRTFSMGWFRQAPGKEREFVAAITYSGGSPYYASSVRGRFTISRDNAKNTVYLQMNSLKPEDTAVYYCAANPTYGSDWNAENWGQGTQVTVSSGSGGGGSGGGGSGGGGSFEQVQLQQPGAELVKPGASVKMSCKASGYAFSSYWINWMKQKPGQGLEWIGQIYPGDGTENRFSVNFQKAAKSFSLKISDSQLGDAAMYFCAYRSAVNARLMFGDGTQLVVKPNTREQKLISEEDLGSGIQNPDPAVYQLRDSKSSDKSVCLFTDFDSQTNVSQSKDSDVYITDKTVLDMRSMDFKSNSAVAWSNKSDFACANAFNNSIIPEDTFFPSPESSCGTQSFGLLDPKLCYLLDGILFIYGVILTALFLKRGRKKLLYIFKQPFMRPVQTTQEEDGCSCRFPEEEEGGCELRVKFSRSADAPAYQQGQNQLYNELNLGRREEYDVLDKRRGRDPEMGGKPQRRKNPQEGLYNELQKDKMAEAYSEIGMKGERRRGKGHDGLYQGLSTATKDTYDALHMQALPPR

SEQ ID NO: 14207 - protein, 1069 aa, Artificial Sequence
  Synthetic Polypeptide
MALPVTALLLPLALLLHAARPEADIYQTPRYLVIGTGKKITLECSQTMGHDKMYWYQQDPGMELHLIHYSYGVNSTEKGDLSSESTVSRIRTEHFPLTLESARPSHTSQYLCASSEARGLAEFTDTQYFGPGTRLTVLEGKPIPNPLLGLDSTGSGEDLKNVFPPEVAVFEPSEAEISHTQKATLVCLATGFYPDHVELSWWVNGKEVHSGVSTDPQPLKEQPALNDSRYCLSSRLRVSATFWQNPRNHFRCQVQFYGLSENDEWTQDRAKPVTQIVSAEAWGRADCGSQSFGLLDPKLCYLLDGILFIYGVILTALFLKRGRKKLLYIFKQPFMRPVQTTQEEDGCSCRFPEEEEGGCELRVKFSRSADAPAYQQGQNQLYNELNLGRREEYDVLDKRRGRDPEMGGKPQRRKNPQEGLYNELQKDKMAEAYSEIGMKGERRRGKGHDGLYQGLSTATKDTYDALHMQALPPRRAKRSGSGATNFSLLKQAGDVEENPGPTSMDWIWRILFLVGAATGAHSGPQVQLQESGGGLAQAGGSLRLSCAASGRTFSMGWFRQAPGKEREFVAAITYSGGSPYYASSVRGRFTISRDNAKNTVYLQMNSLKPEDTAVYYCAANPTYGSDWNAENWGQGTQVTVSSGSGGGGSGGGGSGGGGSFEQVQLQQPGAELVKPGASVKMSCKASGYAFSSYWINWMKQKPGQGLEWIGQIYPGDGTENRFSVNFQKAAKSFSLKISDSQLGDAAMYFCAYRSAVNARLMFGDGTQLVVKPNTREQKLISEEDLGSGIQNPDPAVYQLRDSKSSDKSVCLFTDFDSQTNVSQSKDSDVYITDKTVLDMRSMDFKSNSAVAWSNKSDFACANAFNNSIIPEDTFFPSPESSCGTQSFGLLDPKLCYLLDGILFIYGVILTALFLKRGRKKLLYIFKQPFMRPVQTTQEEDGCSCRFPEEEEGGCELRVKFSRSADAPAYQQGQNQLYNELNLGRREEYDVLDKRRGRDPEMGGKPQRRKNPQEGLYNELQKDKMAEAYSEIGMKGERRRGKGHDGLYQGLSTATKDTYDALHMQALPPR

SEQ ID NO: 14208 - protein, 959 aa, Artificial Sequence
  Synthetic Polypeptide
MALPVTALLLPLALLLHAARPEADIYQTPRYLVIGTGKKITLECSQTMGHDKMYWYQQDPGMELHLIHYSYGVNSTEKGDLSSESTVSRIRTEHFPLTLESARPSHTSQYLCASSEARGLAEFTDTQYFGPGTRLTVLEQSFGLLDPKLCYLLDGILFIYGVILTALFLRVKFSRSADAPAYQQGQNQLYNELNLGRREEYDVLDKRRGRDPEMGGKPQRRKNPQEGLYNELQKDKMAEAYSEIGMKGERRRGKGHDGLYQGLSTATKDTYDALHMQALPPRRAKRSGSGATNFSLLKQAGDVEENPGPTSMDWIWRILFLVGAATGAHSGPQVQLQESGGGLAQAGGSLRLSCAASGRTFSMGWFRQAPGKEREFVAAITYSGGSPYYASSVRGRFTISRDNAKNTVYLQMNSLKPEDTAVYYCAANPTYGSDWNAENWGQGTQVTVSSGSGGGGSGGGGSGGGGSFEQVQLQQPGAELVKPGASVKMSCKASGYAFSSYWINWMKQKPGQGLEWIGQIYPGDGTENRFSVNFQKAAKSFSLKISDSQLGDAAMYFCAYRSAVNARLMFGDGTQLVVKPNTRQSFGLLDPKLCYLLDGILFIYGVILTALFLRVKFSRSADAPAYQQGQNQLYNELNLGRREEYDVLDKRRGRDPEMGGKPQRRKNPQEGLYNELQKDKMAEAYSEIGMKGERRRGKGHDGLYQGLSTATKDTYDALHMQALPPRRAKRSGSGVKQTLNFDLLKLAGDVESNPGPSRGHMTEYKPTVRLATRDDVPRAVRTLAAAFADYPATRHTVDPDRHIERVTELQELFLTRVGLDIGKVWVADDGAAVAVWTTPESVEAGAVFAEIGPRMAELSGSRLAAQQQMEGLLAPHRPKEPAWFLATVGVSPDHQGKGLGSAVVLPGVEAAERAGVPAFLETSAPRNLPFYERLGFTVTADVEVPEGPRTWCMTRKPGA

SEQ ID NO: 14209 - protein, 784 aa, Artificial Sequence
  Synthetic Polypeptide
MALPVTALLLPLALLLHAARPEADIYQTPRYLVIGTGKKITLECSQTMGHDKMYWYQQDPGMELHLIHYSYGVNSTEKGDLSSESTVSRIRTEHFPLTLESARPSHTSQYLCASSEARGLAEFTDTQYFGPGTRLTVLEGQPKANPTVTLFPPSSEELQANKATLVCLISDFYPGAVTVAWKADGSPVKAGVETTKPSKQSNNKYAASSYLSLTPEQWKSHRSYSCQVTHEGSTVEKTVAPTECSPIKTDVITMDPKDNCSKDANDTLLLQLTNTSAYYMYLLLLLKSVVYFAIITCCLLRRTAFCCNGEKSRAKRSGSGATNFSLLKQAGDVEENPGPTSMDWIWRILFLVGAATGAHSGPQVQLQESGGGLAQAGGSLRLSCAASGRTFSMGWFRQAPGKEREFVAAITYSGGSPYYASSVRGRFTISRDNAKNTVYLQMNSLKPEDTAVYYCAANPTYGSDWNAENWGQGTQVTVSSGSGGGGSGGGGSGGGGSFEQVQLQQPGAELVKPGASVKMSCKASGYAFSSYWINWMKQKPGQGLEWIGQIYPGDGTENRFSVNFQKAAKSFSLKISDSQLGDAAMYFCAYRSAVNARLMFGDGTQLVVKPNTRASTKGPSVFPLAPSSKSTSGGTAALGCLVKDYFPEPVTVSWNSGALTSGVHTFPAVLQSSGLYSLSSVVTVPSSSLGTQTYICNVNHKPSNTKVDKRVEPKSCEVKTDSTDHVKPKETENTKQPSKSCHKPKAIVHTEKVNMMSLTVLGLRMLFAKTVAVNFLLTAKLFFL

SEQ ID NO: 14210 - protein, 762 aa, Artificial Sequence
  Synthetic Polypeptide
MALPVTALLLPLALLLHAARPEADIYQTPRYLVIGTGKKITLECSQTMGHDKMYWYQQDPGMELHLIHYSYGVNSTEKGDLSSESTVSRIRTEHFPLTLESARPSHTSQYLCASSEARGLAEFTDTQYFGPGTRLTVLEGQPKANPTVTLFPPSSEELQANKATLVCLISDFYPGAVTVAWKADGSPVKAGVETTKPSKQSNNKYAASSYLSLTPEQWKSHRSYSCQVTHEGSTVEKTVAPTECSGRADCGITSASYHQGVLSATILYEILLGKATLYAVLVSALVLMAMVKRKDSRGRAKRSGSGATNFSLLKQAGDVEENPGPTSMDWIWRILFLVGAATGAHSGPQVQLQESGGGLAQAGGSLRLSCAASGRTFSMGWFRQAPGKEREFVAAITYSGGSPYYASSVRGRFTISRDNAKNTVYLQMNSLKPEDTAVYYCAANPTYGSDWNAENWGQGTQVTVSSGSGGGGSGGGGSGGGGSFEQVQLQQPGAELVKPGASVKMSCKASGYAFSSYWINWMKQKPGQGLEWIGQIYPGDGTENRFSVNFQKAAKSFSLKISDSQLGDAAMYFCAYRSAVNARLMFGDGTQLVVKPNTRASTKGPSVFPLAPSSKSTSGGTAALGCLVKDYFPEPVTVSWNSGALTSGVHTFPAVLQSSGLYSLSSVVTVPSSSLGTQTYICNVNHKPSNTKVDKRVEPKSCIPEDTFFPSSDVPCDVKLVEKSFETDTNLNFQNLSVIGFRILLLKVAGFNLLMTLRLWSS

SEQ ID NO: 14211 - protein, 762 aa, Artificial Sequence
  Synthetic Polypeptide
MALPVTALLLPLALLLHAARPEADIYQTPRYLVIGTGKKITLECSQTMGHDKMYWYQQDPGMELHLIHYSYGVNSTEKGDLSSESTVSRIRTEHFPLTLESARPSHTSQYLCASSEARGLAEFTDTQYFGPGTRLTVLEGQPKANPTVTLFPPSSEELQANKATLVCLISDFYPGAVTVAWKADGSPVKAGVETTKPSKQSNNKYAASSYLSLTPEQWKSHRSYSCQVTHEGSTVEKTVAPTECSGRADCGFTSESYQQGVLSATILYEILLGKATLYAVLVSALVLMAMVKRKDSRGRAKRSGSGATNFSLLKQAGDVEENPGPTSMDWIWRILFLVGAATGAHSGPQVQLQESGGGLAQAGGSLRLSCAASGRTFSMGWFRQAPGKEREFVAAITYSGGSPYYASSVRGRFTISRDNAKNTVYLQMNSLKPEDTAVYYCAANPTYGSDWNAENWGQGTQVTVSSGSGGGGSGGGGSGGGGSFEQVQLQQPGAELVKPGASVKMSCKASGYAFSSYWINWMKQKPGQGLEWIGQIYPGDGTENRFSVNFQKAAKSFSLKISDSQLGDAAMYFCAYRSAVNARLMFGDGTQLVVKPNTRASTKGPSVFPLAPSSKSTSGGTAALGCLVKDYFPEPVTVSWNSGALTSGVHTFPAVLQSSGLYSLSSVVTVPSSSLGTQTYICNVNHKPSNTKVDKRVEPKSCIPEDTFFPSPESSCDVKLVEKSFETDTNLNFQNLSVIGFRILLLKVAGFNLLMTLRLWSS

SEQ ID NO: 14212 - protein, 592 aa, Artificial Sequence
  Synthetic Polypeptide
MDWIWRILFLVGAATGAHSGPQVQLQESGGGLAQAGGSLRLSCAASGRTFSMGWFRQAPGKEREFVAAITYSGGSPYYASSVRGRFTISRDNAKNTVYLQMNSLKPEDTAVYYCAANPTYGSDWNAENWGQGTQVTVSSGSGGGGSGGGGSGGGGSFEQVQLQQPGAELVKPGASVKMSCKASGYAFSSYWINWMKQKPGQGLEWIGQIYPGDGTENRFSVNFQKAAKSFSLKISDSQLGDAAMYFCAYRSAVNARLMFGDGTQLVVKPNGGGGSGGGGSGGGGSEADIYQTPRYLVIGTGKKITLECSQTMGHDKMYWYQQDPGMELHLIHYSYGVNSTEKGDLSSESTVSRIRTEHFPLTLESARPSHTSQYLCASSEARGLAEFTDTQYFGPGTRLTVTRGGGSDGNEEMGGITQTPYKVSISGTTVILTCPQYPGSEILWQHNDKNIGGDEDDKNIGSDEDHLSLKEFSELEQSGYYVCYPRGSKPEDANFYLYLRARVCENCMEMDVMSVATIVIVDICITGGLLLLVYYWSKNRKAKAKPVTRGAGAGGRQRGQNKERPPPVPNPDYEPIRKGQRDLYSGLNQRRI

SEQ ID NO: 14213 - protein, 557 aa, Artificial Sequence
  Synthetic Polypeptide
MDWIWRILFLVGAATGAHSGPQVQLQESGGGLAQAGGSLRLSCAASGRTFSMGWFRQAPGKEREFVAAITYSGGSPYYASSVRGRFTISRDNAKNTVYLQMNSLKPEDTAVYYCAANPTYGSDWNAENWGQGTQVTVSSGSGGGGSGGGGSGGGGSFEQVQLQQPGAELVKPGASVKMSCKASGYAFSSYWINWMKQKPGQGLEWIGQIYPGDGTENRFSVNFQKAAKSFSLKISDSQLGDAAMYFCAYRSAVNARLMFGDGTQLVVKPNGGGGSGGGGSGGGGSEADIYQTPRYLVIGTGKKITLECSQTMGHDKMYWYQQDPGMELHLIHYSYGVNSTEKGDLSSESTVSRIRTEHFPLTLESARPSHTSQYLCASSEARGLAEFTDTQYFGPGTRLTVTRGGGSFKIPIEELEDRVFVNCNTSITWVEGTVGTLLSDITRLDLGKRILDPRGIYRCNGTDIYKDKESTVQVHYRMCQSCVELDPATVAGIIVTDVIATLLLALGVFCFAGHETGRLSGAADTQALLRNDQVYQPLRDRDDAQYSHLGGNWARNK

SEQ ID NO: 14214 - protein, 567 aa, Artificial Sequence
  Synthetic Polypeptide
MDWIWRILFLVGAATGAHSGPQVQLQESGGGLAQAGGSLRLSCAASGRTFSMGWFRQAPGKEREFVAAITYSGGSPYYASSVRGRFTISRDNAKNTVYLQMNSLKPEDTAVYYCAANPTYGSDWNAENWGQGTQVTVSSGSGGGGSGGGGSGGGGSFEQVQLQQPGAELVKPGASVKMSCKASGYAFSSYWINWMKQKPGQGLEWIGQIYPGDGTENRFSVNFQKAAKSFSLKISDSQLGDAAMYFCAYRSAVNARLMFGDGTQLVVKPNGGGGSGGGGSGGGGSEADIYQTPRYLVIGTGKKITLECSQTMGHDKMYWYQQDPGMELHLIHYSYGVNSTEKGDLSSESTVSRIRTEHFPLTLESARPSHTSQYLCASSEARGLAEFTDTQYFGPGTRLTVTRGGGSQSIKGNHLVKVYDYQEDGSVLLTCDAEAKNITWFKDGKMIGFLTEDKKKWNLGSNAKDPRGMYQCKGSQNKSKPLQVYYRMCQNCIELNAATISGFLFAEIVSIFVLAVGVYFIAGQDGVRQSRASDKQTLLPNDQLYQPLKDREDDQYSHLQGNQLRRN

SEQ ID NO: 14215 - protein, 550 aa, Artificial Sequence
  Synthetic Polypeptide
MDWIWRILFLVGAATGAHSGPQVQLQESGGGLAQAGGSLRLSCAASGRTFSMGWFRQAPGKEREFVAAITYSGGSPYYASSVRGRFTISRDNAKNTVYLQMNSLKPEDTAVYYCAANPTYGSDWNAENWGQGTQVTVSSGSGGGGSGGGGSGGGGSFEQVQLQQPGAELVKPGASVKMSCKASGYAFSSYWINWMKQKPGQGLEWIGQIYPGDGTENRFSVNFQKAAKSFSLKISDSQLGDAAMYFCAYRSAVNARLMFGDGTQLVVKPNGGGGSGGGGSGGGGSEADIYQTPRYLVIGTGKKITLECSQTMGHDKMYWYQQDPGMELHLIHYSYGVNSTEKGDLSSESTVSRIRTEHFPLTLESARPSHTSQYLCASSEARGLAEFTDTQYFGPGTRLTVTRGGGSQSFGLLDPKLCYLLDGILFIYGVILTALFLRVKFSRSADAPAYQQGQNQLYNELNLGRREEYDVLDKRRGRDPEMGGKPQRRKNPQEGLYNELQKDKMAEAYSEIGMKGERRRGKGHDGLYQGLSTATKDTYDALHMQALPPR

SEQ ID NO: 14216 - protein, 578 aa, Artificial Sequence
  Synthetic Polypeptide
MDWIWRILFLVGAATGAHSGPQVQLQESGGGLAQAGGSLRLSCAASGRTFSMGWFRQAPGKEREFVAAITYSGGSPYYASSVRGRFTISRDNAKNTVYLQMNSLKPEDTAVYYCAANPTYGSDWNAENWGQGTQVTVSSGSGGGGSGGGGSGGGGSFEQVQLQQPGAELVKPGASVKMSCKASGYAFSSYWINWMKQKPGQGLEWIGQIYPGDGTENRFSVNFQKAAKSFSLKISDSQLGDAAMYFCAYRSAVNARLMFGDGTQLVVKPNTRIQNPDPAVYQLRDSKSSDKSVCLFTDFDSQTNVSQSKDSDVYITDKTVLDMRSMDFKSNSAVAWSNKSDFACANAFNNSIIPEDTFFPSPESSCDVKLVEKSFETDTNLNFQNLSVIGFRILLLKVAGFNLLMTLRLWSSRAKRSGSGVKQTLNFDLLKLAGDVESNPGPSRGHMAKPLSQEESTLIERATATINSIPISEDYSVASAALSSDGRIFTGVNVYHFTGGPCAELVVLGTAAAAAAGNLTCIVAIGNENRGILSPCGRCRQVLLDLHPGIKAIVKDSDGQPTAVGIRELLPSGYVWEG

SEQ ID NO: 14217 - protein, 412 aa, Artificial Sequence
  Synthetic Polypeptide
MDWIWRILFLVGAATGAHSGPQVQLQESGGGLAQAGGSLRLSCAASGRTFSMGWFRQAPGKEREFVAAITYSGGSPYYASSVRGRFTISRDNAKNTVYLQMNSLKPEDTAVYYCAANPTYGSDWNAENWGQGTQVTVSSGSGGGGSGGGGSGGGGSFEQVQLQQPGAELVKPGASVKMSCKASGYAFSSYWINWMKQKPGQGLEWIGQIYPGDGTENRFSVNFQKAAKSFSLKISDSQLGDAAMYFCAYRSAVNARLMFGDGTQLVVKPNTRIQNPDPAVYQLRDSKSSDKSVCLFTDFDSQTNVSQSKDSDVYITDKTVLDMRSMDFKSNSAVAWSNKSDFACANAFNNSIIPEDTFFPSPESSCDVKLVEKSFETDTNLNFQNLSVIGFRILLLKVAGFNLLMTLRLWSS

SEQ ID NO: 14218 - protein, 590 aa, Artificial Sequence
  Synthetic Polypeptide
MDWIWRILFLVGAATGAHSGPQVQLQESGGGLAQAGGSLRLSCAASGRTFSMGWFRQAPGKEREFVAAITYSGGSPYYASSVRGRFTISRDNAKNTVYLQMNSLKPEDTAVYYCAANPTYGSDWNAENWGQGTQVTVSSGSGGGGSGGGGSGGGGSFEQVQLQQPGAELVKPGASVKMSCKASGYAFSSYWINWMKQKPGQGLEWIGQIYPGDGTENRFSVNFQKAAKSFSLKISDSQLGDAAMYFCAYRSAVNARLMFGDGTQLVVKPNTREQKLISEEDGSGIQNPDPAVYQLRDSKSSDKSVCLFTDFDSQTNVSQSKDSDVYITDKCVLDMRSMDFKSNSAVAWSNKSDFACANAFNNSIIPEDTFFPSPESSCDVKLVEKSFETDTNLNFQNLSVIGFRILLLKVAGFNLLMTLRLWSSRAKRSGSGVKQTLNFDLLKLAGDVESNPGPSRGHMAKPLSQEESTLIERATATINSIPISEDYSVASAALSSDGRIFTGVNVYHFTGGPCAELVVLGTAAAAAAGNLTCIVAIGNENRGILSPCGRCRQVLLDLHPGIKAIVKDSDGQPTAVGIRELLPSGYVWEG

SEQ ID NO: 14219 - protein, 424 aa, Artificial Sequence
  Synthetic Polypeptide
MDWIWRILFLVGAATGAHSGPQVQLQESGGGLAQAGGSLRLSCAASGRTFSMGWFRQAPGKEREFVAAITYSGGSPYYASSVRGRFTISRDNAKNTVYLQMNSLKPEDTAVYYCAANPTYGSDWNAENWGQGTQVTVSSGSGGGGSGGGGSGGGGSFEQVQLQQPGAELVKPGASVKMSCKASGYAFSSYWINWMKQKPGQGLEWIGQIYPGDGTENRFSVNFQKAAKSFSLKISDSQLGDAAMYFCAYRSAVNARLMFGDGTQLVVKPNTREQKLISEEDGSGIQNPDPAVYQLRDSKSSDKSVCLFTDFDSQTNVSQSKDSDVYITDKCVLDMRSMDFKSNSAVAWSNKSDFACANAFNNSIIPEDTFFPSPESSCDVKLVEKSFETDTNLNFQNLSVIGFRILLLKVAGFNLLMTLRLWSS

SEQ ID NO: 14220 - protein, 640 aa, Artificial Sequence
  Synthetic Polypeptide
MALPVTALLLPLALLLHAARPACQVQLVESGGGLVQAGDSVTLSCTASGRTFSSYALAWFRQRPGKEREFVAGLRWGGPTNYADSVKDRFTISGDSAKHTMYLQMNSLKPEDTAVYYCGYNPGGWAVPSQYEYDSWGQGTQVTVSSGTGGGGSGGGGSGGGGSEFEADIYQTPRYLVIGTGKKITLECSQTMGHDKMYWYQQDPGMELHLIHYSYGVNSTEKGDLSSESTVSRIRTEHFPLTLESARPSHTSQYLCASSEARGLAEFTDTQYFGPGTRLTVGGGGSGGGGSGGGGSQVQLQQPGAELVKPGASVKMSCKASGYAFSSYWINWMKQKPGQGLEWIGQIYPGDGTENRFSVNFQKAAKSFSLKISDSQLGDAAMYFCAYRSAVNARLMFGDGTQLVVKPNTREQKLISEEDLKIEVMYPPPYLDNEKSNGTIIHVKGKHLCPSPLFPGPSKPFWVLVVVGGVLACYSLLVTVAFIIFWVRSKRSRLLHSDYMNMTPRRPGPTRKHYQPYAPPRDFAAYRSRVKFSRSADAPAYQQGQNQLYNELNLGRREEYDVLDKRRGRDPEMGGKPRRKNPQEGLYNELQKDKMAEAYSEIGMKGERRRGKGHDGLYQGLSTATKDTYDALHMQALPPR

SEQ ID NO: 14221 - protein, 646 aa, Artificial Sequence
  Synthetic Polypeptide
MALPVTALLLPLALLLHAARPACQVQLVESGGGLVQAGDSVTLSCTASGRTFSSYALAWFRQRPGKEREFVAGLRWGGPTNYADSVKDRFTISGDSAKHTMYLQMNSLKPEDTAVYYCGYNPGGWAVPSQYEYDSWGQGTQVTVSSGTGGGGSGGGGSGGGGSEFEADIYQTPRYLVIGTGKKITLECSQTMGHDKMYWYQQDPGMELHLIHYSYGVNSTEKGDLSSESTVSRIRTEHFPLTLESARPSHTSQYLCASSEARGLAEFTDTQYFGPGTRLTVGGGGSGGGGSGGGGSQVQLQQPGAELVKPGASVKMSCKASGYAFSSYWINWMKQKPGQGLEWIGQIYPGDGTENRFSVNFQKAAKSFSLKISDSQLGDAAMYFCAYRSAVNARLMFGDGTQLVVKPNTREQKLISEEDLAKPTTTPAPRPPTPAPTIASQPLSLRPEACRPAAGGAVHTRGLDFACDIYIWAPLAGTCGVLLLSLVITLYCKRGRKKLLYIFKQPFMRPVQTTQEEDGCSCRFPEEEEGGCELRVKFSRSADAPAYQQGQNQLYNELNLGRREEYDVLDKRRGRDPEMGGKPRRKNPQEGLYNELQKDKMAEAYSEIGMKGERRRGKGHDGLYQGLSTATKDTYDALHMQALPPR

SEQ ID NO: 14222 - protein, 1059 aa, Artificial Sequence
  Synthetic Polypeptide
MALPVTALLLPLALLLHAARPACQVQLVESGGGLVQAGDSVTLSCTASGRTFSSYALAWFRQRPGKEREFVAGLRWGGPTNYADSVKDRFTISGDSAKHTMYLQMNSLKPEDTAVYYCGYNPGGWAVPSQYEYDSWGQGTQVTVSSGTGGGGSGGGGSGGGGSEFEADIYQTPRYLVIGTGKKITLECSQTMGHDKMYWYQQDPGMELHLIHYSYGVNSTEKGDLSSESTVSRIRTEHFPLTLESARPSHTSQYLCASSEARGLAEFTDTQYFGPGTRLTVGGGGSGGGGSGGGGSQVQLQQPGAELVKPGASVKMSCKASGYAFSSYWINWMKQKPGQGLEWIGQIYPGDGTENRFSVNFQKAAKSFSLKISDSQLGDAAMYFCAYRSAVNARLMFGDGTQLVVKPNTREQKLISEEDLAKPTTTPAPRPPTPAPTIASQPLSLRPEACRPAAGGAVHTRGLDFACDIYIWAPLAGTCGVLLLSLVITLYCGRARVKFSRSADAPAYQQGQNQLYNELNLGRREEYDVLDKRRGRDPEMGGKPRRKNPQEGLYNELQKDKMAEAYSEIGMKGERRRGKGHDGLYQGLSTATKDTYDALHMQALPPRSRGSGATNFSLLKQAGDVEENPGPGIHMATYEVLCEVARKLGTDDREVVLFLLNVFIPQPTLAQLIGALRALKEEGRLTFPLLAECLFRAGRRDLLRDLLHLDPRFLERHLAGTMSYFSPYQLTVLHVDGELCARDIRSLIFLSKDTIGSRSTPQTFLHWVYCMENLDLLGPTDVDALMSMLRSLSRVDLQRQVQTLMGLHLSGPSHSQHYRHTPLETDFYDYKDDDDKTSGSGEGRGSLLTCGDVEENPGPHMTEYKPTVRLATRDDVPRAVRTLAAAFADYPATRHTVDPDRHIERVTELQELFLTRVGLDIGKVWVADDGAAVAVWTTPESVEAGAVFAEIGPRMAELSGSRLAAQQQMEGLLAPHRPKEPAWFLATVGVSPDHQGKGLGSAVVLPGVEAAERAGVPAFLETSAPRNLPFYERLGFTVTADVEVPEGPRTWCMTRKPGA

SEQ ID NO: 14223 - protein, 999 aa, Artificial Sequence
  Synthetic Polypeptide
MALPVTALLLPLALLLHAARPACQVQLVESGGGLVQAGDSVTLSCTASGRTFSSYALAWFRQRPGKEREFVAGLRWGGPTNYADSVKDRFTISGDSAKHTMYLQMNSLKPEDTAVYYCGYNPGGWAVPSQYEYDSWGQGTQVTVSSGTGGGGSGGGGSGGGGSEFEADIYQTPRYLVIGTGKKITLECSQTMGHDKMYWYQQDPGMELHLIHYSYGVNSTEKGDLSSESTVSRIRTEHFPLTLESARPSHTSQYLCASSEARGLAEFTDTQYFGPGTRLTVLEIQNPDPAVYQLRDSKSSDKSVCLFTDFDSQTNVSQSKDSDVYITDKCVLDMRSMDFKSNSAVAWSNKSDFACANAFNNSIIPEDTFFPSSDVPCDVKLVEKSFETDTNLNFQNLSVIGFRILLLKVAGFNLLMTLRLWSSRAKRSGSGVKQTLNFDLLKLAGDVESNPGPTSMDWIWRILFLVGAATGAHSFEQVQLQQPGAELVKPGASVKMSCKASGYAFSSYWINWMKQKPGQGLEWIGQIYPGDGTENRFSVNFQKAAKSFSLKISDSQLGDAAMYFCAYRSAVNARLMFGDGTQLVVKPNTREDLKNVFPPEVAVFEPSKAEIAHTQKATLVCLATGFYPDHVELSWWVNGKEVHSGVCTDPQPLKEQPALNDSRYCLSSRLRVSATFWQNPRNHFRCQVQFYGLSENDEWTQDRAKPVTQIVSAEAWGRADCGITSASYHQGVLSATILYEILLGKATLYAVLVSALVLMAMVKRKDSRGRAKRSGSGATNFSLLKQAGDVEENPGPSRGHMTEYKPTVRLATRDDVPRAVRTLAAAFADYPATRHTVDPDRHIERVTELQELFLTRVGLDIGKVWVADDGAAVAVWTTPESVEAGAVFAEIGPRMAELSGSRLAAQQQMEGLLAPHRPKEPAWFLATVGVSPDHQGKGLGSAVVLPGVEAAERAGVPAFLETSAPRNLPFYERLGFTVTADVEVPEGPRTWCMTRKPGA

SEQ ID NO: 14224 - protein, 998 aa, Artificial Sequence
  Synthetic Polypeptide
MALPVTALLLPLALLLHAARPACQVQLVESGGGLVQAGDSVTLSCTASGRTFSSYALAWFRQRPGKEREFVAGLRWGGPTNYADSVKDRFTISGDSAKHTMYLQMNSLKPEDTAVYYCGYNPGGWAVPSQYEYDSWGQGTQVTVSSGTGGGGSGGGGSGGGGSEFEADIYQTPRYLVIGTGKKITLECSQTMGHDKMYWYQQDPGMELHLIHYSYGVNSTEKGDLSSESTVSRIRTEHFPLTLESARPSHTSQYLCASSEARGLAEFTDTQYFGPGTRLTVLEDLKNVFPPEVAVFEPSKAEIAHTQKATLVCLATGFYPDHVELSWWVNGKEVHSGVCTDPQPLKEQPALNDSRYCLSSRLRVSATFWQNPRNHFRCQVQFYGLSENDEWTQDRAKPVTQIVSAEAWGRADCGITSASYHQGVLSATILYEILLGKATLYAVLVSALVLMAMVKRKDSRGRAKRSGSGATNFSLLKQAGDVEENPGPTSMDWIWRILFLVGAATGAHSFEQVQLQQPGAELVKPGASVKMSCKASGYAFSSYWINWMKQKPGQGLEWIGQIYPGDGTENRFSVNFQKAAKSFSLKISDSQLGDAAMYFCAYRSAVNARLMFGDGTQLVVKPNTRIQNPDPAVYQLRDSKSSDKSVCLFTDFDSQTNVSQSKDSDVYITDKCVLDMRSMDFKSNSAVAWSNKSDFACANAFNNSIIPEDTFFPSSDVPCDVKLVEKSFETDTNLNFQNLSVIGFRILLLKVAGFNLLMTLRLWSSRAKRSGSGVKQTLNFDLLKLAGDVESNPGPSRGHMTEYKPTVRLATRDDVPRAVRTLAAAFADYPATRHTVDPDRHIERVTELQELFLTRVGLDIGKVWVADDGAAVAVWTTPESVEAGAVFAEIGPRMAELSGSRLAAQQQMEGLLAPHRPKEPAWFLATVGVSPDHQGKGLGSAVVLPGVEAAERAGVPAFLETSAPRNLPFYERLGFTVTADVEVPEGPRTWCMTRKPGA

SEQ ID NO: 14225 - protein, 765 aa, Artificial Sequence
  Synthetic Polypeptide
MALPVTALLLPLALLLHAARPACQVQLVESGGGLVQAGDSVTLSCTASGRTFSSYALAWFRQRPGKEREFVAGLRWGGPTNYADSVKDRFTISGDSAKHTMYLQMNSLKPEDTAVYYCGYNPGGWAVPSQYEYDSWGQGTQVTVSSGTGGGGSGGGGSGGGGSEFEADIYQTPRYLVIGTGKKITLECSQTMGHDKMYWYQQDPGMELHLIHYSYGVNSTEKGDLSSESTVSRIRTEHFPLTLESARPSHTSQYLCASSEARGLAEFTDTQYFGPGTRLTVLEDLKNVFPPEVAVFEPSEAEISHTQKATLVCLATGFYPDHVELSWWVNGKEVHSGVCTDPQPLKEQPALNDSRYCLSSRLRVSATFWQNPRNHFRCQVQFYGLSENDEWTQDRAKPVTQIVSAEAWGRADCGFTSESYQQGVLSATILYEILLGKATLYAVLVSALVLMAMVKRKDSRGRAKRSGSGATNFSLLKQAGDVEENPGPTSMDWIWRILFLVGAATGAHSFEQVQLQQPGAELVKPGASVKMSCKASGYAFSSYWINWMKQKPGQGLEWIGQIYPGDGTENRFSVNFQKAAKSFSLKISDSQLGDAAMYFCAYRSAVNARLMFGDGTQLVVKPNTRIQNPDPAVYQLRDSKSSDKSVCLFTDFDSQTNVSQSKDSDVYITDKCVLDMRSMDFKSNSAVAWSNKSDFACANAFNNSIIPEDTFFPSPESSCDVKLVEKSFETDTNLNFQNLSVIGFRILLLKVAGFNLLMTLRLWSS

SEQ ID NO: 14226 - protein, 990 aa, Artificial Sequence
  Synthetic Polypeptide
MALPVTALLLPLALLLHAARPACQVQLVESGGGLVQAGDSVTLSCTASGRTFSSYALAWFRQRPGKEREFVAGLRWGGPTNYADSVKDRFTISGDSAKHTMYLQMNSLKPEDTAVYYCGYNPGGWAVPSQYEYDSWGQGTQVTVSSGTGGGGSGGGGSGGGGSEFEADIYQTPRYLVIGTGKKITLECSQTMGHDKMYWYQQDPGMELHLIHYSYGVNSTEKGDLSSESTVSRIRTEHFPLTLESARPSHTSQYLCASSEARGLAEFTDTQYFGPGTRLTVLEDLKNVFPPEVAVFEPSEAEISHTQKATLVCLATGFYPDHVELSWWVNGKEVHSGVCTDPQPLKEQPALNDSRYCLSSRLRVSATFWQNPRNHFRCQVQFYGLSENDEWTQDRAKPVTQIVSAEAWGRADCGFTSESYQQGVLSATILYEILLGKATLYAVLVSALVLMAMVKRKDSRGRAKRSGSGATNFSLLKQAGDVEENPGPTSMDWIWRILFLVGAATGAHSFEQVQLQQPGAELVKPGASVKMSCKASGYAFSSYWINWMKQKPGQGLEWIGQIYPGDGTENRFSVNFQKAAKSFSLKISDSQLGDAAMYFCAYRSAVNARLMFGDGTQLVVKPNTRIQNPDPAVYQLRDSKSSDKSVCLFTDFDSQTNVSQSKDSDVYITDKCVLDMRSMDFKSNSAVAWSNKSDFACANAFNNSIIPEDTFFPSPESSCDVKLVEKSFETDTNLNFQNLSVIGFRILLLKVAGFNLLMTLRLWSSRAKRSGSGVKQTLNFDLLKLAGDVESNPGPSRGGIHTMATYEVLCEVARKLGTDDREVVLFLLNVFIPQPTLAQLIGALRALKEEGRLTFPLLAECLFRAGRRDLLRDLLHLDPRFLERHLAGTMSYFSPYQLTVLHVDGELCARDIRSLIFLSKDTIGSRSTPQTFLHWVYCMENLDLLGPTDVDALMSMLRSLSRVDLQRQVQTLMGLHLSGPSHSQHYRHTP

SEQ ID NO: 14227 - protein, 769 aa, Artificial Sequence
  Synthetic Polypeptide
MALPVTALLLPLALLLHAARPACQVQLVESGGGLVQAGDSVTLSCTASGRTFSSYALAWFRQRPGKEREFVAGLRWGGPTNYADSVKDRFTISGDSAKHTMYLQMNSLKPEDTAVYYCGYNPGGWAVPSQYEYDSWGQGTQVTVSSGTGGGGSGGGGSGGGGSEFEADIYQTPRYLVIGTGKKITLECSQTMGHDKMYWYQQDPGMELHLIHYSYGVNSTEKGDLSSESTVSRIRTEHFPLTLESARPSHTSQYLCASSEARGLAEFTDTQYFGPGTRLTVLEIQNPDPAVYQLRDSKSSDKSVCLFTDFDSQTNVSQSKDSDVYITDKCVLDMRSMDFKSNSAVAWSNKSDFACANAFNNSIIPEDTFFPSPESSCDVKLVEKSFETDTNLNFQNLSVIGFRILLLKVAGFNLLMTLRLWSSRAKRSGSGVKQTLNFDLLKLAGDVESNPGPTSMDWIWRILFLVGAATGAHSFEQVQLQQPGAELVKPGASVKMSCKASGYAFSSYWINWMKQKPGQGLEWIGQIYPGDGTENRFSVNFQKAAKSFSLKISDSQLGDAAMYFCAYRSAVNARLMFGDGTQLVVKPNTREDLKNVFPPEVAVFEPSEAEISHTQKATLVCLATGFYPDHVELSWWVNGKEVHSGVCTDPQPLKEQPALNDSRYCLSSRLRVSATFWQNPRNHFRCQVQFYGLSENDEWTQDRAKPVTQIVSAEAWGRADCGFTSESYQQGVLSATILYEILLGKATLYAVLVSALVLMAMVKRKDSRG

SEQ ID NO: 14228 - protein, 991 aa, Artificial Sequence
  Synthetic Polypeptide
MALPVTALLLPLALLLHAARPACQVQLVESGGGLVQAGDSVTLSCTASGRTFSSYALAWFRQRPGKEREFVAGLRWGGPTNYADSVKDRFTISGDSAKHTMYLQMNSLKPEDTAVYYCGYNPGGWAVPSQYEYDSWGQGTQVTVSSGTGGGGSGGGGSGGGGSEFEADIYQTPRYLVIGTGKKITLECSQTMGHDKMYWYQQDPGMELHLIHYSYGVNSTEKGDLSSESTVSRIRTEHFPLTLESARPSHTSQYLCASSEARGLAEFTDTQYFGPGTRLTVLEIQNPDPAVYQLRDSKSSDKSVCLFTDFDSQTNVSQSKDSDVYITDKCVLDMRSMDFKSNSAVAWSNKSDFACANAFNNSIIPEDTFFPSPESSCDVKLVEKSFETDTNLNFQNLSVIGFRILLLKVAGFNLLMTLRLWSSRAKRSGSGVKQTLNFDLLKLAGDVESNPGPTSMDWIWRILFLVGAATGAHSFEQVQLQQPGAELVKPGASVKMSCKASGYAFSSYWINWMKQKPGQGLEWIGQIYPGDGTENRFSVNFQKAAKSFSLKISDSQLGDAAMYFCAYRSAVNARLMFGDGTQLVVKPNTREDLKNVFPPEVAVFEPSEAEISHTQKATLVCLATGFYPDHVELSWWVNGKEVHSGVCTDPQPLKEQPALNDSRYCLSSRLRVSATFWQNPRNHFRCQVQFYGLSENDEWTQDRAKPVTQIVSAEAWGRADCGFTSESYQQGVLSATILYEILLGKATLYAVLVSALVLMAMVKRKDSRGRAKRSGSGATNFSLLKQAGDVEENPGPSRGGIHTMATYEVLCEVARKLGTDDREVVLFLLNVFIPQPTLAQLIGALRALKEEGRLTFPLLAECLFRAGRRDLLRDLLHLDPRFLERHLAGTMSYFSPYQLTVLHVDGELCARDIRSLIFLSKDTIGSRSTPQTFLHWVYCMENLDLLGPTDVDALMSMLRSLSRVDLQRQVQTLMGLHLSGPSHSQHYRHTP

SEQ ID NO: 14229 - protein, 1043 aa, Artificial Sequence
  Synthetic Polypeptide
MALPVTALLLPLALLLHAARPLEGKPIPNPLLGLDSTGSGEDLKNVFPPEVAVFEPSKAEIAHTQKATLVCLATGFYPDHVELSWWVNGKEVHSGVCTDPQPLKEQPALNDSRYCLSSRLRVSATFWQNPRNHFRCQVQFYGLSENDEWTQDRAKPVTQIVSAEAWGRADCGITSASYHQGVLSATILYEILLGKATLYAVLVSALVLMAMVKRKDSRGRAKRSGSGATNFSLLKQAGDVEENPGPTSMALPVTALLLPLALLLHAARPACQVQLVESGGGLVQAGDSVTLSCTASGRTFSSYALAWFRQRPGKEREFVAGLRWGGPTNYADSVKDRFTISGDSAKHTMYLQMNSLKPEDTAVYYCGYNPGGWAVPSQYEYDSWGQGTQVTVSSGTGGGGSGGGGSGGGGSEFEADIYQTPRYLVIGTGKKITLECSQTMGHDKMYWYQQDPGMELHLIHYSYGVNSTEKGDLSSESTVSRIRTEHFPLTLESARPSHTSQYLCASSEARGLAEFTDTQYFGPGTRLTVGGGGSGGGGSGGGGSQVQLQQPGAELVKPGASVKMSCKASGYAFSSYWINWMKQKPGQGLEWIGQIYPGDGTENRFSVNFQKAAKSFSLKISDSQLGDAAMYFCAYRSAVNARLMFGDGTQLVVKPNTREQKLISEEDGSGIQNPDPAVYQLRDSKSSDKSVCLFTDFDSQTNVSQSKDSDVYITDKCVLDMRSMDFKSNSAVAWSNKSDFACANAFNNSIIPEDTFFPSSDVPCDVKLVEKSFETDTNLNFQNLSVIGFRILLLKVAGFNLLMTLRLWSSRAKRSGSGVKQTLNFDLLKLAGDVESNPGPSRGHMTEYKPTVRLATRDDVPRAVRTLAAAFADYPATRHTVDPDRHIERVTELQELFLTRVGLDIGKVWVADDGAAVAVWTTPESVEAGAVFAEIGPRMAELSGSRLAAQQQMEGLLAPHRPKEPAWFLATVGVSPDHQGKGLGSAVVLPGVEAAERAGVPAFLETSAPRNLPFYERLGFTVTADVEVPEGPRTWCMTRKPGA

SEQ ID NO: 14230 - protein, 1044 aa, Artificial Sequence
  Synthetic Polypeptide
MALPVTALLLPLALLLHAARPLEQKLISEEDLGSGDRPDPAVYQLRDSKSSDKSVCLFTDFDSQTNVSQSKDSDVYITDKCVLDMRSMDFKSNSAVAWSNKSDFACANAFNNSIIPEDTFFPSPESSCDVKLVEKSFETDTNLNFQNLSVIGFRILLLKVAGFNLLMTLRLWSSSSRAKRSGSGVKQTLNFDLLKLAGDVESNPGPTSMALPVTALLLPLALLLHAARPACQVQLVESGGGLVQAGDSVTLSCTASGRTFSSYALAWFRQRPGKEREFVAGLRWGGPTNYADSVKDRFTISGDSAKHTMYLQMNSLKPEDTAVYYCGYNPGGWAVPSQYEYDSWGQGTQVTVSSGTGGGGSGGGGSGGGGSEFEADIYQTPRYLVIGTGKKITLECSQTMGHDKMYWYQQDPGMELHLIHYSYGVNSTEKGDLSSESTVSRIRTEHFPLTLESARPSHTSQYLCASSEARGLAEFTDTQYFGPGTRLTVGGGGSGGGGSGGGGSQVQLQQPGAELVKPGASVKMSCKASGYAFSSYWINWMKQKPGQGLEWIGQIYPGDGTENRFSVNFQKAAKSFSLKISDSQLGDAAMYFCAYRSAVNARLMFGDGTQLVVKPNTRGKPIPNPLLGLDSTGSGEDLKNVFPPEVAVFEPSEAEISHTQKATLVCLATGFYPDHVELSWWVNGKEVHSGVCTDPQPLKEQPALNDSRYCLSSRLRVSATFWQNPRNHFRCQVQFYGLSENDEWTQDRAKPVTQIVSAEAWGRADCGFTSESYQQGVLSATILYEILLGKATLYAVLVSALVLMAMVKRKDSRGRAKRSGSGATNFSLLKQAGDVEENPGPSRGHMTEYKPTVRLATRDDVPRAVRTLAAAFADYPATRHTVDPDRHIERVTELQELFLTRVGLDIGKVWVADDGAAVAVWTTPESVEAGAVFAEIGPRMAELSGSRLAAQQQMEGLLAPHRPKEPAWFLATVGVSPDHQGKGLGSAVVLPGVEAAERAGVPAFLETSAPRNLPFYERLGFTVTADVEVPEGPRTWCMTRKPGA

SEQ ID NO: 14231 - protein, 998 aa, Artificial Sequence
  Synthetic Polypeptide
MALPVTALLLPLALLLHAARPACQVQLVESGGGLVQAGDSVTLSCTASGRTFSSYALAWFRQRPGKEREFVAGLRWGGPTNYADSVKDRFTISGDSAKHTMYLQMNSLKPEDTAVYYCGYNPGGWAVPSQYEYDSWGQGTQVTVSSGTGGGGSGGGGSGGGGSEFEADIYQTPRYLVIGTGKKITLECSQTMGHDKMYWYQQDPGMELHLIHYSYGVNSTEKGDLSSESTVSRIRTEHFPLTLESARPSHTSQYLCASSEARGLAEFTDTQYFGPGTRLTVLEDLKNVFPPEVAVFEPSEAEISHTQKATLVCLATGFYPDHVELSWWVNGKEVHSGVSTDPQPLKEQPALNDSRYCLSSRLRVSATFWQNPRNHFRCQVQFYGLSENDEWTQDRAKPVTQIVSAEAWGRADCGFTSESYQQGVLSATILYEILLGKATLYAVLVSALVLMAMVKRKDSRGRAKRSGSGATNFSLLKQAGDVEENPGPTSMDWIWRILFLVGAATGAHSFEQVQLQQPGAELVKPGASVKMSCKASGYAFSSYWINWMKQKPGQGLEWIGQIYPGDGTENRFSVNFQKAAKSFSLKISDSQLGDAAMYFCAYRSAVNARLMFGDGTQLVVKPNTRIQNPDPAVYQLRDSKSSDKSVCLFTDFDSQTNVSQSKDSDVYITDKTVLDMRSMDFKSNSAVAWSNKSDFACANAFNNSIIPEDTFFPSPESSCDVKLVEKSFETDTNLNFQNLSVIGFRILLLKVAGFNLLMTLRLWSSRAKRSGSGVKQTLNFDLLKLAGDVESNPGPSRGHMTEYKPTVRLATRDDVPRAVRTLAAAFADYPATRHTVDPDRHIERVTELQELFLTRVGLDIGKVWVADDGAAVAVWTTPESVEAGAVFAEIGPRMAELSGSRLAAQQQMEGLLAPHRPKEPAWFLATVGVSPDHQGKGLGSAVVLPGVEAAERAGVPAFLETSAPRNLPFYERLGFTVTADVEVPEGPRTWCMTRKPGA

SEQ ID NO: 14232 - protein, 1080 aa, Artificial Sequence
  Synthetic Polypeptide
MALPVTALLLPLALLLHAARPACQVQLVESGGGLVQAGDSVTLSCTASGRTFSSYALAWFRQRPGKEREFVAGLRWGGPTNYADSVKDRFTISGDSAKHTMYLQMNSLKPEDTAVYYCGYNPGGWAVPSQYEYDSWGQGTQVTVSSGTGGGGSGGGGSGGGGSEFEADIYQTPRYLVIGTGKKITLECSQTMGHDKMYWYQQDPGMELHLIHYSYGVNSTEKGDLSSESTVSRIRTEHFPLTLESARPSHTSQYLCASSEARGLAEFTDTQYFGPGTRLTVLEDLKNVFPPEVAVFEPSEAEISHTQKATLVCLATGFYPDHVELSWWVNGKEVHSGVSTDPQPLKEQPALNDSRYCLSSRLRVSATFWQNPRNHFRCQVQFYGLSENDEWTQDRAKPVTQIVSAEAWGRADCGFTSESYQQGVLSATILYEILLGKATLYAVLVSALVLMAMVKRKDSRGRAKRSGSGATNFSLLKQAGDVEENPGPTSMDWIWRILFLVGAATGAHSFEQVQLQQPGAELVKPGASVKMSCKASGYAFSSYWINWMKQKPGQGLEWIGQIYPGDGTENRFSVNFQKAAKSFSLKISDSQLGDAAMYFCAYRSAVNARLMFGDGTQLVVKPNTREQKLISEEDGSGTPFPSLAPPIMLLVDGKQQMVVVCLVLDVAPPGLDSPIWFSAGNGSALDAFTYGPSPATDGTWTNLAHLSLPSEELASWEPLVCHTGPGAEGHSRSTQPMHLSGEASTARTCPQEPLRGTPGGALWLGVLRLLLFKLLLFDLLLTCSCLCDPAGPLPSPATTTRLRALGSHRLHPATETGGREATSSPRPQPRDRRWGDTPPGRKPGSPVRAKRSGSGVKQTLNFDLLKLAGDVESNPGPSRGHMTEYKPTVRLATRDDVPRAVRTLAAAFADYPATRHTVDPDRHIERVTELQELFLTRVGLDIGKVWVADDGAAVAVWTTPESVEAGAVFAEIGPRMAELSGSRLAAQQQMEGLLAPHRPKEPAWFLATVGVSPDHQGKGLGSAVVLPGVEAAERAGVPAFLETSAPRNLPFYERLGFTVTADVEVPEGPRTWCMTRKPGA

SEQ ID NO: 14233 - protein, 1098 aa, Artificial Sequence
  Synthetic Polypeptide
MALPVTALLLPLALLLHAARPLEDLKNVFPPEVAVFEPSEAEISHTQKATLVCLATGFYPDHVELSWWVNGKEVHSGVSTDPQPLKEQPALNDSRYCLSSRLRVSATFWQNPRNHFRCQVQFYGLSENDEWTQDRAKPVTQIVSAEAWGRADCGFTSESYQQGVLSATILYEILLGKATLYAVLVSALVLMAMVKRKDSRGRAKRSGSGATNFSLLKQAGDVEENPGPTSMALPVTALLLPLALLLHAARPACQVQLVESGGGLVQAGDSVTLSCTASGRTFSSYALAWFRQRPGKEREFVAGLRWGGPTNYADSVKDRFTISGDSAKHTMYLQMNSLKPEDTAVYYCGYNPGGWAVPSQYEYDSWGQGTQVTVSSGTGGGGSGGGGSGGGGSEFEADIYQTPRYLVIGTGKKITLECSQTMGHDKMYWYQQDPGMELHLIHYSYGVNSTEKGDLSSESTVSRIRTEHFPLTLESARPSHTSQYLCASSEARGLAEFTDTQYFGPGTRLTVGGGGSGGGGSGGGGSQVQLQQPGAELVKPGASVKMSCKASGYAFSSYWINWMKQKPGQGLEWIGQIYPGDGTENRFSVNFQKAAKSFSLKISDSQLGDAAMYFCAYRSAVNARLMFGDGTQLVVKPNTREQKLISEEDLGSGTPFPSLAPPIMLLVDGKQQMVVVCLVLDVAPPGLDSPIWFSAGNGSALDAFTYGPSPATDGTWTNLAHLSLPSEELASWEPLVCHTGPGAEGHSRSTQPMHLSGEASTARTCPQEPLRGTPGGALWLGVLRLLLFKLLLFDLLLTCSCLCDPAGPLPSPATTTRLRALGSHRLHPATETGGREATSSPRPQPRDRRWGDTPPGRKPGSPVRAKRSGSGVKQTLNFDLLKLAGDVESNPGPSRSRGHMTEYKPTVRLATRDDVPRAVRTLAAAFADYPATRHTVDPDRHIERVTELQELFLTRVGLDIGKVWVADDGAAVAVWTTPESVEAGAVFAEIGPRMAELSGSRLAAQQQMEGLLAPHRPKEPAWFLATVGVSPDHQGKGLGSAVVLPGVEAAERAGVPAFLETSAPRNLPFYERLGFTVTADVEVPEGPRTWCMTRKPGA

SEQ ID NO: 14234 - protein, 1035 aa, Artificial Sequence
  Synthetic Polypeptide
MALPVTALLLPLALLLHAARPACQVQLVESGGGLVQAGDSVTLSCTASGRTFSSYALAWFRQRPGKEREFVAGLRWGGPTNYADSVKDRFTISGDSAKHTMYLQMNSLKPEDTAVYYCGYNPGGWAVPSQYEYDSWGQGTQVTVSSGTGGGGSGGGGSGGGGSEFEADIYQTPRYLVIGTGKKITLECSQTMGHDKMYWYQQDPGMELHLIHYSYGVNSTEKGDLSSESTVSRIRTEHFPLTLESARPSHTSQYLCASSEARGLAEFTDTQYFGPGTRLTVLEGKPIPNPLLGLDSTGSGDKQLDADVSPKPTIFLPSIAETKLQKAGTYLCLLEKFFPDVIKIHWQEKKSNTILGSQEGNTMKTNDTYMKFSWLTVPEKSLDKEHRCIVRHENNKNGVDQEIIFPPIKTDVITMDPKDNCSKDANDTLLLQLTNTSAYYMYLLLLLKSVVYFAIITCCLLRRTAFCCNGEKSRAKRSGSGATNFSLLKQAGDVEENPGPTSMDWIWRILFLVGAATGAHSFEQVQLQQPGAELVKPGASVKMSCKASGYAFSSYWINWMKQKPGQGLEWIGQIYPGDGTENRFSVNFQKAAKSFSLKISDSQLGDAAMYFCAYRSAVNARLMFGDGTQLVVKPNTREQKLISEEDGSGSQPHTKPSVFVMKNGTNVACLVKEFYPKDIRINLVSSKKITEFDPAIVISPSGKYNAVKLGKYEDSNSVTCSVQHDNKTVHSTDFEVKTDSTDHVKPKETENTKQPSKSCHKPKAIVHTEKVNMMSLTVLGLRMLFAKTVAVNFLLTAKLFFLRAKRSGSGVKQTLNFDLLKLAGDVESNPGPSRGHMTEYKPTVRLATRDDVPRAVRTLAAAFADYPATRHTVDPDRHIERVTELQELFLTRVGLDIGKVWVADDGAAVAVWTTPESVEAGAVFAEIGPRMAELSGSRLAAQQQMEGLLAPHRPKEPAWFLATVGVSPDHQGKGLGSAVVLPGVEAAERAGVPAFLETSAPRNLPFYERLGFTVTADVEVPEGPRTWCMTRKPGA

SEQ ID NO: 14235 - protein, 773 aa, Artificial Sequence
  Synthetic Polypeptide
MALPVTALLLPLALLLHAARPACQVQLVESGGGLVQAGDSVTLSCTASGRTFSSYALAWFRQRPGKEREFVAGLRWGGPTNYADSVKDRFTISGDSAKHTMYLQMNSLKPEDTAVYYCGYNPGGWAVPSQYEYDSWGQGTQVTVSSGTGGGGSGGGGSGGGGSEFEADIYQTPRYLVIGTGKKITLECSQTMGHDKMYWYQQDPGMELHLIHYSYGVNSTEKGDLSSESTVSRIRTEHFPLTLESARPSHTSQYLCASSEARGLAEFTDTQYFGPGTRLTVLESQPHTKPSVFVMKNGTNVACLVKEFYPKDIRINLVSSKKITEFDPAIVISPSGKYNAVKLGKYEDSNSVTCSVQHDNKTVHSTDFEVKTDSTDHVKPKETENTKQPSKSCHKPKAIVHTEKVNMMSLTVLGLRMLFAKTVAVNFLLTAKLFFLRAKRSGSGATNFSLLKQAGDVEENPGPTSMDWIWRILFLVGAATGAHSFEQVQLQQPGAELVKPGASVKMSCKASGYAFSSYWINWMKQKPGQGLEWIGQIYPGDGTENRFSVNFQKAAKSFSLKISDSQLGDAAMYFCAYRSAVNARLMFGDGTQLVVKPNTRDKQLDADVSPKPTIFLPSIAETKLQKAGTYLCLLEKFFPDVIKIHWQEKKSNTILGSQEGNTMKTNDTYMKFSWLTVPEKSLDKEHRCIVRHENNKNGVDQEIIFPPIKTDVITMDPKDNCSKDANDTLLLQLTNTSAYYMYLLLLLKSVVYFAIITCCLLRRTAFCCNGEKS

SEQ ID NO: 14236 - protein, 1050 aa, Artificial Sequence
  Synthetic Polypeptide
MALPVTALLLPLALLLHAARPLEGKPIPNPLLGLDSTGSGDKQLDADVSPKPTIFLPSIAETKLQKAGTYLCLLEKFFPDVIKIHWQEKKSNTILGSQEGNTMKTNDTYMKFSWLTVPEKSLDKEHRCIVRHENNKNGVDQEIIFPPIKTDVITMDPKDNCSKDANDTLLLQLTNTSAYYMYLLLLLKSVVYFAIITCCLLRRTAFCCNGEKSRAKRSGSGATNFSLLKQAGDVEENPGPTSMALPVTALLLPLALLLHAARPACQVQLVESGGGLVQAGDSVTLSCTASGRTFSSYALAWFRQRPGKEREFVAGLRWGGPTNYADSVKDRFTISGDSAKHTMYLQMNSLKPEDTAVYYCGYNPGGWAVPSQYEYDSWGQGTQVTVSSGTGGGGSGGGGSGGGGSEFEADIYQTPRYLVIGTGKKITLECSQTMGHDKMYWYQQDPGMELHLIHYSYGVNSTEKGDLSSESTVSRIRTEHFPLTLESARPSHTSQYLCASSEARGLAEFTDTQYFGPGTRLTVGGGGSGGGGSGGGGSQVQLQQPGAELVKPGASVKMSCKASGYAFSSYWINWMKQKPGQGLEWIGQIYPGDGTENRFSVNFQKAAKSFSLKISDSQLGDAAMYFCAYRSAVNARLMFGDGTQLVVKPNTREQKLISEEDGSGSQPHTKPSVFVMKNGTNVACLVKEFYPKDIRINLVSSKKITEFDPAIVISPSGKYNAVKLGKYEDSNSVTCSVQHDNKTVHSTDFEVKTDSTDHVKPKETENTKQPSKSCHKPKAIVHTEKVNMMSLTVLGLRMLFAKTVAVNFLLTAKLFFLRAKRSGSGVKQTLNFDLLKLAGDVESNPGPSRGHMTEYKPTVRLATRDDVPRAVRTLAAAFADYPATRHTVDPDRHIERVTELQELFLTRVGLDIGKVWVADDGAAVAVWTTPESVEAGAVFAEIGPRMAELSGSRLAAQQQMEGLLAPHRPKEPAWFLATVGVSPDHQGKGLGSAVVLPGVEAAERAGVPAFLETSAPRNLPFYERLGFTVTADVEVPEGPRTWCMTRKPGA

SEQ ID NO: 14237 - protein, 1175 aa, Artificial Sequence
  Synthetic Polypeptide
MALPVTALLLPLALLLHAARPACQVQLVESGGGLVQAGDSVTLSCTASGRTFSSYALAWFRQRPGKEREFVAGLRWGGPTNYADSVKDRFTISGDSAKHTMYLQMNSLKPEDTAVYYCGYNPGGWAVPSQYEYDSWGQGTQVTVSSGTGGGGSGGGGSGGGGSEFEADIYQTPRYLVIGTGKKITLECSQTMGHDKMYWYQQDPGMELHLIHYSYGVNSTEKGDLSSESTVSRIRTEHFPLTLESARPSHTSQYLCASSEARGLAEFTDTQYFGPGTRLTVGQPKANPTVTLFPPSSEELQANKATLVCLISDFYPGAVTVAWKADGSPVKAGVETTKPSKQSNNKYAASSYLSLTPEQWKSHRSYSCQVTHEGSTVEKTVAPTECSGSQSFGLLDPKLCYLLDGILFIYGVILTALFLRVKFSRSADAPAYQQGQNQLYNELNLGRREEYDVLDKRRGRDPEMGGKPQRRKNPQEGLYNELQKDKMAEAYSEIGMKGERRRGKGHDGLYQGLSTATKDTYDALHMQALPPRRAKRSGSGATNFSLLKQAGDVEENPGPTSMDWIWRILFLVGAATGAHSFEQVQLQQPGAELVKPGASVKMSCKASGYAFSSYWINWMKQKPGQGLEWIGQIYPGDGTENRFSVNFQKAAKSFSLKISDSQLGDAAMYFCAYRSAVNARLMFGDGTQLVVKPNASTKGPSVFPLAPSSKSTSGGTAALGCLVKDYFPEPVTVSWNSGALTSGVHTFPAVLQSSGLYSLSSVVTVPSSSLGTQTYICNVNHKPSNTKVDKRVEPKSCGTQSFGLLDPKLCYLLDGILFIYGVILTALFLRVKFSRSADAPAYQQGQNQLYNELNLGRREEYDVLDKRRGRDPEMGGKPQRRKNPQEGLYNELQKDKMAEAYSEIGMKGERRRGKGHDGLYQGLSTATKDTYDALHMQALPPRRAKRSGSGVKQTLNFDLLKLAGDVESNPGPSRGHMTEYKPTVRLATRDDVPRAVRTLAAAFADYPATRHTVDPDRHIERVTELQELFLTRVGLDIGKVWVADDGAAVAVWTTPESVEAGAVFAEIGPRMAELSGSRLAAQQQMEGLLAPHRPKEPAWFLATVGVSPDHQGKGLGSAVVLPGVEAAERAGVPAFLETSAPRNLPFYERLGFTVTADVEVPEGPRTWCMTRKPGA

SEQ ID NO: 14238 - protein, 961 aa, Artificial Sequence
  Synthetic Polypeptide
MALPVTALLLPLALLLHAARPACQVQLVESGGGLVQAGDSVTLSCTASGRTFSSYALAWFRQRPGKEREFVAGLRWGGPTNYADSVKDRFTISGDSAKHTMYLQMNSLKPEDTAVYYCGYNPGGWAVPSQYEYDSWGQGTQVTVSSGTGGGGSGGGGSGGGGSEFEADIYQTPRYLVIGTGKKITLECSQTMGHDKMYWYQQDPGMELHLIHYSYGVNSTEKGDLSSESTVSRIRTEHFPLTLESARPSHTSQYLCASSEARGLAEFTDTQYFGPGTRLTVLEDLKNVFPPEVAVFEPSEAEISHTQKATLVCLATGFYPDHVELSWWVNGKEVHSGVSTDPQPLKEQPALNDSRYCLSSRLRVSATFWQNPRNHFRCQVQFYGLSENDEWTQDRAKPVTQIVSAEAWGRADCGSQSFGLLDPKLCYLLDGILFIYGVILTALFLRVKFSRSADAPAYQQGQNQLYNELNLGRREEYDVLDKRRGRDPEMGGKPQRRKNPQEGLYNELQKDKMAEAYSEIGMKGERRRGKGHDGLYQGLSTATKDTYDALHMQALPPRRAKRSGSGATNFSLLKQAGDVEENPGPTSMDWIWRILFLVGAATGAHSFEQVQLQQPGAELVKPGASVKMSCKASGYAFSSYWINWMKQKPGQGLEWIGQIYPGDGTENRFSVNFQKAAKSFSLKISDSQLGDAAMYFCAYRSAVNARLMFGDGTQLVVKPNTRIQNPDPAVYQLRDSKSSDKSVCLFTDFDSQTNVSQSKDSDVYITDKTVLDMRSMDFKSNSAVAWSNKSDFACANAFNNSIIPEDTFFPSPESSCGTQSFGLLDPKLCYLLDGILFIYGVILTALFLRVKFSRSADAPAYQQGQNQLYNELNLGRREEYDVLDKRRGRDPEMGGKPQRRKNPQEGLYNELQKDKMAEAYSEIGMKGERRRGKGHDGLYQGLSTATKDTYDALHMQALPPR

SEQ ID NO: 14239 - protein, 961 aa, Artificial Sequence
  Synthetic Polypeptide
MALPVTALLLPLALLLHAARPACQVQLVESGGGLVQAGDSVTLSCTASGRTFSSYALAWFRQRPGKEREFVAGLRWGGPTNYADSVKDRFTISGDSAKHTMYLQMNSLKPEDTAVYYCGYNPGGWAVPSQYEYDSWGQGTQVTVSSGTGGGGSGGGGSGGGGSEFEADIYQTPRYLVIGTGKKITLECSQTMGHDKMYWYQQDPGMELHLIHYSYGVNSTEKGDLSSESTVSRIRTEHFPLTLESARPSHTSQYLCASSEARGLAEFTDTQYFGPGTRLTVLEDLKNVFPPEVAVFEPSKAEIAHTQKATLVCLATGFYPDHVELSWWVNGKEVHSGVCTDPQPLKEQPALNDSRYCLSSRLRVSATFWQNPRNHFRCQVQFYGLSENDEWTQDRAKPVTQIVSAEAWGRADCGSQSFGLLDPKLCYLLDGILFIYGVILTALFLRVKFSRSADAPAYQQGQNQLYNELNLGRREEYDVLDKRRGRDPEMGGKPQRRKNPQEGLYNELQKDKMAEAYSEIGMKGERRRGKGHDGLYQGLSTATKDTYDALHMQALPPRRAKRSGSGATNFSLLKQAGDVEENPGPTSMDWIWRILFLVGAATGAHSFEQVQLQQPGAELVKPGASVKMSCKASGYAFSSYWINWMKQKPGQGLEWIGQIYPGDGTENRFSVNFQKAAKSFSLKISDSQLGDAAMYFCAYRSAVNARLMFGDGTQLVVKPNTRIQNPDPAVYQLRDSKSSDKSVCLFTDFDSQTNVSQSKDSDVYITDKCVLDMRSMDFKSNSAVAWSNKSDFACANAFNNSIIPEDTFFPSSDVPCGTQSFGLLDPKLCYLLDGILFIYGVILTALFLRVKFSRSADAPAYQQGQNQLYNELNLGRREEYDVLDKRRGRDPEMGGKPQRRKNPQEGLYNELQKDKMAEAYSEIGMKGERRRGKGHDGLYQGLSTATKDTYDALHMQALPPR

SEQ ID NO: 14240 - protein, 1032 aa, Artificial Sequence
  Synthetic Polypeptide
MALPVTALLLPLALLLHAARPACQVQLVESGGGLVQAGDSVTLSCTASGRTFSSYALAWFRQRPGKEREFVAGLRWGGPTNYADSVKDRFTISGDSAKHTMYLQMNSLKPEDTAVYYCGYNPGGWAVPSQYEYDSWGQGTQVTVSSGTGGGGSGGGGSGGGGSEFEADIYQTPRYLVIGTGKKITLECSQTMGHDKMYWYQQDPGMELHLIHYSYGVNSTEKGDLSSESTVSRIRTEHFPLTLESARPSHTSQYLCASSEARGLAEFTDTQYFGPGTRLTVLEGKPIPNPLLGLDSTGSGEDLKNVFPPEVAVFEPSEAEISHTQKATLVCLATGFYPDHVELSWWVNGKEVHSGVSTDPQPLKEQPALNDSRYCLSSRLRVSATFWQNPRNHFRCQVQFYGLSENDEWTQDRAKPVTQIVSAEAWGRADCGSQSFGLLDPKLCYLLDGILFIYGVILTALFLRVKFSRSADAPAYQQGQNQLYNELNLGRREEYDVLDKRRGRDPEMGGKPQRRKNPQEGLYNELQKDKMAEAYSEIGMKGERRRGKGHDGLYQGLSTATKDTYDALHMQALPPRRAKRSGSGATNFSLLKQAGDVEENPGPTSMDWIWRILFLVGAATGAHSFEQVQLQQPGAELVKPGASVKMSCKASGYAFSSYWINWMKQKPGQGLEWIGQIYPGDGTENRFSVNFQKAAKSFSLKISDSQLGDAAMYFCAYRSAVNARLMFGDGTQLVVKPNTREQKLISEEDGSGIQNPDPAVYQLRDSKSSDKSVCLFTDFDSQTNVSQSKDSDVYITDKTVLDMRSMDFKSNSAVAWSNKSDFACANAFNNSIIPEDTFFPSPESSCGTQSFGLLDPKLCYLLDGILFIYGVILTALFLRSKRSRLLHSDYMNMTPRRPGPTRKHYQPYAPPRDFAAYRSRVKFSRSADAPAYQQGQNQLYNELNLGRREEYDVLDKRRGRDPEMGGKPQRRKNPQEGLYNELQKDKMAEAYSEIGMKGERRRGKGHDGLYQGLSTATKDTYDALHMQALPPR

SEQ ID NO: 14241 - protein, 1073 aa, Artificial Sequence
  Synthetic Polypeptide
MALPVTALLLPLALLLHAARPACQVQLVESGGGLVQAGDSVTLSCTASGRTFSSYALAWFRQRPGKEREFVAGLRWGGPTNYADSVKDRFTISGDSAKHTMYLQMNSLKPEDTAVYYCGYNPGGWAVPSQYEYDSWGQGTQVTVSSGTGGGGSGGGGSGGGGSEFEADIYQTPRYLVIGTGKKITLECSQTMGHDKMYWYQQDPGMELHLIHYSYGVNSTEKGDLSSESTVSRIRTEHFPLTLESARPSHTSQYLCASSEARGLAEFTDTQYFGPGTRLTVLEGKPIPNPLLGLDSTGSGEDLKNVFPPEVAVFEPSEAEISHTQKATLVCLATGFYPDHVELSWWVNGKEVHSGVSTDPQPLKEQPALNDSRYCLSSRLRVSATFWQNPRNHFRCQVQFYGLSENDEWTQDRAKPVTQIVSAEAWGRADCGSQSFGLLDPKLCYLLDGILFIYGVILTALFLRSKRSRLLHSDYMNMTPRRPGPTRKHYQPYAPPRDFAAYRSRVKFSRSADAPAYQQGQNQLYNELNLGRREEYDVLDKRRGRDPEMGGKPQRRKNPQEGLYNELQKDKMAEAYSEIGMKGERRRGKGHDGLYQGLSTATKDTYDALHMQALPPRRAKRSGSGATNFSLLKQAGDVEENPGPTSMDWIWRILFLVGAATGAHSFEQVQLQQPGAELVKPGASVKMSCKASGYAFSSYWINWMKQKPGQGLEWIGQIYPGDGTENRFSVNFQKAAKSFSLKISDSQLGDAAMYFCAYRSAVNARLMFGDGTQLVVKPNTREQKLISEEDGSGIQNPDPAVYQLRDSKSSDKSVCLFTDFDSQTNVSQSKDSDVYITDKTVLDMRSMDFKSNSAVAWSNKSDFACANAFNNSIIPEDTFFPSPESSCGTQSFGLLDPKLCYLLDGILFIYGVILTALFLRSKRSRLLHSDYMNMTPRRPGPTRKHYQPYAPPRDFAAYRSRVKFSRSADAPAYQQGQNQLYNELNLGRREEYDVLDKRRGRDPEMGGKPQRRKNPQEGLYNELQKDKMAEAYSEIGMKGERRRGKGHDGLYQGLSTATKDTYDALHMQALPPR

SEQ ID NO: 14242 - protein, 1034 aa, Artificial Sequence
  Synthetic Polypeptide
MALPVTALLLPLALLLHAARPACQVQLVESGGGLVQAGDSVTLSCTASGRTFSSYALAWFRQRPGKEREFVAGLRWGGPTNYADSVKDRFTISGDSAKHTMYLQMNSLKPEDTAVYYCGYNPGGWAVPSQYEYDSWGQGTQVTVSSGTGGGGSGGGGSGGGGSEFEADIYQTPRYLVIGTGKKITLECSQTMGHDKMYWYQQDPGMELHLIHYSYGVNSTEKGDLSSESTVSRIRTEHFPLTLESARPSHTSQYLCASSEARGLAEFTDTQYFGPGTRLTVLEGKPIPNPLLGLDSTGSGEDLKNVFPPEVAVFEPSEAEISHTQKATLVCLATGFYPDHVELSWWVNGKEVHSGVSTDPQPLKEQPALNDSRYCLSSRLRVSATFWQNPRNHFRCQVQFYGLSENDEWTQDRAKPVTQIVSAEAWGRADCGSQSFGLLDPKLCYLLDGILFIYGVILTALFLRVKFSRSADAPAYQQGQNQLYNELNLGRREEYDVLDKRRGRDPEMGGKPQRRKNPQEGLYNELQKDKMAEAYSEIGMKGERRRGKGHDGLYQGLSTATKDTYDALHMQALPPRRAKRSGSGATNFSLLKQAGDVEENPGPTSMDWIWRILFLVGAATGAHSFEQVQLQQPGAELVKPGASVKMSCKASGYAFSSYWINWMKQKPGQGLEWIGQIYPGDGTENRFSVNFQKAAKSFSLKISDSQLGDAAMYFCAYRSAVNARLMFGDGTQLVVKPNTREQKLISEEDLGSGIQNPDPAVYQLRDSKSSDKSVCLFTDFDSQTNVSQSKDSDVYITDKTVLDMRSMDFKSNSAVAWSNKSDFACANAFNNSIIPEDTFFPSPESSCGTQSFGLLDPKLCYLLDGILFIYGVILTALFLKRGRKKLLYIFKQPFMRPVQTTQEEDGCSCRFPEEEEGGCELRVKFSRSADAPAYQQGQNQLYNELNLGRREEYDVLDKRRGRDPEMGGKPQRRKNPQEGLYNELQKDKMAEAYSEIGMKGERRRGKGHDGLYQGLSTATKDTYDALHMQALPPR

SEQ ID NO: 14243 - protein, 1076 aa, Artificial Sequence
  Synthetic Polypeptide
MALPVTALLLPLALLLHAARPACQVQLVESGGGLVQAGDSVTLSCTASGRTFSSYALAWFRQRPGKEREFVAGLRWGGPTNYADSVKDRFTISGDSAKHTMYLQMNSLKPEDTAVYYCGYNPGGWAVPSQYEYDSWGQGTQVTVSSGTGGGGSGGGGSGGGGSEFEADIYQTPRYLVIGTGKKITLECSQTMGHDKMYWYQQDPGMELHLIHYSYGVNSTEKGDLSSESTVSRIRTEHFPLTLESARPSHTSQYLCASSEARGLAEFTDTQYFGPGTRLTVLEGKPIPNPLLGLDSTGSGEDLKNVFPPEVAVFEPSEAEISHTQKATLVCLATGFYPDHVELSWWVNGKEVHSGVSTDPQPLKEQPALNDSRYCLSSRLRVSATFWQNPRNHFRCQVQFYGLSENDEWTQDRAKPVTQIVSAEAWGRADCGSQSFGLLDPKLCYLLDGILFIYGVILTALFLKRGRKKLLYIFKQPFMRPVQTTQEEDGCSCRFPEEEEGGCELRVKFSRSADAPAYQQGQNQLYNELNLGRREEYDVLDKRRGRDPEMGGKPQRRKNPQEGLYNELQKDKMAEAYSEIGMKGERRRGKGHDGLYQGLSTATKDTYDALHMQALPPRRAKRSGSGATNFSLLKQAGDVEENPGPTSMDWIWRILFLVGAATGAHSFEQVQLQQPGAELVKPGASVKMSCKASGYAFSSYWINWMKQKPGQGLEWIGQIYPGDGTENRFSVNFQKAAKSFSLKISDSQLGDAAMYFCAYRSAVNARLMFGDGTQLVVKPNTREQKLISEEDLGSGIQNPDPAVYQLRDSKSSDKSVCLFTDFDSQTNVSQSKDSDVYITDKTVLDMRSMDFKSNSAVAWSNKSDFACANAFNNSIIPEDTFFPSPESSCGTQSFGLLDPKLCYLLDGILFIYGVILTALFLKRGRKKLLYIFKQPFMRPVQTTQEEDGCSCRFPEEEEGGCELRVKFSRSADAPAYQQGQNQLYNELNLGRREEYDVLDKRRGRDPEMGGKPQRRKNPQEGLYNELQKDKMAEAYSEIGMKGERRRGKGHDGLYQGLSTATKDTYDALHMQALPPR

SEQ ID NO: 14244 - protein, 966 aa, Artificial Sequence
  Synthetic Polypeptide
MALPVTALLLPLALLLHAARPACQVQLVESGGGLVQAGDSVTLSCTASGRTFSSYALAWFRQRPGKEREFVAGLRWGGPTNYADSVKDRFTISGDSAKHTMYLQMNSLKPEDTAVYYCGYNPGGWAVPSQYEYDSWGQGTQVTVSSGTGGGGSGGGGSGGGGSEFEADIYQTPRYLVIGTGKKITLECSQTMGHDKMYWYQQDPGMELHLIHYSYGVNSTEKGDLSSESTVSRIRTEHFPLTLESARPSHTSQYLCASSEARGLAEFTDTQYFGPGTRLTVLEQSFGLLDPKLCYLLDGILFIYGVILTALFLRVKFSRSADAPAYQQGQNQLYNELNLGRREEYDVLDKRRGRDPEMGGKPQRRKNPQEGLYNELQKDKMAEAYSEIGMKGERRRGKGHDGLYQGLSTATKDTYDALHMQALPPRRAKRSGSGATNFSLLKQAGDVEENPGPTSMDWIWRILFLVGAATGAHSFEQVQLQQPGAELVKPGASVKMSCKASGYAFSSYWINWMKQKPGQGLEWIGQIYPGDGTENRFSVNFQKAAKSFSLKISDSQLGDAAMYFCAYRSAVNARLMFGDGTQLVVKPNTRQSFGLLDPKLCYLLDGILFIYGVILTALFLRVKFSRSADAPAYQQGQNQLYNELNLGRREEYDVLDKRRGRDPEMGGKPQRRKNPQEGLYNELQKDKMAEAYSEIGMKGERRRGKGHDGLYQGLSTATKDTYDALHMQALPPRRAKRSGSGVKQTLNFDLLKLAGDVESNPGPSRGHMTEYKPTVRLATRDDVPRAVRTLAAAFADYPATRHTVDPDRHIERVTELQELFLTRVGLDIGKVWVADDGAAVAVWTTPESVEAGAVFAEIGPRMAELSGSRLAAQQQMEGLLAPHRPKEPAWFLATVGVSPDHQGKGLGSAVVLPGVEAAERAGVPAFLETSAPRNLPFYERLGFTVTADVEVPEGPRTWCMTRKPGA

SEQ ID NO: 14245 - protein, 791 aa, Artificial Sequence
  Synthetic Polypeptide
MALPVTALLLPLALLLHAARPACQVQLVESGGGLVQAGDSVTLSCTASGRTFSSYALAWFRQRPGKEREFVAGLRWGGPTNYADSVKDRFTISGDSAKHTMYLQMNSLKPEDTAVYYCGYNPGGWAVPSQYEYDSWGQGTQVTVSSGTGGGGSGGGGSGGGGSEFEADIYQTPRYLVIGTGKKITLECSQTMGHDKMYWYQQDPGMELHLIHYSYGVNSTEKGDLSSESTVSRIRTEHFPLTLESARPSHTSQYLCASSEARGLAEFTDTQYFGPGTRLTVLEGQPKANPTVTLFPPSSEELQANKATLVCLISDFYPGAVTVAWKADGSPVKAGVETTKPSKQSNNKYAASSYLSLTPEQWKSHRSYSCQVTHEGSTVEKTVAPTECSPIKTDVITMDPKDNCSKDANDTLLLQLTNTSAYYMYLLLLLKSVVYFAIITCCLLRRTAFCCNGEKSRAKRSGSGATNFSLLKQAGDVEENPGPTSMDWIWRILFLVGAATGAHSFEQVQLQQPGAELVKPGASVKMSCKASGYAFSSYWINWMKQKPGQGLEWIGQIYPGDGTENRFSVNFQKAAKSFSLKISDSQLGDAAMYFCAYRSAVNARLMFGDGTQLVVKPNTRASTKGPSVFPLAPSSKSTSGGTAALGCLVKDYFPEPVTVSWNSGALTSGVHTFPAVLQSSGLYSLSSVVTVPSSSLGTQTYICNVNHKPSNTKVDKRVEPKSCEVKTDSTDHVKPKETENTKQPSKSCHKPKAIVHTEKVNMMSLTVLGLRMLFAKTVAVNFLLTAKLFFL

SEQ ID NO: 14246 - protein, 769 aa, Artificial Sequence
  Synthetic Polypeptide
MALPVTALLLPLALLLHAARPACQVQLVESGGGLVQAGDSVTLSCTASGRTFSSYALAWFRQRPGKEREFVAGLRWGGPTNYADSVKDRFTISGDSAKHTMYLQMNSLKPEDTAVYYCGYNPGGWAVPSQYEYDSWGQGTQVTVSSGTGGGGSGGGGSGGGGSEFEADIYQTPRYLVIGTGKKITLECSQTMGHDKMYWYQQDPGMELHLIHYSYGVNSTEKGDLSSESTVSRIRTEHFPLTLESARPSHTSQYLCASSEARGLAEFTDTQYFGPGTRLTVLEGQPKANPTVTLFPPSSEELQANKATLVCLISDFYPGAVTVAWKADGSPVKAGVETTKPSKQSNNKYAASSYLSLTPEQWKSHRSYSCQVTHEGSTVEKTVAPTECSGRADCGITSASYHQGVLSATILYEILLGKATLYAVLVSALVLMAMVKRKDSRGRAKRSGSGATNFSLLKQAGDVEENPGPTSMDWIWRILFLVGAATGAHSFEQVQLQQPGAELVKPGASVKMSCKASGYAFSSYWINWMKQKPGQGLEWIGQIYPGDGTENRFSVNFQKAAKSFSLKISDSQLGDAAMYFCAYRSAVNARLMFGDGTQLVVKPNTRASTKGPSVFPLAPSSKSTSGGTAALGCLVKDYFPEPVTVSWNSGALTSGVHTFPAVLQSSGLYSLSSVVTVPSSSLGTQTYICNVNHKPSNTKVDKRVEPKSCIPEDTFFPSSDVPCDVKLVEKSFETDTNLNFQNLSVIGFRILLLKVAGFNLLMTLRLWSS

SEQ ID NO: 14247 - protein, 769 aa, Artificial Sequence
  Synthetic Polypeptide
MALPVTALLLPLALLLHAARPACQVQLVESGGGLVQAGDSVTLSCTASGRTFSSYALAWFRQRPGKEREFVAGLRWGGPTNYADSVKDRFTISGDSAKHTMYLQMNSLKPEDTAVYYCGYNPGGWAVPSQYEYDSWGQGTQVTVSSGTGGGGSGGGGSGGGGSEFEADIYQTPRYLVIGTGKKITLECSQTMGHDKMYWYQQDPGMELHLIHYSYGVNSTEKGDLSSESTVSRIRTEHFPLTLESARPSHTSQYLCASSEARGLAEFTDTQYFGPGTRLTVLEGQPKANPTVTLFPPSSEELQANKATLVCLISDFYPGAVTVAWKADGSPVKAGVETTKPSKQSNNKYAASSYLSLTPEQWKSHRSYSCQVTHEGSTVEKTVAPTECSGRADCGFTSESYQQGVLSATILYEILLGKATLYAVLVSALVLMAMVKRKDSRGRAKRSGSGATNFSLLKQAGDVEENPGPTSMDWIWRILFLVGAATGAHSFEQVQLQQPGAELVKPGASVKMSCKASGYAFSSYWINWMKQKPGQGLEWIGQIYPGDGTENRFSVNFQKAAKSFSLKISDSQLGDAAMYFCAYRSAVNARLMFGDGTQLVVKPNTRASTKGPSVFPLAPSSKSTSGGTAALGCLVKDYFPEPVTVSWNSGALTSGVHTFPAVLQSSGLYSLSSVVTVPSSSLGTQTYICNVNHKPSNTKVDKRVEPKSCIPEDTFFPSPESSCDVKLVEKSFETDTNLNFQNLSVIGFRILLLKVAGFNLLMTLRLWSS

SEQ ID NO: 14248 - protein, 595 aa, Artificial Sequence
  Synthetic Polypeptide
MALPVTALLLPLALLLHAARPACQVQLVESGGGLVQAGDSVTLSCTASGRTFSSYALAWFRQRPGKEREFVAGLRWGGPTNYADSVKDRFTISGDSAKHTMYLQMNSLKPEDTAVYYCGYNPGGWAVPSQYEYDSWGQGTQVTVSSGTGGGGSGGGGSGGGGSEFEADIYQTPRYLVIGTGKKITLECSQTMGHDKMYWYQQDPGMELHLIHYSYGVNSTEKGDLSSESTVSRIRTEHFPLTLESARPSHTSQYLCASSEARGLAEFTDTQYFGPGTRLTVGGGGSGGGGSGGGGSQVQLQQPGAELVKPGASVKMSCKASGYAFSSYWINWMKQKPGQGLEWIGQIYPGDGTENRFSVNFQKAAKSFSLKISDSQLGDAAMYFCAYRSAVNARLMFGDGTQLVVKPNTRDGNEEMGGITQTPYKVSISGTTVILTCPQYPGSEILWQHNDKNIGGDEDDKNIGSDEDHLSLKEFSELEQSGYYVCYPRGSKPEDANFYLYLRARVCENCMEMDVMSVATIVIVDICITGGLLLLVYYWSKNRKAKAKPVTRGAGAGGRQRGQNKERPPPVPNPDYEPIRKGQRDLYSGLNQRRI

SEQ ID NO: 14249 - protein, 560 aa, Artificial Sequence
  Synthetic Polypeptide
MALPVTALLLPLALLLHAARPACQVQLVESGGGLVQAGDSVTLSCTASGRTFSSYALAWFRQRPGKEREFVAGLRWGGPTNYADSVKDRFTISGDSAKHTMYLQMNSLKPEDTAVYYCGYNPGGWAVPSQYEYDSWGQGTQVTVSSGTGGGGSGGGGSGGGGSEFEADIYQTPRYLVIGTGKKITLECSQTMGHDKMYWYQQDPGMELHLIHYSYGVNSTEKGDLSSESTVSRIRTEHFPLTLESARPSHTSQYLCASSEARGLAEFTDTQYFGPGTRLTVGGGGSGGGGSGGGGSQVQLQQPGAELVKPGASVKMSCKASGYAFSSYWINWMKQKPGQGLEWIGQIYPGDGTENRFSVNFQKAAKSFSLKISDSQLGDAAMYFCAYRSAVNARLMFGDGTQLVVKPNTRFKIPIEELEDRVFVNCNTSITWVEGTVGTLLSDITRLDLGKRILDPRGIYRCNGTDIYKDKESTVQVHYRMCQSCVELDPATVAGIIVTDVIATLLLALGVFCFAGHETGRLSGAADTQALLRNDQVYQPLRDRDDAQYSHLGGNWARNK

SEQ ID NO: 14250 - protein, 570 aa, Artificial Sequence
  Synthetic Polypeptide
MALPVTALLLPLALLLHAARPACQVQLVESGGGLVQAGDSVTLSCTASGRTFSSYALAWFRQRPGKEREFVAGLRWGGPTNYADSVKDRFTISGDSAKHTMYLQMNSLKPEDTAVYYCGYNPGGWAVPSQYEYDSWGQGTQVTVSSGTGGGGSGGGGSGGGGSEFEADIYQTPRYLVIGTGKKITLECSQTMGHDKMYWYQQDPGMELHLIHYSYGVNSTEKGDLSSESTVSRIRTEHFPLTLESARPSHTSQYLCASSEARGLAEFTDTQYFGPGTRLTVGGGGSGGGGSGGGGSQVQLQQPGAELVKPGASVKMSCKASGYAFSSYWINWMKQKPGQGLEWIGQIYPGDGTENRFSVNFQKAAKSFSLKISDSQLGDAAMYFCAYRSAVNARLMFGDGTQLVVKPNTRQSIKGNHLVKVYDYQEDGSVLLTCDAEAKNITWFKDGKMIGFLTEDKKKWNLGSNAKDPRGMYQCKGSQNKSKPLQVYYRMCQNCIELNAATISGFLFAEIVSIFVLAVGVYFIAGQDGVRQSRASDKQTLLPNDQLYQPLKDREDDQYSHLQGNQLRRN

SEQ ID NO: 14251 - protein, 553 aa, Artificial Sequence
  Synthetic Polypeptide
MALPVTALLLPLALLLHAARPACQVQLVESGGGLVQAGDSVTLSCTASGRTFSSYALAWFRQRPGKEREFVAGLRWGGPTNYADSVKDRFTISGDSAKHTMYLQMNSLKPEDTAVYYCGYNPGGWAVPSQYEYDSWGQGTQVTVSSGTGGGGSGGGGSGGGGSEFEADIYQTPRYLVIGTGKKITLECSQTMGHDKMYWYQQDPGMELHLIHYSYGVNSTEKGDLSSESTVSRIRTEHFPLTLESARPSHTSQYLCASSEARGLAEFTDTQYFGPGTRLTVGGGGSGGGGSGGGGSQVQLQQPGAELVKPGASVKMSCKASGYAFSSYWINWMKQKPGQGLEWIGQIYPGDGTENRFSVNFQKAAKSFSLKISDSQLGDAAMYFCAYRSAVNARLMFGDGTQLVVKPNTRQSFGLLDPKLCYLLDGILFIYGVILTALFLRVKFSRSADAPAYQQGQNQLYNELNLGRREEYDVLDKRRGRDPEMGGKPQRRKNPQEGLYNELQKDKMAEAYSEIGMKGERRRGKGHDGLYQGLSTATKDTYDALHMQALPPR

SEQ ID NO: 14252 - protein, 786 aa, Artificial Sequence
  Synthetic Polypeptide
MALPVTALLLPLALLLHAARPACQVQLVESGGGLVQAGDSVTLSCTASGRTFSSYALAWFRQRPGKEREFVAGLRWGGPTNYADSVKDRFTISGDSAKHTMYLQMNSLKPEDTAVYYCGYNPGGWAVPSQYEYDSWGQGTQVTVSSGTGGGGSGGGGSGGGGSEFEADIYQTPRYLVIGTGKKITLECSQTMGHDKMYWYQQDPGMELHLIHYSYGVNSTEKGDLSSESTVSRIRTEHFPLTLESARPSHTSQYLCASSEARGLAEFTDTQYFGPGTRLTVGGGGSGGGGSGGGGSQVQLQQPGAELVKPGASVKMSCKASGYAFSSYWINWMKQKPGQGLEWIGQIYPGDGTENRFSVNFQKAAKSFSLKISDSQLGDAAMYFCAYRSAVNARLMFGDGTQLVVKPNTRGSGIQNPDPAVYQLRDSKSSDKSVCLFTDFDSQTNVSQSKDSDVYITDKTVLDMRSMDFKSNSAVAWSNKSDFACANAFNNSIIPEDTFFPSPESSCDVKLVEKSFETDTNLNFQNLSVIGFRILLLKVAGFNLLMTLRLWSSRAKRSGSGVKQTLNFDLLKLAGDVESNPGPSRGHMTEYKPTVRLATRDDVPRAVRTLAAAFADYPATRHTVDPDRHIERVTELQELFLTRVGLDIGKVWVADDGAAVAVWTTPESVEAGAVFAEIGPRMAELSGSRLAAQQQMEGLLAPHRPKEPAWFLATVGVSPDHQGKGLGSAVVLPGVEAAERAGVPAFLETSAPRNLPFYERLGFTVTADVEVPEGPRTWCMTRKPGA

SEQ ID NO: 14253 - protein, 818 aa, Artificial Sequence
  Synthetic Polypeptide
MALPVTALLLPLALLLHAARPACQVQLVESGGGLVQAGDSVTLSCTASGRTFSSYALAWFRQRPGKEREFVAGLRWGGPTNYADSVKDRFTISGDSAKHTMYLQMNSLKPEDTAVYYCGYNPGGWAVPSQYEYDSWGQGTQVTVSSGTGGGGSGGGGSGGGGSEFEADIYQTPRYLVIGTGKKITLECSQTMGHDKMYWYQQDPGMELHLIHYSYGVNSTEKGDLSSESTVSRIRTEHFPLTLESARPSHTSQYLCASSEARGLAEFTDTQYFGPGTRLTVGGGGSGGGGSGGGGSQVQLQQPGAELVKPGASVKMSCKASGYAFSSYWINWMKQKPGQGLEWIGQIYPGDGTENRFSVNFQKAAKSFSLKISDSQLGDAAMYFCAYRSAVNARLMFGDGTQLVVKPNLEDLKNVFPPEVAVFEPSEAEISHTQKATLVCLATGFYPDHVELSWWVNGKEVHSGVSTDPQPLKEQPALNDSRYCLSSRLRVSATFWQNPRNHFRCQVQFYGLSENDEWTQDRAKPVTQIVSAEAWGRADCGFTSESYQQGVLSATILYEILLGKATLYAVLVSALVLMAMVKRKDSRGRAKRSGSGATNFSLLKQAGDVEENPGPTRGHMTEYKPTVRLATRDDVPRAVRTLAAAFADYPATRHTVDPDRHIERVTELQELFLTRVGLDIGKVWVADDGAAVAVWTTPESVEAGAVFAEIGPRMAELSGSRLAAQQQMEGLLAPHRPKEPAWFLATVGVSPDHQGKGLGSAVVLPGVEAAERAGVPAFLETSAPRNLPFYERLGFTVTADVEVPEGPRTWCMTRKPGA

SEQ ID NO: 14254 - protein, 868 aa, Artificial Sequence
  Synthetic Polypeptide
MALPVTALLLPLALLLHAARPACQVQLVESGGGLVQAGDSVTLSCTASGRTFSSYALAWFRQRPGKEREFVAGLRWGGPTNYADSVKDRFTISGDSAKHTMYLQMNSLKPEDTAVYYCGYNPGGWAVPSQYEYDSWGQGTQVTVSSGTGGGGSGGGGSGGGGSEFEADIYQTPRYLVIGTGKKITLECSQTMGHDKMYWYQQDPGMELHLIHYSYGVNSTEKGDLSSESTVSRIRTEHFPLTLESARPSHTSQYLCASSEARGLAEFTDTQYFGPGTRLTVGGGGSGGGGSGGGGSQVQLQQPGAELVKPGASVKMSCKASGYAFSSYWINWMKQKPGQGLEWIGQIYPGDGTENRFSVNFQKAAKSFSLKISDSQLGDAAMYFCAYRSAVNARLMFGDGTQLVVKPNTREQKLISEEDLGSGTPFPSLAPPIMLLVDGKQQMVVVCLVLDVAPPGLDSPIWFSAGNGSALDAFTYGPSPATDGTWTNLAHLSLPSEELASWEPLVCHTGPGAEGHSRSTQPMHLSGEASTARTCPQEPLRGTPGGALWLGVLRLLLFKLLLFDLLLTCSCLCDPAGPLPSPATTTRLRALGSHRLHPATETGGREATSSPRPQPRDRRWGDTPPGRKPGSPVRAKRSGSGVKQTLNFDLLKLAGDVESNPGPSRSRGHMTEYKPTVRLATRDDVPRAVRTLAAAFADYPATRHTVDPDRHIERVTELQELFLTRVGLDIGKVWVADDGAAVAVWTTPESVEAGAVFAEIGPRMAELSGSRLAAQQQMEGLLAPHRPKEPAWFLATVGVSPDHQGKGLGSAVVLPGVEAAERAGVPAFLETSAPRNLPFYERLGFTVTADVEVPEGPRTWCMTRKPGA

SEQ ID NO: 14255 - protein, 691 aa, Artificial Sequence
  Synthetic Polypeptide
MALPVTALLLPLALLLHAARPACQVQLVESGGGLVQAGDSVTLSCTASGRTFSSYALAWFRQRPGKEREFVAGLRWGGPTNYADSVKDRFTISGDSAKHTMYLQMNSLKPEDTAVYYCGYNPGGWAVPSQYEYDSWGQGTQVTVSSGTGGGGSGGGGSGGGGSEFEADIYQTPRYLVIGTGKKITLECSQTMGHDKMYWYQQDPGMELHLIHYSYGVNSTEKGDLSSESTVSRIRTEHFPLTLESARPSHTSQYLCASSEARGLAEFTDTQYFGPGTRLTVLEDLKNVFPPEVAVFEPSEAEISHTQKATLVCLATGFYPDHVELSWWVNGKEVHSGVSTDPQPLKEQPALNDSRYCLSSRLRVSATFWQNPRNHFRCQVQFYGLSENDEWTQDRAKPVTQIVSAEAWGRADCGFTSESYQQGVLSATILYEILLGKATLYAVLVSALVLMAMVKRKDSRGRAKRSGSGATNFSLLKQAGDVEENPGPTRGHMTEYKPTVRLATRDDVPRAVRTLAAAFADYPATRHTVDPDRHIERVTELQELFLTRVGLDIGKVWVADDGAAVAVWTTPESVEAGAVFAEIGPRMAELSGSRLAAQQQMEGLLAPHRPKEPAWFLATVGVSPDHQGKGLGSAVVLPGVEAAERAGVPAFLETSAPRNLPFYERLGFTVTADVEVPEGPRTWCMTRKPGA

SEQ ID NO: 14256 - protein, 461 aa, Artificial Sequence
  Synthetic Polypeptide
MALPVTALLLPLALLLHAARPACQVQLVESGGGLVQAGDSVTLSCTASGRTFSSYALAWFRQRPGKEREFVAGLRWGGPTNYADSVKDRFTISGDSAKHTMYLQMNSLKPEDTAVYYCGYNPGGWAVPSQYEYDSWGQGTQVTVSSGTGGGGSGGGGSGGGGSEFEADIYQTPRYLVIGTGKKITLECSQTMGHDKMYWYQQDPGMELHLIHYSYGVNSTEKGDLSSESTVSRIRTEHFPLTLESARPSHTSQYLCASSEARGLAEFTDTQYFGPGTRLTVLEDLKNVFPPEVAVFEPSEAEISHTQKATLVCLATGFYPDHVELSWWVNGKEVHSGVSTDPQPLKEQPALNDSRYCLSSRLRVSATFWQNPRNHFRCQVQFYGLSENDEWTQDRAKPVTQIVSAEAWGRADCGFTSESYQQGVLSATILYEILLGKATLYAVLVSALVLMAMVKRKDSRG

SEQ ID NO: 14257 - protein, 441 aa, Artificial Sequence
  Synthetic Polypeptide
MDWIWRILFLVGAATGAHSFEQVQLQQPGAELVKPGASVKMSCKASGYAFSSYWINWMKQKPGQGLEWIGQIYPGDGTENRFSVNFQKAAKSFSLKISDSQLGDAAMYFCAYRSAVNARLMFGDGTQLVVKPNTRIQNPDPAVYQLRDSKSSDKSVCLFTDFDSQTNVSQSKDSDVYITDKTVLDMRSMDFKSNSAVAWSNKSDFACANAFNNSIIPEDTFFPSPESSCDVKLVEKSFETDTNLNFQNLSVIGFRILLLKVAGFNLLMTLRLWSSRAKRSGSGVKQTLNFDLLKLAGDVESNPGPSRGHMAKPLSQEESTLIERATATINSIPISEDYSVASAALSSDGRIFTGVNVYHFTGGPCAELVVLGTAAAAAAGNLTCIVAIGNENRGILSPCGRCRQVLLDLHPGIKAIVKDSDGQPTAVGIRELLPSGYVWEG

SEQ ID NO: 14258 - protein, 275 aa, Artificial Sequence
  Synthetic Polypeptide
MDWIWRILFLVGAATGAHSFEQVQLQQPGAELVKPGASVKMSCKASGYAFSSYWINWMKQKPGQGLEWIGQIYPGDGTENRFSVNFQKAAKSFSLKISDSQLGDAAMYFCAYRSAVNARLMFGDGTQLVVKPNTRIQNPDPAVYQLRDSKSSDKSVCLFTDFDSQTNVSQSKDSDVYITDKTVLDMRSMDFKSNSAVAWSNKSDFACANAFNNSIIPEDTFFPSPESSCDVKLVEKSFETDTNLNFQNLSVIGFRILLLKVAGFNLLMTLRLWSS

SEQ ID NO: 14259 - protein, 709 aa, Artificial Sequence
  Synthetic Polypeptide
MALPVTALLLPLALLLHAARPACQVQLVESGGGLVQAGDSVTLSCTASGRTFSSYALAWFRQRPGKEREFVAGLRWGGPTNYADSVKDRFTISGDSAKHTMYLQMNSLKPEDTAVYYCGYNPGGWAVPSQYEYDSWGQGTQVTVSSGTGGGGSGGGGSGGGGSEFEADIYQTPRYLVIGTGKKITLECSQTMGHDKMYWYQQDPGMELHLIHYSYGVNSTEKGDLSSESTVSRIRTEHFPLTLESARPSHTSQYLCASSEARGLAEFTDTQYFGPGTRLTVLEGKPIPNPLLGLDSTGSGEDLKNVFPPEVAVFEPSEAEISHTQKATLVCLATGFYPDHVELSWWVNGKEVHSGVCTDPQPLKEQPALNDSRYCLSSRLRVSATFWQNPRNHFRCQVQFYGLSENDEWTQDRAKPVTQIVSAEAWGRADCGFTSESYQQGVLSATILYEILLGKATLYAVLVSALVLMAMVKRKDSRGRAKRSGSGATNFSLLKQAGDVEENPGPTRGHMTEYKPTVRLATRDDVPRAVRTLAAAFADYPATRHTVDPDRHIERVTELQELFLTRVGLDIGKVWVADDGAAVAVWTTPESVEAGAVFAEIGPRMAELSGSRLAAQQQMEGLLAPHRPKEPAWFLATVGVSPDHQGKGLGSAVVLPGVEAAERAGVPAFLETSAPRNLPFYERLGFTVTADVEVPEGPRTWCMTRKPGA

SEQ ID NO: 14260 - protein, 479 aa, Artificial Sequence
  Synthetic Polypeptide
MALPVTALLLPLALLLHAARPACQVQLVESGGGLVQAGDSVTLSCTASGRTFSSYALAWFRQRPGKEREFVAGLRWGGPTNYADSVKDRFTISGDSAKHTMYLQMNSLKPEDTAVYYCGYNPGGWAVPSQYEYDSWGQGTQVTVSSGTGGGGSGGGGSGGGGSEFEADIYQTPRYLVIGTGKKITLECSQTMGHDKMYWYQQDPGMELHLIHYSYGVNSTEKGDLSSESTVSRIRTEHFPLTLESARPSHTSQYLCASSEARGLAEFTDTQYFGPGTRLTVLEGKPIPNPLLGLDSTGSGEDLKNVFPPEVAVFEPSEAEISHTQKATLVCLATGFYPDHVELSWWVNGKEVHSGVCTDPQPLKEQPALNDSRYCLSSRLRVSATFWQNPRNHFRCQVQFYGLSENDEWTQDRAKPVTQIVSAEAWGRADCGFTSESYQQGVLSATILYEILLGKATLYAVLVSALVLMAMVKRKDSRG

SEQ ID NO: 14261 - protein, 453 aa, Artificial Sequence
  Synthetic Polypeptide
MDWIWRILFLVGAATGAHSFEQVQLQQPGAELVKPGASVKMSCKASGYAFSSYWINWMKQKPGQGLEWIGQIYPGDGTENRFSVNFQKAAKSFSLKISDSQLGDAAMYFCAYRSAVNARLMFGDGTQLVVKPNTREQKLISEEDGSGIQNPDPAVYQLRDSKSSDKSVCLFTDFDSQTNVSQSKDSDVYITDKCVLDMRSMDFKSNSAVAWSNKSDFACANAFNNSIIPEDTFFPSPESSCDVKLVEKSFETDTNLNFQNLSVIGFRILLLKVAGFNLLMTLRLWSSRAKRSGSGVKQTLNFDLLKLAGDVESNPGPSRGHMAKPLSQEESTLIERATATINSIPISEDYSVASAALSSDGRIFTGVNVYHFTGGPCAELVVLGTAAAAAAGNLTCIVAIGNENRGILSPCGRCRQVLLDLHPGIKAIVKDSDGQPTAVGIRELLPSGYVWEG

SEQ ID NO: 14262 - protein, 287 aa, Artificial Sequence
  Synthetic Polypeptide
MDWIWRILFLVGAATGAHSFEQVQLQQPGAELVKPGASVKMSCKASGYAFSSYWINWMKQKPGQGLEWIGQIYPGDGTENRFSVNFQKAAKSFSLKISDSQLGDAAMYFCAYRSAVNARLMFGDGTQLVVKPNTREQKLISEEDGSGIQNPDPAVYQLRDSKSSDKSVCLFTDFDSQTNVSQSKDSDVYITDKCVLDMRSMDFKSNSAVAWSNKSDFACANAFNNSIIPEDTFFPSPESSCDVKLVEKSFETDTNLNFQNLSVIGFRILLLKVAGFNLLMTLRLWSS

SEQ ID NO: 14263 - protein, 786 aa, Artificial Sequence
  Synthetic Polypeptide
MALPVTALLLPLALLLHAARPACQVQLVESGGGLVQAGDSVTLSCTASGRTFSSYALAWFRQRPGKEREFVAGLRWGGPTNYADSVKDRFTISGDSAKHTMYLQMNSLKPEDTAVYYCGYNPGGWAVPSQYEYDSWGQGTQVTVSSGTGGGGSGGGGSGGGGSEFEADIYQTPRYLVIGTGKKITLECSQTMGHDKMYWYQQDPGMELHLIHYSYGVNSTEKGDLSSESTVSRIRTEHFPLTLESARPSHTSQYLCASSEARGLAEFTDTQYFGPGTRLTVGGGGSGGGGSGGGGSQVQLQQPGAELVKPGASVKMSCKASGYAFSSYWINWMKQKPGQGLEWIGQIYPGDGTENRFSVNFQKAAKSFSLKISDSQLGDAAMYFCAYRSAVNARLMFGDGTQLVVKPNTRGSGIQNPDPAVYQLRDSKSSDKSVCLFTDFDSQTNVSQSKDSDVYITDKTVLDMRSMDFKSNSAVAWSNKSDFACANAFNNSIIPEDTFFPSSDVPCDVKLVEKSFETDTNLNFQNLSVIGFRILLLKVAGFNLLMTLRLWSSRAKRSGSGVKQTLNFDLLKLAGDVESNPGPSRGHMTEYKPTVRLATRDDVPRAVRTLAAAFADYPATRHTVDPDRHIERVTELQELFLTRVGLDIGKVWVADDGAAVAVWTTPESVEAGAVFAEIGPRMAELSGSRLAAQQQMEGLLAPHRPKEPAWFLATVGVSPDHQGKGLGSAVVLPGVEAAERAGVPAFLETSAPRNLPFYERLGFTVTADVEVPEGPRTWCMTRKPGA

SEQ ID NO: 14264 - protein, 818 aa, Artificial Sequence
  Synthetic Polypeptide
MALPVTALLLPLALLLHAARPACQVQLVESGGGLVQAGDSVTLSCTASGRTFSSYALAWFRQRPGKEREFVAGLRWGGPTNYADSVKDRFTISGDSAKHTMYLQMNSLKPEDTAVYYCGYNPGGWAVPSQYEYDSWGQGTQVTVSSGTGGGGSGGGGSGGGGSEFEADIYQTPRYLVIGTGKKITLECSQTMGHDKMYWYQQDPGMELHLIHYSYGVNSTEKGDLSSESTVSRIRTEHFPLTLESARPSHTSQYLCASSEARGLAEFTDTQYFGPGTRLTVGGGGSGGGGSGGGGSQVQLQQPGAELVKPGASVKMSCKASGYAFSSYWINWMKQKPGQGLEWIGQIYPGDGTENRFSVNFQKAAKSFSLKISDSQLGDAAMYFCAYRSAVNARLMFGDGTQLVVKPNLEDLKNVFPPEVAVFEPSKAEIAHTQKATLVCLATGFYPDHVELSWWVNGKEVHSGVSTDPQPLKEQPALNDSRYCLSSRLRVSATFWQNPRNHFRCQVQFYGLSENDEWTQDRAKPVTQIVSAEAWGRADCGITSASYHQGVLSATILYEILLGKATLYAVLVSALVLMAMVKRKDSRGRAKRSGSGATNFSLLKQAGDVEENPGPTRGHMTEYKPTVRLATRDDVPRAVRTLAAAFADYPATRHTVDPDRHIERVTELQELFLTRVGLDIGKVWVADDGAAVAVWTTPESVEAGAVFAEIGPRMAELSGSRLAAQQQMEGLLAPHRPKEPAWFLATVGVSPDHQGKGLGSAVVLPGVEAAERAGVPAFLETSAPRNLPFYERLGFTVTADVEVPEGPRTWCMTRKPGA

SEQ ID NO: 14265 - protein, 1136 aa, Artificial Sequence
  Synthetic Polypeptide
MALPVTALLLPLALLLHAARPACQVQLVESGGGLVQAGDSVTLSCTASGRTFSSYALAWFRQRPGKEREFVAGLRWGGPTNYADSVKDRFTISGDSAKHTMYLQMNSLKPEDTAVYYCGYNPGGWAVPSQYEYDSWGQGTQVTVSSGTGGGGSGGGGSGGGGSEFEADIYQTPRYLVIGTGKKITLECSQTMGHDKMYWYQQDPGMELHLIHYSYGVNSTEKGDLSSESTVSRIRTEHFPLTLESARPSHTSQYLCASSEARGLAEFTDTQYFGPGTRLTVLEIQNPDPAVYQLRDSKSSDKSVCLFTDFDSQTNVSQSKDSDVYITDKCVLDMRSMDFKSNSAVAWSNKSDFACANAFNNSIIPEDTFFPSSDVPCDVKLVEKSFETDTNLNFQNLSVIGFRILLLKVAGFNLLMTLRLWSSRAKRSGSGVKQTLNFDLLKLAGDVESNPGPTSMDWIWRILFLVGAATGAHSGPQVQLQESGGGLAQAGGSLRLSCAASGRTFSMGWFRQAPGKEREFVAAITYSGGSPYYASSVRGRFTISRDNAKNTVYLQMNSLKPEDTAVYYCAANPTYGSDWNAENWGQGTQVTVSSGSGGGGSGGGGSGGGGSFEQVQLQQPGAELVKPGASVKMSCKASGYAFSSYWINWMKQKPGQGLEWIGQIYPGDGTENRFSVNFQKAAKSFSLKISDSQLGDAAMYFCAYRSAVNARLMFGDGTQLVVKPNTREDLKNVFPPEVAVFEPSKAEIAHTQKATLVCLATGFYPDHVELSWWVNGKEVHSGVCTDPQPLKEQPALNDSRYCLSSRLRVSATFWQNPRNHFRCQVQFYGLSENDEWTQDRAKPVTQIVSAEAWGRADCGITSASYHQGVLSATILYEILLGKATLYAVLVSALVLMAMVKRKDSRGRAKRSGSGATNFSLLKQAGDVEENPGPSRGHMTEYKPTVRLATRDDVPRAVRTLAAAFADYPATRHTVDPDRHIERVTELQELFLTRVGLDIGKVWVADDGAAVAVWTTPESVEAGAVFAEIGPRMAELSGSRLAAQQQMEGLLAPHRPKEPAWFLATVGVSPDHQGKGLGSAVVLPGVEAAERAGVPAFLETSAPRNLPFYERLGFTVTADVEVPEGPRTWCMTRKPGA

SEQ ID NO: 14266 - protein, 1135 aa, Artificial Sequence
  Synthetic Polypeptide
MALPVTALLLPLALLLHAARPACQVQLVESGGGLVQAGDSVTLSCTASGRTFSSYALAWFRQRPGKEREFVAGLRWGGPTNYADSVKDRFTISGDSAKHTMYLQMNSLKPEDTAVYYCGYNPGGWAVPSQYEYDSWGQGTQVTVSSGTGGGGSGGGGSGGGGSEFEADIYQTPRYLVIGTGKKITLECSQTMGHDKMYWYQQDPGMELHLIHYSYGVNSTEKGDLSSESTVSRIRTEHFPLTLESARPSHTSQYLCASSEARGLAEFTDTQYFGPGTRLTVLEDLKNVFPPEVAVFEPSKAEIAHTQKATLVCLATGFYPDHVELSWWVNGKEVHSGVCTDPQPLKEQPALNDSRYCLSSRLRVSATFWQNPRNHFRCQVQFYGLSENDEWTQDRAKPVTQIVSAEAWGRADCGITSASYHQGVLSATILYEILLGKATLYAVLVSALVLMAMVKRKDSRGRAKRSGSGATNFSLLKQAGDVEENPGPTSMDWIWRILFLVGAATGAHSGPQVQLQESGGGLAQAGGSLRLSCAASGRTFSMGWFRQAPGKEREFVAAITYSGGSPYYASSVRGRFTISRDNAKNTVYLQMNSLKPEDTAVYYCAANPTYGSDWNAENWGQGTQVTVSSGSGGGGSGGGGSGGGGSFEQVQLQQPGAELVKPGASVKMSCKASGYAFSSYWINWMKQKPGQGLEWIGQIYPGDGTENRFSVNFQKAAKSFSLKISDSQLGDAAMYFCAYRSAVNARLMFGDGTQLVVKPNTRIQNPDPAVYQLRDSKSSDKSVCLFTDFDSQTNVSQSKDSDVYITDKCVLDMRSMDFKSNSAVAWSNKSDFACANAFNNSIIPEDTFFPSSDVPCDVKLVEKSFETDTNLNFQNLSVIGFRILLLKVAGFNLLMTLRLWSSRAKRSGSGVKQTLNFDLLKLAGDVESNPGPSRGHMTEYKPTVRLATRDDVPRAVRTLAAAFADYPATRHTVDPDRHIERVTELQELFLTRVGLDIGKVWVADDGAAVAVWTTPESVEAGAVFAEIGPRMAELSGSRLAAQQQMEGLLAPHRPKEPAWFLATVGVSPDHQGKGLGSAVVLPGVEAAERAGVPAFLETSAPRNLPFYERLGFTVTADVEVPEGPRTWCMTRKPGA

SEQ ID NO: 14267 - protein, 1135 aa, Artificial Sequence
  Synthetic Polypeptide
MALPVTALLLPLALLLHAARPACQVQLVESGGGLVQAGDSVTLSCTASGRTFSSYALAWFRQRPGKEREFVAGLRWGGPTNYADSVKDRFTISGDSAKHTMYLQMNSLKPEDTAVYYCGYNPGGWAVPSQYEYDSWGQGTQVTVSSGTGGGGSGGGGSGGGGSEFEADIYQTPRYLVIGTGKKITLECSQTMGHDKMYWYQQDPGMELHLIHYSYGVNSTEKGDLSSESTVSRIRTEHFPLTLESARPSHTSQYLCASSEARGLAEFTDTQYFGPGTRLTVLEDLKNVFPPEVAVFEPSEAEISHTQKATLVCLATGFYPDHVELSWWVNGKEVHSGVCTDPQPLKEQPALNDSRYCLSSRLRVSATFWQNPRNHFRCQVQFYGLSENDEWTQDRAKPVTQIVSAEAWGRADCGFTSESYQQGVLSATILYEILLGKATLYAVLVSALVLMAMVKRKDSRGRAKRSGSGATNFSLLKQAGDVEENPGPTSMDWIWRILFLVGAATGAHSGPQVQLQESGGGLAQAGGSLRLSCAASGRTFSMGWFRQAPGKEREFVAAITYSGGSPYYASSVRGRFTISRDNAKNTVYLQMNSLKPEDTAVYYCAANPTYGSDWNAENWGQGTQVTVSSGSGGGGSGGGGSGGGGSFEQVQLQQPGAELVKPGASVKMSCKASGYAFSSYWINWMKQKPGQGLEWIGQIYPGDGTENRFSVNFQKAAKSFSLKISDSQLGDAAMYFCAYRSAVNARLMFGDGTQLVVKPNTRIQNPDPAVYQLRDSKSSDKSVCLFTDFDSQTNVSQSKDSDVYITDKCVLDMRSMDFKSNSAVAWSNKSDFACANAFNNSIIPEDTFFPSPESSCDVKLVEKSFETDTNLNFQNLSVIGFRILLLKVAGFNLLMTLRLWSSRAKRSGSGVKQTLNFDLLKLAGDVESNPGPSRGHMTEYKPTVRLATRDDVPRAVRTLAAAFADYPATRHTVDPDRHIERVTELQELFLTRVGLDIGKVWVADDGAAVAVWTTPESVEAGAVFAEIGPRMAELSGSRLAAQQQMEGLLAPHRPKEPAWFLATVGVSPDHQGKGLGSAVVLPGVEAAERAGVPAFLETSAPRNLPFYERLGFTVTADVEVPEGPRTWCMTRKPGA

SEQ ID NO: 14268 - protein, 902 aa, Artificial Sequence
  Synthetic Polypeptide
MALPVTALLLPLALLLHAARPACQVQLVESGGGLVQAGDSVTLSCTASGRTFSSYALAWFRQRPGKEREFVAGLRWGGPTNYADSVKDRFTISGDSAKHTMYLQMNSLKPEDTAVYYCGYNPGGWAVPSQYEYDSWGQGTQVTVSSGTGGGGSGGGGSGGGGSEFEADIYQTPRYLVIGTGKKITLECSQTMGHDKMYWYQQDPGMELHLIHYSYGVNSTEKGDLSSESTVSRIRTEHFPLTLESARPSHTSQYLCASSEARGLAEFTDTQYFGPGTRLTVLEDLKNVFPPEVAVFEPSEAEISHTQKATLVCLATGFYPDHVELSWWVNGKEVHSGVCTDPQPLKEQPALNDSRYCLSSRLRVSATFWQNPRNHFRCQVQFYGLSENDEWTQDRAKPVTQIVSAEAWGRADCGFTSESYQQGVLSATILYEILLGKATLYAVLVSALVLMAMVKRKDSRGRAKRSGSGATNFSLLKQAGDVEENPGPTSMDWIWRILFLVGAATGAHSGPQVQLQESGGGLAQAGGSLRLSCAASGRTFSMGWFRQAPGKEREFVAAITYSGGSPYYASSVRGRFTISRDNAKNTVYLQMNSLKPEDTAVYYCAANPTYGSDWNAENWGQGTQVTVSSGSGGGGSGGGGSGGGGSFEQVQLQQPGAELVKPGASVKMSCKASGYAFSSYWINWMKQKPGQGLEWIGQIYPGDGTENRFSVNFQKAAKSFSLKISDSQLGDAAMYFCAYRSAVNARLMFGDGTQLVVKPNTRIQNPDPAVYQLRDSKSSDKSVCLFTDFDSQTNVSQSKDSDVYITDKCVLDMRSMDFKSNSAVAWSNKSDFACANAFNNSIIPEDTFFPSPESSCDVKLVEKSFETDTNLNFQNLSVIGFRILLLKVAGFNLLMTLRLWSS

SEQ ID NO: 14269 - protein, 1127 aa, Artificial Sequence
  Synthetic Polypeptide
MALPVTALLLPLALLLHAARPACQVQLVESGGGLVQAGDSVTLSCTASGRTFSSYALAWFRQRPGKEREFVAGLRWGGPTNYADSVKDRFTISGDSAKHTMYLQMNSLKPEDTAVYYCGYNPGGWAVPSQYEYDSWGQGTQVTVSSGTGGGGSGGGGSGGGGSEFEADIYQTPRYLVIGTGKKITLECSQTMGHDKMYWYQQDPGMELHLIHYSYGVNSTEKGDLSSESTVSRIRTEHFPLTLESARPSHTSQYLCASSEARGLAEFTDTQYFGPGTRLTVLEDLKNVFPPEVAVFEPSEAEISHTQKATLVCLATGFYPDHVELSWWVNGKEVHSGVCTDPQPLKEQPALNDSRYCLSSRLRVSATFWQNPRNHFRCQVQFYGLSENDEWTQDRAKPVTQIVSAEAWGRADCGFTSESYQQGVLSATILYEILLGKATLYAVLVSALVLMAMVKRKDSRGRAKRSGSGATNFSLLKQAGDVEENPGPTSMDWIWRILFLVGAATGAHSGPQVQLQESGGGLAQAGGSLRLSCAASGRTFSMGWFRQAPGKEREFVAAITYSGGSPYYASSVRGRFTISRDNAKNTVYLQMNSLKPEDTAVYYCAANPTYGSDWNAENWGQGTQVTVSSGSGGGGSGGGGSGGGGSFEQVQLQQPGAELVKPGASVKMSCKASGYAFSSYWINWMKQKPGQGLEWIGQIYPGDGTENRFSVNFQKAAKSFSLKISDSQLGDAAMYFCAYRSAVNARLMFGDGTQLVVKPNTRIQNPDPAVYQLRDSKSSDKSVCLFTDFDSQTNVSQSKDSDVYITDKCVLDMRSMDFKSNSAVAWSNKSDFACANAFNNSIIPEDTFFPSPESSCDVKLVEKSFETDTNLNFQNLSVIGFRILLLKVAGFNLLMTLRLWSSRAKRSGSGVKQTLNFDLLKLAGDVESNPGPSRGGIHTMATYEVLCEVARKLGTDDREVVLFLLNVFIPQPTLAQLIGALRALKEEGRLTFPLLAECLFRAGRRDLLRDLLHLDPRFLERHLAGTMSYFSPYQLTVLHVDGELCARDIRSLIFLSKDTIGSRSTPQTFLHWVYCMENLDLLGPTDVDALMSMLRSLSRVDLQRQVQTLMGLHLSGPSHSQHYRHTP

SEQ ID NO: 14270 - protein, 906 aa, Artificial Sequence
  Synthetic Polypeptide
MALPVTALLLPLALLLHAARPACQVQLVESGGGLVQAGDSVTLSCTASGRTFSSYALAWFRQRPGKEREFVAGLRWGGPTNYADSVKDRFTISGDSAKHTMYLQMNSLKPEDTAVYYCGYNPGGWAVPSQYEYDSWGQGTQVTVSSGTGGGGSGGGGSGGGGSEFEADIYQTPRYLVIGTGKKITLECSQTMGHDKMYWYQQDPGMELHLIHYSYGVNSTEKGDLSSESTVSRIRTEHFPLTLESARPSHTSQYLCASSEARGLAEFTDTQYFGPGTRLTVLEIQNPDPAVYQLRDSKSSDKSVCLFTDFDSQTNVSQSKDSDVYITDKCVLDMRSMDFKSNSAVAWSNKSDFACANAFNNSIIPEDTFFPSPESSCDVKLVEKSFETDTNLNFQNLSVIGFRILLLKVAGFNLLMTLRLWSSRAKRSGSGVKQTLNFDLLKLAGDVESNPGPTSMDWIWRILFLVGAATGAHSGPQVQLQESGGGLAQAGGSLRLSCAASGRTFSMGWFRQAPGKEREFVAAITYSGGSPYYASSVRGRFTISRDNAKNTVYLQMNSLKPEDTAVYYCAANPTYGSDWNAENWGQGTQVTVSSGSGGGGSGGGGSGGGGSFEQVQLQQPGAELVKPGASVKMSCKASGYAFSSYWINWMKQKPGQGLEWIGQIYPGDGTENRFSVNFQKAAKSFSLKISDSQLGDAAMYFCAYRSAVNARLMFGDGTQLVVKPNTREDLKNVFPPEVAVFEPSEAEISHTQKATLVCLATGFYPDHVELSWWVNGKEVHSGVCTDPQPLKEQPALNDSRYCLSSRLRVSATFWQNPRNHFRCQVQFYGLSENDEWTQDRAKPVTQIVSAEAWGRADCGFTSESYQQGVLSATILYEILLGKATLYAVLVSALVLMAMVKRKDSRG

SEQ ID NO: 14271 - protein, 1128 aa, Artificial Sequence
  Synthetic Polypeptide
MALPVTALLLPLALLLHAARPACQVQLVESGGGLVQAGDSVTLSCTASGRTFSSYALAWFRQRPGKEREFVAGLRWGGPTNYADSVKDRFTISGDSAKHTMYLQMNSLKPEDTAVYYCGYNPGGWAVPSQYEYDSWGQGTQVTVSSGTGGGGSGGGGSGGGGSEFEADIYQTPRYLVIGTGKKITLECSQTMGHDKMYWYQQDPGMELHLIHYSYGVNSTEKGDLSSESTVSRIRTEHFPLTLESARPSHTSQYLCASSEARGLAEFTDTQYFGPGTRLTVLEIQNPDPAVYQLRDSKSSDKSVCLFTDFDSQTNVSQSKDSDVYITDKCVLDMRSMDFKSNSAVAWSNKSDFACANAFNNSIIPEDTFFPSPESSCDVKLVEKSFETDTNLNFQNLSVIGFRILLLKVAGFNLLMTLRLWSSRAKRSGSGVKQTLNFDLLKLAGDVESNPGPTSMDWIWRILFLVGAATGAHSGPQVQLQESGGGLAQAGGSLRLSCAASGRTFSMGWFRQAPGKEREFVAAITYSGGSPYYASSVRGRFTISRDNAKNTVYLQMNSLKPEDTAVYYCAANPTYGSDWNAENWGQGTQVTVSSGSGGGGSGGGGSGGGGSFEQVQLQQPGAELVKPGASVKMSCKASGYAFSSYWINWMKQKPGQGLEWIGQIYPGDGTENRFSVNFQKAAKSFSLKISDSQLGDAAMYFCAYRSAVNARLMFGDGTQLVVKPNTREDLKNVFPPEVAVFEPSEAEISHTQKATLVCLATGFYPDHVELSWWVNGKEVHSGVCTDPQPLKEQPALNDSRYCLSSRLRVSATFWQNPRNHFRCQVQFYGLSENDEWTQDRAKPVTQIVSAEAWGRADCGFTSESYQQGVLSATILYEILLGKATLYAVLVSALVLMAMVKRKDSRGRAKRSGSGATNFSLLKQAGDVEENPGPSRGGIHTMATYEVLCEVARKLGTDDREVVLFLLNVFIPQPTLAQLIGALRALKEEGRLTFPLLAECLFRAGRRDLLRDLLHLDPRFLERHLAGTMSYFSPYQLTVLHVDGELCARDIRSLIFLSKDTIGSRSTPQTFLHWVYCMENLDLLGPTDVDALMSMLRSLSRVDLQRQVQTLMGLHLSGPSHSQHYRHTP

SEQ ID NO: 14272 - protein, 1135 aa, Artificial Sequence
  Synthetic Polypeptide
MALPVTALLLPLALLLHAARPACQVQLVESGGGLVQAGDSVTLSCTASGRTFSSYALAWFRQRPGKEREFVAGLRWGGPTNYADSVKDRFTISGDSAKHTMYLQMNSLKPEDTAVYYCGYNPGGWAVPSQYEYDSWGQGTQVTVSSGTGGGGSGGGGSGGGGSEFEADIYQTPRYLVIGTGKKITLECSQTMGHDKMYWYQQDPGMELHLIHYSYGVNSTEKGDLSSESTVSRIRTEHFPLTLESARPSHTSQYLCASSEARGLAEFTDTQYFGPGTRLTVLEDLKNVFPPEVAVFEPSEAEISHTQKATLVCLATGFYPDHVELSWWVNGKEVHSGVSTDPQPLKEQPALNDSRYCLSSRLRVSATFWQNPRNHFRCQVQFYGLSENDEWTQDRAKPVTQIVSAEAWGRADCGFTSESYQQGVLSATILYEILLGKATLYAVLVSALVLMAMVKRKDSRGRAKRSGSGATNFSLLKQAGDVEENPGPTSMDWIWRILFLVGAATGAHSGPQVQLQESGGGLAQAGGSLRLSCAASGRTFSMGWFRQAPGKEREFVAAITYSGGSPYYASSVRGRFTISRDNAKNTVYLQMNSLKPEDTAVYYCAANPTYGSDWNAENWGQGTQVTVSSGSGGGGSGGGGSGGGGSFEQVQLQQPGAELVKPGASVKMSCKASGYAFSSYWINWMKQKPGQGLEWIGQIYPGDGTENRFSVNFQKAAKSFSLKISDSQLGDAAMYFCAYRSAVNARLMFGDGTQLVVKPNTRIQNPDPAVYQLRDSKSSDKSVCLFTDFDSQTNVSQSKDSDVYITDKTVLDMRSMDFKSNSAVAWSNKSDFACANAFNNSIIPEDTFFPSPESSCDVKLVEKSFETDTNLNFQNLSVIGFRILLLKVAGFNLLMTLRLWSSRAKRSGSGVKQTLNFDLLKLAGDVESNPGPSRGHMTEYKPTVRLATRDDVPRAVRTLAAAFADYPATRHTVDPDRHIERVTELQELFLTRVGLDIGKVWVADDGAAVAVWTTPESVEAGAVFAEIGPRMAELSGSRLAAQQQMEGLLAPHRPKEPAWFLATVGVSPDHQGKGLGSAVVLPGVEAAERAGVPAFLETSAPRNLPFYERLGFTVTADVEVPEGPRTWCMTRKPGA

SEQ ID NO: 14273 - protein, 1217 aa, Artificial Sequence
  Synthetic Polypeptide
MALPVTALLLPLALLLHAARPACQVQLVESGGGLVQAGDSVTLSCTASGRTFSSYALAWFRQRPGKEREFVAGLRWGGPTNYADSVKDRFTISGDSAKHTMYLQMNSLKPEDTAVYYCGYNPGGWAVPSQYEYDSWGQGTQVTVSSGTGGGGSGGGGSGGGGSEFEADIYQTPRYLVIGTGKKITLECSQTMGHDKMYWYQQDPGMELHLIHYSYGVNSTEKGDLSSESTVSRIRTEHFPLTLESARPSHTSQYLCASSEARGLAEFTDTQYFGPGTRLTVLEDLKNVFPPEVAVFEPSEAEISHTQKATLVCLATGFYPDHVELSWWVNGKEVHSGVSTDPQPLKEQPALNDSRYCLSSRLRVSATFWQNPRNHFRCQVQFYGLSENDEWTQDRAKPVTQIVSAEAWGRADCGFTSESYQQGVLSATILYEILLGKATLYAVLVSALVLMAMVKRKDSRGRAKRSGSGATNFSLLKQAGDVEENPGPTSMDWIWRILFLVGAATGAHSGPQVQLQESGGGLAQAGGSLRLSCAASGRTFSMGWFRQAPGKEREFVAAITYSGGSPYYASSVRGRFTISRDNAKNTVYLQMNSLKPEDTAVYYCAANPTYGSDWNAENWGQGTQVTVSSGSGGGGSGGGGSGGGGSFEQVQLQQPGAELVKPGASVKMSCKASGYAFSSYWINWMKQKPGQGLEWIGQIYPGDGTENRFSVNFQKAAKSFSLKISDSQLGDAAMYFCAYRSAVNARLMFGDGTQLVVKPNTREQKLISEEDGSGTPFPSLAPPIMLLVDGKQQMVVVCLVLDVAPPGLDSPIWFSAGNGSALDAFTYGPSPATDGTWTNLAHLSLPSEELASWEPLVCHTGPGAEGHSRSTQPMHLSGEASTARTCPQEPLRGTPGGALWLGVLRLLLFKLLLFDLLLTCSCLCDPAGPLPSPATTTRLRALGSHRLHPATETGGREATSSPRPQPRDRRWGDTPPGRKPGSPVRAKRSGSGVKQTLNFDLLKLAGDVESNPGPSRGHMTEYKPTVRLATRDDVPRAVRTLAAAFADYPATRHTVDPDRHIERVTELQELFLTRVGLDIGKVWVADDGAAVAVWTTPESVEAGAVFAEIGPRMAELSGSRLAAQQQMEGLLAPHRPKEPAWFLATVGVSPDHQGKGLGSAVVLPGVEAAERAGVPAFLETSAPRNLPFYERLGFTVTADVEVPEGPRTWCMTRKPGA

SEQ ID NO: 14274 - protein, 1172 aa, Artificial Sequence
  Synthetic Polypeptide
MALPVTALLLPLALLLHAARPACQVQLVESGGGLVQAGDSVTLSCTASGRTFSSYALAWFRQRPGKEREFVAGLRWGGPTNYADSVKDRFTISGDSAKHTMYLQMNSLKPEDTAVYYCGYNPGGWAVPSQYEYDSWGQGTQVTVSSGTGGGGSGGGGSGGGGSEFEADIYQTPRYLVIGTGKKITLECSQTMGHDKMYWYQQDPGMELHLIHYSYGVNSTEKGDLSSESTVSRIRTEHFPLTLESARPSHTSQYLCASSEARGLAEFTDTQYFGPGTRLTVLEGKPIPNPLLGLDSTGSGDKQLDADVSPKPTIFLPSIAETKLQKAGTYLCLLEKFFPDVIKIHWQEKKSNTILGSQEGNTMKTNDTYMKFSWLTVPEKSLDKEHRCIVRHENNKNGVDQEIIFPPIKTDVITMDPKDNCSKDANDTLLLQLTNTSAYYMYLLLLLKSVVYFAIITCCLLRRTAFCCNGEKSRAKRSGSGATNFSLLKQAGDVEENPGPTSMDWIWRILFLVGAATGAHSGPQVQLQESGGGLAQAGGSLRLSCAASGRTFSMGWFRQAPGKEREFVAAITYSGGSPYYASSVRGRFTISRDNAKNTVYLQMNSLKPEDTAVYYCAANPTYGSDWNAENWGQGTQVTVSSGSGGGGSGGGGSGGGGSFEQVQLQQPGAELVKPGASVKMSCKASGYAFSSYWINWMKQKPGQGLEWIGQIYPGDGTENRFSVNFQKAAKSFSLKISDSQLGDAAMYFCAYRSAVNARLMFGDGTQLVVKPNTREQKLISEEDGSGSQPHTKPSVFVMKNGTNVACLVKEFYPKDIRINLVSSKKITEFDPAIVISPSGKYNAVKLGKYEDSNSVTCSVQHDNKTVHSTDFEVKTDSTDHVKPKETENTKQPSKSCHKPKAIVHTEKVNMMSLTVLGLRMLFAKTVAVNFLLTAKLFFLRAKRSGSGVKQTLNFDLLKLAGDVESNPGPSRGHMTEYKPTVRLATRDDVPRAVRTLAAAFADYPATRHTVDPDRHIERVTELQELFLTRVGLDIGKVWVADDGAAVAVWTTPESVEAGAVFAEIGPRMAELSGSRLAAQQQMEGLLAPHRPKEPAWFLATVGVSPDHQGKGLGSAVVLPGVEAAERAGVPAFLETSAPRNLPFYERLGFTVTADVEVPEGPRTWCMTRKPGA

SEQ ID NO: 14275 - protein, 910 aa, Artificial Sequence
  Synthetic Polypeptide
MALPVTALLLPLALLLHAARPACQVQLVESGGGLVQAGDSVTLSCTASGRTFSSYALAWFRQRPGKEREFVAGLRWGGPTNYADSVKDRFTISGDSAKHTMYLQMNSLKPEDTAVYYCGYNPGGWAVPSQYEYDSWGQGTQVTVSSGTGGGGSGGGGSGGGGSEFEADIYQTPRYLVIGTGKKITLECSQTMGHDKMYWYQQDPGMELHLIHYSYGVNSTEKGDLSSESTVSRIRTEHFPLTLESARPSHTSQYLCASSEARGLAEFTDTQYFGPGTRLTVLESQPHTKPSVFVMKNGTNVACLVKEFYPKDIRINLVSSKKITEFDPAIVISPSGKYNAVKLGKYEDSNSVTCSVQHDNKTVHSTDFEVKTDSTDHVKPKETENTKQPSKSCHKPKAIVHTEKVNMMSLTVLGLRMLFAKTVAVNFLLTAKLFFLRAKRSGSGATNFSLLKQAGDVEENPGPTSMDWIWRILFLVGAATGAHSGPQVQLQESGGGLAQAGGSLRLSCAASGRTFSMGWFRQAPGKEREFVAAITYSGGSPYYASSVRGRFTISRDNAKNTVYLQMNSLKPEDTAVYYCAANPTYGSDWNAENWGQGTQVTVSSGSGGGGSGGGGSGGGGSFEQVQLQQPGAELVKPGASVKMSCKASGYAFSSYWINWMKQKPGQGLEWIGQIYPGDGTENRFSVNFQKAAKSFSLKISDSQLGDAAMYFCAYRSAVNARLMFGDGTQLVVKPNTRDKQLDADVSPKPTIFLPSIAETKLQKAGTYLCLLEKFFPDVIKIHWQEKKSNTILGSQEGNTMKTNDTYMKFSWLTVPEKSLDKEHRCIVRHENNKNGVDQEIIFPPIKTDVITMDPKDNCSKDANDTLLLQLTNTSAYYMYLLLLLKSVVYFAIITCCLLRRTAFCCNGEKS

SEQ ID NO: 14276 - protein, 1312 aa, Artificial Sequence
  Synthetic Polypeptide
MALPVTALLLPLALLLHAARPACQVQLVESGGGLVQAGDSVTLSCTASGRTFSSYALAWFRQRPGKEREFVAGLRWGGPTNYADSVKDRFTISGDSAKHTMYLQMNSLKPEDTAVYYCGYNPGGWAVPSQYEYDSWGQGTQVTVSSGTGGGGSGGGGSGGGGSEFEADIYQTPRYLVIGTGKKITLECSQTMGHDKMYWYQQDPGMELHLIHYSYGVNSTEKGDLSSESTVSRIRTEHFPLTLESARPSHTSQYLCASSEARGLAEFTDTQYFGPGTRLTVGQPKANPTVTLFPPSSEELQANKATLVCLISDFYPGAVTVAWKADGSPVKAGVETTKPSKQSNNKYAASSYLSLTPEQWKSHRSYSCQVTHEGSTVEKTVAPTECSGSQSFGLLDPKLCYLLDGILFIYGVILTALFLRVKFSRSADAPAYQQGQNQLYNELNLGRREEYDVLDKRRGRDPEMGGKPQRRKNPQEGLYNELQKDKMAEAYSEIGMKGERRRGKGHDGLYQGLSTATKDTYDALHMQALPPRRAKRSGSGATNFSLLKQAGDVEENPGPTSMDWIWRILFLVGAATGAHSGPQVQLQESGGGLAQAGGSLRLSCAASGRTFSMGWFRQAPGKEREFVAAITYSGGSPYYASSVRGRFTISRDNAKNTVYLQMNSLKPEDTAVYYCAANPTYGSDWNAENWGQGTQVTVSSGSGGGGSGGGGSGGGGSFEQVQLQQPGAELVKPGASVKMSCKASGYAFSSYWINWMKQKPGQGLEWIGQIYPGDGTENRFSVNFQKAAKSFSLKISDSQLGDAAMYFCAYRSAVNARLMFGDGTQLVVKPNASTKGPSVFPLAPSSKSTSGGTAALGCLVKDYFPEPVTVSWNSGALTSGVHTFPAVLQSSGLYSLSSVVTVPSSSLGTQTYICNVNHKPSNTKVDKRVEPKSCGTQSFGLLDPKLCYLLDGILFIYGVILTALFLRVKFSRSADAPAYQQGQNQLYNELNLGRREEYDVLDKRRGRDPEMGGKPQRRKNPQEGLYNELQKDKMAEAYSEIGMKGERRRGKGHDGLYQGLSTATKDTYDALHMQALPPRRAKRSGSGVKQTLNFDLLKLAGDVESNPGPSRGHMTEYKPTVRLATRDDVPRAVRTLAAAFADYPATRHTVDPDRHIERVTELQELFLTRVGLDIGKVWVADDGAAVAVWTTPESVEAGAVFAEIGPRMAELSGSRLAAQQQMEGLLAPHRPKEPAWFLATVGVSPDHQGKGLGSAVVLPGVEAAERAGVPAFLETSAPRNLPFYERLGFTVTADVEVPEGPRTWCMTRKPGA

SEQ ID NO: 14277 - protein, 1098 aa, Artificial Sequence
  Synthetic Polypeptide
MALPVTALLLPLALLLHAARPACQVQLVESGGGLVQAGDSVTLSCTASGRTFSSYALAWFRQRPGKEREFVAGLRWGGPTNYADSVKDRFTISGDSAKHTMYLQMNSLKPEDTAVYYCGYNPGGWAVPSQYEYDSWGQGTQVTVSSGTGGGGSGGGGSGGGGSEFEADIYQTPRYLVIGTGKKITLECSQTMGHDKMYWYQQDPGMELHLIHYSYGVNSTEKGDLSSESTVSRIRTEHFPLTLESARPSHTSQYLCASSEARGLAEFTDTQYFGPGTRLTVLEDLKNVFPPEVAVFEPSEAEISHTQKATLVCLATGFYPDHVELSWWVNGKEVHSGVSTDPQPLKEQPALNDSRYCLSSRLRVSATFWQNPRNHFRCQVQFYGLSENDEWTQDRAKPVTQIVSAEAWGRADCGSQSFGLLDPKLCYLLDGILFIYGVILTALFLRVKFSRSADAPAYQQGQNQLYNELNLGRREEYDVLDKRRGRDPEMGGKPQRRKNPQEGLYNELQKDKMAEAYSEIGMKGERRRGKGHDGLYQGLSTATKDTYDALHMQALPPRRAKRSGSGATNFSLLKQAGDVEENPGPTSMDWIWRILFLVGAATGAHSGPQVQLQESGGGLAQAGGSLRLSCAASGRTFSMGWFRQAPGKEREFVAAITYSGGSPYYASSVRGRFTISRDNAKNTVYLQMNSLKPEDTAVYYCAANPTYGSDWNAENWGQGTQVTVSSGSGGGGSGGGGSGGGGSFEQVQLQQPGAELVKPGASVKMSCKASGYAFSSYWINWMKQKPGQGLEWIGQIYPGDGTENRFSVNFQKAAKSFSLKISDSQLGDAAMYFCAYRSAVNARLMFGDGTQLVVKPNTRIQNPDPAVYQLRDSKSSDKSVCLFTDFDSQTNVSQSKDSDVYITDKTVLDMRSMDFKSNSAVAWSNKSDFACANAFNNSIIPEDTFFPSPESSCGTQSFGLLDPKLCYLLDGILFIYGVILTALFLRVKFSRSADAPAYQQGQNQLYNELNLGRREEYDVLDKRRGRDPEMGGKPQRRKNPQEGLYNELQKDKMAEAYSEIGMKGERRRGKGHDGLYQGLSTATKDTYDALHMQALPPR

SEQ ID NO: 14278 - protein, 1098 aa, Artificial Sequence
  Synthetic Polypeptide
MALPVTALLLPLALLLHAARPACQVQLVESGGGLVQAGDSVTLSCTASGRTFSSYALAWFRQRPGKEREFVAGLRWGGPTNYADSVKDRFTISGDSAKHTMYLQMNSLKPEDTAVYYCGYNPGGWAVPSQYEYDSWGQGTQVTVSSGTGGGGSGGGGSGGGGSEFEADIYQTPRYLVIGTGKKITLECSQTMGHDKMYWYQQDPGMELHLIHYSYGVNSTEKGDLSSESTVSRIRTEHFPLTLESARPSHTSQYLCASSEARGLAEFTDTQYFGPGTRLTVLEDLKNVFPPEVAVFEPSKAEIAHTQKATLVCLATGFYPDHVELSWWVNGKEVHSGVCTDPQPLKEQPALNDSRYCLSSRLRVSATFWQNPRNHFRCQVQFYGLSENDEWTQDRAKPVTQIVSAEAWGRADCGSQSFGLLDPKLCYLLDGILFIYGVILTALFLRVKFSRSADAPAYQQGQNQLYNELNLGRREEYDVLDKRRGRDPEMGGKPQRRKNPQEGLYNELQKDKMAEAYSEIGMKGERRRGKGHDGLYQGLSTATKDTYDALHMQALPPRRAKRSGSGATNFSLLKQAGDVEENPGPTSMDWIWRILFLVGAATGAHSGPQVQLQESGGGLAQAGGSLRLSCAASGRTFSMGWFRQAPGKEREFVAAITYSGGSPYYASSVRGRFTISRDNAKNTVYLQMNSLKPEDTAVYYCAANPTYGSDWNAENWGQGTQVTVSSGSGGGGSGGGGSGGGGSFEQVQLQQPGAELVKPGASVKMSCKASGYAFSSYWINWMKQKPGQGLEWIGQIYPGDGTENRFSVNFQKAAKSFSLKISDSQLGDAAMYFCAYRSAVNARLMFGDGTQLVVKPNTRIQNPDPAVYQLRDSKSSDKSVCLFTDFDSQTNVSQSKDSDVYITDKCVLDMRSMDFKSNSAVAWSNKSDFACANAFNNSIIPEDTFFPSSDVPCGTQSFGLLDPKLCYLLDGILFIYGVILTALFLRVKFSRSADAPAYQQGQNQLYNELNLGRREEYDVLDKRRGRDPEMGGKPQRRKNPQEGLYNELQKDKMAEAYSEIGMKGERRRGKGHDGLYQGLSTATKDTYDALHMQALPPR

SEQ ID NO: 14279 - protein, 1169 aa, Artificial Sequence
  Synthetic Polypeptide
MALPVTALLLPLALLLHAARPACQVQLVESGGGLVQAGDSVTLSCTASGRTFSSYALAWFRQRPGKEREFVAGLRWGGPTNYADSVKDRFTISGDSAKHTMYLQMNSLKPEDTAVYYCGYNPGGWAVPSQYEYDSWGQGTQVTVSSGTGGGGSGGGGSGGGGSEFEADIYQTPRYLVIGTGKKITLECSQTMGHDKMYWYQQDPGMELHLIHYSYGVNSTEKGDLSSESTVSRIRTEHFPLTLESARPSHTSQYLCASSEARGLAEFTDTQYFGPGTRLTVLEGKPIPNPLLGLDSTGSGEDLKNVFPPEVAVFEPSEAEISHTQKATLVCLATGFYPDHVELSWWVNGKEVHSGVSTDPQPLKEQPALNDSRYCLSSRLRVSATFWQNPRNHFRCQVQFYGLSENDEWTQDRAKPVTQIVSAEAWGRADCGSQSFGLLDPKLCYLLDGILFIYGVILTALFLRVKFSRSADAPAYQQGQNQLYNELNLGRREEYDVLDKRRGRDPEMGGKPQRRKNPQEGLYNELQKDKMAEAYSEIGMKGERRRGKGHDGLYQGLSTATKDTYDALHMQALPPRRAKRSGSGATNFSLLKQAGDVEENPGPTSMDWIWRILFLVGAATGAHSGPQVQLQESGGGLAQAGGSLRLSCAASGRTFSMGWFRQAPGKEREFVAAITYSGGSPYYASSVRGRFTISRDNAKNTVYLQMNSLKPEDTAVYYCAANPTYGSDWNAENWGQGTQVTVSSGSGGGGSGGGGSGGGGSFEQVQLQQPGAELVKPGASVKMSCKASGYAFSSYWINWMKQKPGQGLEWIGQIYPGDGTENRFSVNFQKAAKSFSLKISDSQLGDAAMYFCAYRSAVNARLMFGDGTQLVVKPNTREQKLISEEDGSGIQNPDPAVYQLRDSKSSDKSVCLFTDFDSQTNVSQSKDSDVYITDKTVLDMRSMDFKSNSAVAWSNKSDFACANAFNNSIIPEDTFFPSPESSCGTQSFGLLDPKLCYLLDGILFIYGVILTALFLRSKRSRLLHSDYMNMTPRRPGPTRKHYQPYAPPRDFAAYRSRVKFSRSADAPAYQQGQNQLYNELNLGRREEYDVLDKRRGRDPEMGGKPQRRKNPQEGLYNELQKDKMAEAYSEIGMKGERRRGKGHDGLYQGLSTATKDTYDALHMQALPPR

SEQ ID NO: 14280 - protein, 1210 aa, Artificial Sequence
  Synthetic Polypeptide
MALPVTALLLPLALLLHAARPACQVQLVESGGGLVQAGDSVTLSCTASGRTFSSYALAWFRQRPGKEREFVAGLRWGGPTNYADSVKDRFTISGDSAKHTMYLQMNSLKPEDTAVYYCGYNPGGWAVPSQYEYDSWGQGTQVTVSSGTGGGGSGGGGSGGGGSEFEADIYQTPRYLVIGTGKKITLECSQTMGHDKMYWYQQDPGMELHLIHYSYGVNSTEKGDLSSESTVSRIRTEHFPLTLESARPSHTSQYLCASSEARGLAEFTDTQYFGPGTRLTVLEGKPIPNPLLGLDSTGSGEDLKNVFPPEVAVFEPSEAEISHTQKATLVCLATGFYPDHVELSWWVNGKEVHSGVSTDPQPLKEQPALNDSRYCLSSRLRVSATFWQNPRNHFRCQVQFYGLSENDEWTQDRAKPVTQIVSAEAWGRADCGSQSFGLLDPKLCYLLDGILFIYGVILTALFLRSKRSRLLHSDYMNMTPRRPGPTRKHYQPYAPPRDFAAYRSRVKFSRSADAPAYQQGQNQLYNELNLGRREEYDVLDKRRGRDPEMGGKPQRRKNPQEGLYNELQKDKMAEAYSEIGMKGERRRGKGHDGLYQGLSTATKDTYDALHMQALPPRRAKRSGSGATNFSLLKQAGDVEENPGPTSMDWIWRILFLVGAATGAHSGPQVQLQESGGGLAQAGGSLRLSCAASGRTFSMGWFRQAPGKEREFVAAITYSGGSPYYASSVRGRFTISRDNAKNTVYLQMNSLKPEDTAVYYCAANPTYGSDWNAENWGQGTQVTVSSGSGGGGSGGGGSGGGGSFEQVQLQQPGAELVKPGASVKMSCKASGYAFSSYWINWMKQKPGQGLEWIGQIYPGDGTENRFSVNFQKAAKSFSLKISDSQLGDAAMYFCAYRSAVNARLMFGDGTQLVVKPNTREQKLISEEDGSGIQNPDPAVYQLRDSKSSDKSVCLFTDFDSQTNVSQSKDSDVYITDKTVLDMRSMDFKSNSAVAWSNKSDFACANAFNNSIIPEDTFFPSPESSCGTQSFGLLDPKLCYLLDGILFIYGVILTALFLRSKRSRLLHSDYMNMTPRRPGPTRKHYQPYAPPRDFAAYRSRVKFSRSADAPAYQQGQNQLYNELNLGRREEYDVLDKRRGRDPEMGGKPQRRKNPQEGLYNELQKDKMAEAYSEIGMKGERRRGKGHDGLYQGLSTATKDTYDALHMQALPPR

SEQ ID NO: 14281 - protein, 1171 aa, Artificial Sequence
  Synthetic Polypeptide
MALPVTALLLPLALLLHAARPACQVQLVESGGGLVQAGDSVTLSCTASGRTFSSYALAWFRQRPGKEREFVAGLRWGGPTNYADSVKDRFTISGDSAKHTMYLQMNSLKPEDTAVYYCGYNPGGWAVPSQYEYDSWGQGTQVTVSSGTGGGGSGGGGSGGGGSEFEADIYQTPRYLVIGTGKKITLECSQTMGHDKMYWYQQDPGMELHLIHYSYGVNSTEKGDLSSESTVSRIRTEHFPLTLESARPSHTSQYLCASSEARGLAEFTDTQYFGPGTRLTVLEGKPIPNPLLGLDSTGSGEDLKNVFPPEVAVFEPSEAEISHTQKATLVCLATGFYPDHVELSWWVNGKEVHSGVSTDPQPLKEQPALNDSRYCLSSRLRVSATFWQNPRNHFRCQVQFYGLSENDEWTQDRAKPVTQIVSAEAWGRADCGSQSFGLLDPKLCYLLDGILFIYGVILTALFLRVKFSRSADAPAYQQGQNQLYNELNLGRREEYDVLDKRRGRDPEMGGKPQRRKNPQEGLYNELQKDKMAEAYSEIGMKGERRRGKGHDGLYQGLSTATKDTYDALHMQALPPRRAKRSGSGATNFSLLKQAGDVEENPGPTSMDWIWRILFLVGAATGAHSGPQVQLQESGGGLAQAGGSLRLSCAASGRTFSMGWFRQAPGKEREFVAAITYSGGSPYYASSVRGRFTISRDNAKNTVYLQMNSLKPEDTAVYYCAANPTYGSDWNAENWGQGTQVTVSSGSGGGGSGGGGSGGGGSFEQVQLQQPGAELVKPGASVKMSCKASGYAFSSYWINWMKQKPGQGLEWIGQIYPGDGTENRFSVNFQKAAKSFSLKISDSQLGDAAMYFCAYRSAVNARLMFGDGTQLVVKPNTREQKLISEEDLGSGIQNPDPAVYQLRDSKSSDKSVCLFTDFDSQTNVSQSKDSDVYITDKTVLDMRSMDFKSNSAVAWSNKSDFACANAFNNSIIPEDTFFPSPESSCGTQSFGLLDPKLCYLLDGILFIYGVILTALFLKRGRKKLLYIFKQPFMRPVQTTQEEDGCSCRFPEEEEGGCELRVKFSRSADAPAYQQGQNQLYNELNLGRREEYDVLDKRRGRDPEMGGKPQRRKNPQEGLYNELQKDKMAEAYSEIGMKGERRRGKGHDGLYQGLSTATKDTYDALHMQALPPR

SEQ ID NO: 14282 - protein, 1213 aa, Artificial Sequence
  Synthetic Polypeptide
MALPVTALLLPLALLLHAARPACQVQLVESGGGLVQAGDSVTLSCTASGRTFSSYALAWFRQRPGKEREFVAGLRWGGPTNYADSVKDRFTISGDSAKHTMYLQMNSLKPEDTAVYYCGYNPGGWAVPSQYEYDSWGQGTQVTVSSGTGGGGSGGGGSGGGGSEFEADIYQTPRYLVIGTGKKITLECSQTMGHDKMYWYQQDPGMELHLIHYSYGVNSTEKGDLSSESTVSRIRTEHFPLTLESARPSHTSQYLCASSEARGLAEFTDTQYFGPGTRLTVLEGKPIPNPLLGLDSTGSGEDLKNVFPPEVAVFEPSEAEISHTQKATLVCLATGFYPDHVELSWWVNGKEVHSGVSTDPQPLKEQPALNDSRYCLSSRLRVSATFWQNPRNHFRCQVQFYGLSENDEWTQDRAKPVTQIVSAEAWGRADCGSQSFGLLDPKLCYLLDGILFIYGVILTALFLKRGRKKLLYIFKQPFMRPVQTTQEEDGCSCRFPEEEEGGCELRVKFSRSADAPAYQQGQNQLYNELNLGRREEYDVLDKRRGRDPEMGGKPQRRKNPQEGLYNELQKDKMAEAYSEIGMKGERRRGKGHDGLYQGLSTATKDTYDALHMQALPPRRAKRSGSGATNFSLLKQAGDVEENPGPTSMDWIWRILFLVGAATGAHSGPQVQLQESGGGLAQAGGSLRLSCAASGRTFSMGWFRQAPGKEREFVAAITYSGGSPYYASSVRGRFTISRDNAKNTVYLQMNSLKPEDTAVYYCAANPTYGSDWNAENWGQGTQVTVSSGSGGGGSGGGGSGGGGSFEQVQLQQPGAELVKPGASVKMSCKASGYAFSSYWINWMKQKPGQGLEWIGQIYPGDGTENRFSVNFQKAAKSFSLKISDSQLGDAAMYFCAYRSAVNARLMFGDGTQLVVKPNTREQKLISEEDLGSGIQNPDPAVYQLRDSKSSDKSVCLFTDFDSQTNVSQSKDSDVYITDKTVLDMRSMDFKSNSAVAWSNKSDFACANAFNNSIIPEDTFFPSPESSCGTQSFGLLDPKLCYLLDGILFIYGVILTALFLKRGRKKLLYIFKQPFMRPVQTTQEEDGCSCRFPEEEEGGCELRVKFSRSADAPAYQQGQNQLYNELNLGRREEYDVLDKRRGRDPEMGGKPQRRKNPQEGLYNELQKDKMAEAYSEIGMKGERRRGKGHDGLYQGLSTATKDTYDALHMQALPPR

SEQ ID NO: 14283 - protein, 1103 aa, Artificial Sequence
  Synthetic Polypeptide
MALPVTALLLPLALLLHAARPACQVQLVESGGGLVQAGDSVTLSCTASGRTFSSYALAWFRQRPGKEREFVAGLRWGGPTNYADSVKDRFTISGDSAKHTMYLQMNSLKPEDTAVYYCGYNPGGWAVPSQYEYDSWGQGTQVTVSSGTGGGGSGGGGSGGGGSEFEADIYQTPRYLVIGTGKKITLECSQTMGHDKMYWYQQDPGMELHLIHYSYGVNSTEKGDLSSESTVSRIRTEHFPLTLESARPSHTSQYLCASSEARGLAEFTDTQYFGPGTRLTVLEQSFGLLDPKLCYLLDGILFIYGVILTALFLRVKFSRSADAPAYQQGQNQLYNELNLGRREEYDVLDKRRGRDPEMGGKPQRRKNPQEGLYNELQKDKMAEAYSEIGMKGERRRGKGHDGLYQGLSTATKDTYDALHMQALPPRRAKRSGSGATNFSLLKQAGDVEENPGPTSMDWIWRILFLVGAATGAHSGPQVQLQESGGGLAQAGGSLRLSCAASGRTFSMGWFRQAPGKEREFVAAITYSGGSPYYASSVRGRFTISRDNAKNTVYLQMNSLKPEDTAVYYCAANPTYGSDWNAENWGQGTQVTVSSGSGGGGSGGGGSGGGGSFEQVQLQQPGAELVKPGASVKMSCKASGYAFSSYWINWMKQKPGQGLEWIGQIYPGDGTENRFSVNFQKAAKSFSLKISDSQLGDAAMYFCAYRSAVNARLMFGDGTQLVVKPNTRQSFGLLDPKLCYLLDGILFIYGVILTALFLRVKFSRSADAPAYQQGQNQLYNELNLGRREEYDVLDKRRGRDPEMGGKPQRRKNPQEGLYNELQKDKMAEAYSEIGMKGERRRGKGHDGLYQGLSTATKDTYDALHMQALPPRRAKRSGSGVKQTLNFDLLKLAGDVESNPGPSRGHMTEYKPTVRLATRDDVPRAVRTLAAAFADYPATRHTVDPDRHIERVTELQELFLTRVGLDIGKVWVADDGAAVAVWTTPESVEAGAVFAEIGPRMAELSGSRLAAQQQMEGLLAPHRPKEPAWFLATVGVSPDHQGKGLGSAVVLPGVEAAERAGVPAFLETSAPRNLPFYERLGFTVTADVEVPEGPRTWCMTRKPGA

SEQ ID NO: 14284 - protein, 928 aa, Artificial Sequence
  Synthetic Polypeptide
MALPVTALLLPLALLLHAARPACQVQLVESGGGLVQAGDSVTLSCTASGRTFSSYALAWFRQRPGKEREFVAGLRWGGPTNYADSVKDRFTISGDSAKHTMYLQMNSLKPEDTAVYYCGYNPGGWAVPSQYEYDSWGQGTQVTVSSGTGGGGSGGGGSGGGGSEFEADIYQTPRYLVIGTGKKITLECSQTMGHDKMYWYQQDPGMELHLIHYSYGVNSTEKGDLSSESTVSRIRTEHFPLTLESARPSHTSQYLCASSEARGLAEFTDTQYFGPGTRLTVLEGQPKANPTVTLFPPSSEELQANKATLVCLISDFYPGAVTVAWKADGSPVKAGVETTKPSKQSNNKYAASSYLSLTPEQWKSHRSYSCQVTHEGSTVEKTVAPTECSPIKTDVITMDPKDNCSKDANDTLLLQLTNTSAYYMYLLLLLKSVVYFAIITCCLLRRTAFCCNGEKSRAKRSGSGATNFSLLKQAGDVEENPGPTSMDWIWRILFLVGAATGAHSGPQVQLQESGGGLAQAGGSLRLSCAASGRTFSMGWFRQAPGKEREFVAAITYSGGSPYYASSVRGRFTISRDNAKNTVYLQMNSLKPEDTAVYYCAANPTYGSDWNAENWGQGTQVTVSSGSGGGGSGGGGSGGGGSFEQVQLQQPGAELVKPGASVKMSCKASGYAFSSYWINWMKQKPGQGLEWIGQIYPGDGTENRFSVNFQKAAKSFSLKISDSQLGDAAMYFCAYRSAVNARLMFGDGTQLVVKPNTRASTKGPSVFPLAPSSKSTSGGTAALGCLVKDYFPEPVTVSWNSGALTSGVHTFPAVLQSSGLYSLSSVVTVPSSSLGTQTYICNVNHKPSNTKVDKRVEPKSCEVKTDSTDHVKPKETENTKQPSKSCHKPKAIVHTEKVNMMSLTVLGLRMLFAKTVAVNFLLTAKLFFL

SEQ ID NO: 14285 - protein, 906 aa, Artificial Sequence
  Synthetic Polypeptide
MALPVTALLLPLALLLHAARPACQVQLVESGGGLVQAGDSVTLSCTASGRTFSSYALAWFRQRPGKEREFVAGLRWGGPTNYADSVKDRFTISGDSAKHTMYLQMNSLKPEDTAVYYCGYNPGGWAVPSQYEYDSWGQGTQVTVSSGTGGGGSGGGGSGGGGSEFEADIYQTPRYLVIGTGKKITLECSQTMGHDKMYWYQQDPGMELHLIHYSYGVNSTEKGDLSSESTVSRIRTEHFPLTLESARPSHTSQYLCASSEARGLAEFTDTQYFGPGTRLTVLEGQPKANPTVTLFPPSSEELQANKATLVCLISDFYPGAVTVAWKADGSPVKAGVETTKPSKQSNNKYAASSYLSLTPEQWKSHRSYSCQVTHEGSTVEKTVAPTECSGRADCGITSASYHQGVLSATILYEILLGKATLYAVLVSALVLMAMVKRKDSRGRAKRSGSGATNFSLLKQAGDVEENPGPTSMDWIWRILFLVGAATGAHSGPQVQLQESGGGLAQAGGSLRLSCAASGRTFSMGWFRQAPGKEREFVAAITYSGGSPYYASSVRGRFTISRDNAKNTVYLQMNSLKPEDTAVYYCAANPTYGSDWNAENWGQGTQVTVSSGSGGGGSGGGGSGGGGSFEQVQLQQPGAELVKPGASVKMSCKASGYAFSSYWINWMKQKPGQGLEWIGQIYPGDGTENRFSVNFQKAAKSFSLKISDSQLGDAAMYFCAYRSAVNARLMFGDGTQLVVKPNTRASTKGPSVFPLAPSSKSTSGGTAALGCLVKDYFPEPVTVSWNSGALTSGVHTFPAVLQSSGLYSLSSVVTVPSSSLGTQTYICNVNHKPSNTKVDKRVEPKSCIPEDTFFPSSDVPCDVKLVEKSFETDTNLNFQNLSVIGFRILLLKVAGFNLLMTLRLWSS

SEQ ID NO: 14286 - protein, 906 aa, Artificial Sequence
  Synthetic Polypeptide
MALPVTALLLPLALLLHAARPACQVQLVESGGGLVQAGDSVTLSCTASGRTFSSYALAWFRQRPGKEREFVAGLRWGGPTNYADSVKDRFTISGDSAKHTMYLQMNSLKPEDTAVYYCGYNPGGWAVPSQYEYDSWGQGTQVTVSSGTGGGGSGGGGSGGGGSEFEADIYQTPRYLVIGTGKKITLECSQTMGHDKMYWYQQDPGMELHLIHYSYGVNSTEKGDLSSESTVSRIRTEHFPLTLESARPSHTSQYLCASSEARGLAEFTDTQYFGPGTRLTVLEGQPKANPTVTLFPPSSEELQANKATLVCLISDFYPGAVTVAWKADGSPVKAGVETTKPSKQSNNKYAASSYLSLTPEQWKSHRSYSCQVTHEGSTVEKTVAPTECSGRADCGFTSESYQQGVLSATILYEILLGKATLYAVLVSALVLMAMVKRKDSRGRAKRSGSGATNFSLLKQAGDVEENPGPTSMDWIWRILFLVGAATGAHSGPQVQLQESGGGLAQAGGSLRLSCAASGRTFSMGWFRQAPGKEREFVAAITYSGGSPYYASSVRGRFTISRDNAKNTVYLQMNSLKPEDTAVYYCAANPTYGSDWNAENWGQGTQVTVSSGSGGGGSGGGGSGGGGSFEQVQLQQPGAELVKPGASVKMSCKASGYAFSSYWINWMKQKPGQGLEWIGQIYPGDGTENRFSVNFQKAAKSFSLKISDSQLGDAAMYFCAYRSAVNARLMFGDGTQLVVKPNTRASTKGPSVFPLAPSSKSTSGGTAALGCLVKDYFPEPVTVSWNSGALTSGVHTFPAVLQSSGLYSLSSVVTVPSSSLGTQTYICNVNHKPSNTKVDKRVEPKSCIPEDTFFPSPESSCDVKLVEKSFETDTNLNFQNLSVIGFRILLLKVAGFNLLMTLRLWSS

SEQ ID NO: 14287 - protein, 805 aa, Artificial Sequence
  Synthetic Polypeptide
MDWIWRILFLVGAATGAHSLFNQEVQIPLTESYCGPCPKNWICYKNNCYQFFDESKNWYESQASCMSQNASLLKVYSKEDQDLLKLVKSYHWMGLVHIPTNGSWQWEDGSILSPNLLTIIEMQKGDCALYASSFKGYIENCSTPNTYICMQRTVGGGGSGGGGSGGGGSDLFNQEVQIPLTESYCGPCPKNWICYKNNCYQFFDESKNWYESQASCMSQNASLLKVYSKEDQDLLKLVKSYHWMGLVHIPTNGSWQWEDGSILSPNLLTIIEMQKGDCALYASSFKGYIENCSTPNTYICMQRTVGSGGGGSGGGGSGGGGSFEQVQLQQPGAELVKPGASVKMSCKASGYAFSSYWINWMKQKPGQGLEWIGQIYPGDGTENRFSVNFQKAAKSFSLKISDSQLGDAAMYFCAYRSAVNARLMFGDGTQLVVKPNGGGGSGGGGSGGGGSEADIYQTPRYLVIGTGKKITLECSQTMGHDKMYWYQQDPGMELHLIHYSYGVNSTEKGDLSSESTVSRIRTEHFPLTLESARPSHTSQYLCASSEARGLAEFTDTQYFGPGTRLTVTREQKLISEEDLAKPTTTPAPRPPTPAPTIASQPLSLRPEACRPAAGGAVHTRGLDFACDIYIWAPLAGTCGVLLLSLVITLYCKRGRKKLLYIFKQPFMRPVQTTQEEDGCSCRFPEEEEGGCELRVKFSRSADAPAYQQGQNQLYNELNLGRREEYDVLDKRRGRDPEMGGKPRRKNPQEGLYNELQKDKMAEAYSEIGMKGERRRGKGHDGLYQGLSTATKDTYDALHMQALPPR

SEQ ID NO: 14288 - protein, 1160 aa, Artificial Sequence
  Synthetic Polypeptide
MALPVTALLLPLALLLHAARPEADIYQTPRYLVIGTGKKITLECSQTMGHDKMYWYQQDPGMELHLIHYSYGVNSTEKGDLSSESTVSRIRTEHFPLTLESARPSHTSQYLCASSEARGLAEFTDTQYFGPGTRLTVLEIQNPDPAVYQLRDSKSSDKSVCLFTDFDSQTNVSQSKDSDVYITDKCVLDMRSMDFKSNSAVAWSNKSDFACANAFNNSIIPEDTFFPSSDVPCDVKLVEKSFETDTNLNFQNLSVIGFRILLLKVAGFNLLMTLRLWSSRAKRSGSGVKQTLNFDLLKLAGDVESNPGPTSMDWIWRILFLVGAATGAHSGPLFNQEVQIPLTESYCGPCPKNWICYKNNCYQFFDESKNWYESQASCMSQNASLLKVYSKEDQDLLKLVKSYHWMGLVHIPTNGSWQWEDGSILSPNLLTIIEMQKGDCALYASSFKGYIENCSTPNTYICMQRTVGGGGSGGGGSGGGGSDLFNQEVQIPLTESYCGPCPKNWICYKNNCYQFFDESKNWYESQASCMSQNASLLKVYSKEDQDLLKLVKSYHWMGLVHIPTNGSWQWEDGSILSPNLLTIIEMQKGDCALYASSFKGYIENCSTPNTYICMQRTVGSGGGGSGGGGSGGGGSFEQVQLQQPGAELVKPGASVKMSCKASGYAFSSYWINWMKQKPGQGLEWIGQIYPGDGTENRFSVNFQKAAKSFSLKISDSQLGDAAMYFCAYRSAVNARLMFGDGTQLVVKPNTREDLKNVFPPEVAVFEPSKAEIAHTQKATLVCLATGFYPDHVELSWWVNGKEVHSGVCTDPQPLKEQPALNDSRYCLSSRLRVSATFWQNPRNHFRCQVQFYGLSENDEWTQDRAKPVTQIVSAEAWGRADCGITSASYHQGVLSATILYEILLGKATLYAVLVSALVLMAMVKRKDSRGRAKRSGSGATNFSLLKQAGDVEENPGPSRGHMTEYKPTVRLATRDDVPRAVRTLAAAFADYPATRHTVDPDRHIERVTELQELFLTRVGLDIGKVWVADDGAAVAVWTTPESVEAGAVFAEIGPRMAELSGSRLAAQQQMEGLLAPHRPKEPAWFLATVGVSPDHQGKGLGSAVVLPGVEAAERAGVPAFLETSAPRNLPFYERLGFTVTADVEVPEGPRTWCMTRKPGA

SEQ ID NO: 14289 - protein, 1159 aa, Artificial Sequence
  Synthetic Polypeptide
MALPVTALLLPLALLLHAARPEADIYQTPRYLVIGTGKKITLECSQTMGHDKMYWYQQDPGMELHLIHYSYGVNSTEKGDLSSESTVSRIRTEHFPLTLESARPSHTSQYLCASSEARGLAEFTDTQYFGPGTRLTVLEDLKNVFPPEVAVFEPSKAEIAHTQKATLVCLATGFYPDHVELSWWVNGKEVHSGVCTDPQPLKEQPALNDSRYCLSSRLRVSATFWQNPRNHFRCQVQFYGLSENDEWTQDRAKPVTQIVSAEAWGRADCGITSASYHQGVLSATILYEILLGKATLYAVLVSALVLMAMVKRKDSRGRAKRSGSGATNFSLLKQAGDVEENPGPTSMDWIWRILFLVGAATGAHSGPLFNQEVQIPLTESYCGPCPKNWICYKNNCYQFFDESKNWYESQASCMSQNASLLKVYSKEDQDLLKLVKSYHWMGLVHIPTNGSWQWEDGSILSPNLLTIIEMQKGDCALYASSFKGYIENCSTPNTYICMQRTVGGGGSGGGGSGGGGSDLFNQEVQIPLTESYCGPCPKNWICYKNNCYQFFDESKNWYESQASCMSQNASLLKVYSKEDQDLLKLVKSYHWMGLVHIPTNGSWQWEDGSILSPNLLTIIEMQKGDCALYASSFKGYIENCSTPNTYICMQRTVGSGGGGSGGGGSGGGGSFEQVQLQQPGAELVKPGASVKMSCKASGYAFSSYWINWMKQKPGQGLEWIGQIYPGDGTENRFSVNFQKAAKSFSLKISDSQLGDAAMYFCAYRSAVNARLMFGDGTQLVVKPNTRIQNPDPAVYQLRDSKSSDKSVCLFTDFDSQTNVSQSKDSDVYITDKCVLDMRSMDFKSNSAVAWSNKSDFACANAFNNSIIPEDTFFPSSDVPCDVKLVEKSFETDTNLNFQNLSVIGFRILLLKVAGFNLLMTLRLWSSRAKRSGSGVKQTLNFDLLKLAGDVESNPGPSRGHMTEYKPTVRLATRDDVPRAVRTLAAAFADYPATRHTVDPDRHIERVTELQELFLTRVGLDIGKVWVADDGAAVAVWTTPESVEAGAVFAEIGPRMAELSGSRLAAQQQMEGLLAPHRPKEPAWFLATVGVSPDHQGKGLGSAVVLPGVEAAERAGVPAFLETSAPRNLPFYERLGFTVTADVEVPEGPRTWCMTRKPGA

SEQ ID NO: 14290 - protein, 1157 aa, Artificial Sequence
  Synthetic Polypeptide
MALPVTALLLPLALLLHAARPEADIYQTPRYLVIGTGKKITLECSQTMGHDKMYWYQQDPGMELHLIHYSYGVNSTEKGDLSSESTVSRIRTEHFPLTLESARPSHTSQYLCASSEARGLAEFTDTQYFGPGTRLTVLEDLKNVFPPEVAVFEPSEAEISHTQKATLVCLATGFYPDHVELSWWVNGKEVHSGVCTDPQPLKEQPALNDSRYCLSSRLRVSATFWQNPRNHFRCQVQFYGLSENDEWTQDRAKPVTQIVSAEAWGRADCGFTSESYQQGVLSATILYEILLGKATLYAVLVSALVLMAMVKRKDSRGRAKRSGSGATNFSLLKQAGDVEENPGPTSMDWIWRILFLVGAATGAHSLFNQEVQIPLTESYCGPCPKNWICYKNNCYQFFDESKNWYESQASCMSQNASLLKVYSKEDQDLLKLVKSYHWMGLVHIPTNGSWQWEDGSILSPNLLTIIEMQKGDCALYASSFKGYIENCSTPNTYICMQRTVGGGGSGGGGSGGGGSDLFNQEVQIPLTESYCGPCPKNWICYKNNCYQFFDESKNWYESQASCMSQNASLLKVYSKEDQDLLKLVKSYHWMGLVHIPTNGSWQWEDGSILSPNLLTIIEMQKGDCALYASSFKGYIENCSTPNTYICMQRTVGSGGGGSGGGGSGGGGSFEQVQLQQPGAELVKPGASVKMSCKASGYAFSSYWINWMKQKPGQGLEWIGQIYPGDGTENRFSVNFQKAAKSFSLKISDSQLGDAAMYFCAYRSAVNARLMFGDGTQLVVKPNTRIQNPDPAVYQLRDSKSSDKSVCLFTDFDSQTNVSQSKDSDVYITDKCVLDMRSMDFKSNSAVAWSNKSDFACANAFNNSIIPEDTFFPSPESSCDVKLVEKSFETDTNLNFQNLSVIGFRILLLKVAGFNLLMTLRLWSSRAKRSGSGVKQTLNFDLLKLAGDVESNPGPSRGHMTEYKPTVRLATRDDVPRAVRTLAAAFADYPATRHTVDPDRHIERVTELQELFLTRVGLDIGKVWVADDGAAVAVWTTPESVEAGAVFAEIGPRMAELSGSRLAAQQQMEGLLAPHRPKEPAWFLATVGVSPDHQGKGLGSAVVLPGVEAAERAGVPAFLETSAPRNLPFYERLGFTVTADVEVPEGPRTWCMTRKPGA

SEQ ID NO: 14291 - protein, 926 aa, Artificial Sequence
  Synthetic Polypeptide
MALPVTALLLPLALLLHAARPEADIYQTPRYLVIGTGKKITLECSQTMGHDKMYWYQQDPGMELHLIHYSYGVNSTEKGDLSSESTVSRIRTEHFPLTLESARPSHTSQYLCASSEARGLAEFTDTQYFGPGTRLTVLEDLKNVFPPEVAVFEPSEAEISHTQKATLVCLATGFYPDHVELSWWVNGKEVHSGVCTDPQPLKEQPALNDSRYCLSSRLRVSATFWQNPRNHFRCQVQFYGLSENDEWTQDRAKPVTQIVSAEAWGRADCGFTSESYQQGVLSATILYEILLGKATLYAVLVSALVLMAMVKRKDSRGRAKRSGSGATNFSLLKQAGDVEENPGPTSMDWIWRILFLVGAATGAHSGPLFNQEVQIPLTESYCGPCPKNWICYKNNCYQFFDESKNWYESQASCMSQNASLLKVYSKEDQDLLKLVKSYHWMGLVHIPTNGSWQWEDGSILSPNLLTIIEMQKGDCALYASSFKGYIENCSTPNTYICMQRTVGGGGSGGGGSGGGGSDLFNQEVQIPLTESYCGPCPKNWICYKNNCYQFFDESKNWYESQASCMSQNASLLKVYSKEDQDLLKLVKSYHWMGLVHIPTNGSWQWEDGSILSPNLLTIIEMQKGDCALYASSFKGYIENCSTPNTYICMQRTVGSGGGGSGGGGSGGGGSFEQVQLQQPGAELVKPGASVKMSCKASGYAFSSYWINWMKQKPGQGLEWIGQIYPGDGTENRFSVNFQKAAKSFSLKISDSQLGDAAMYFCAYRSAVNARLMFGDGTQLVVKPNTRIQNPDPAVYQLRDSKSSDKSVCLFTDFDSQTNVSQSKDSDVYITDKCVLDMRSMDFKSNSAVAWSNKSDFACANAFNNSIIPEDTFFPSPESSCDVKLVEKSFETDTNLNFQNLSVIGFRILLLKVAGFNLLMTLRLWSS

SEQ ID NO: 14292 - protein, 1151 aa, Artificial Sequence
  Synthetic Polypeptide
MALPVTALLLPLALLLHAARPEADIYQTPRYLVIGTGKKITLECSQTMGHDKMYWYQQDPGMELHLIHYSYGVNSTEKGDLSSESTVSRIRTEHFPLTLESARPSHTSQYLCASSEARGLAEFTDTQYFGPGTRLTVLEDLKNVFPPEVAVFEPSEAEISHTQKATLVCLATGFYPDHVELSWWVNGKEVHSGVCTDPQPLKEQPALNDSRYCLSSRLRVSATFWQNPRNHFRCQVQFYGLSENDEWTQDRAKPVTQIVSAEAWGRADCGFTSESYQQGVLSATILYEILLGKATLYAVLVSALVLMAMVKRKDSRGRAKRSGSGATNFSLLKQAGDVEENPGPTSMDWIWRILFLVGAATGAHSGPLFNQEVQIPLTESYCGPCPKNWICYKNNCYQFFDESKNWYESQASCMSQNASLLKVYSKEDQDLLKLVKSYHWMGLVHIPTNGSWQWEDGSILSPNLLTIIEMQKGDCALYASSFKGYIENCSTPNTYICMQRTVGGGGSGGGGSGGGGSDLFNQEVQIPLTESYCGPCPKNWICYKNNCYQFFDESKNWYESQASCMSQNASLLKVYSKEDQDLLKLVKSYHWMGLVHIPTNGSWQWEDGSILSPNLLTIIEMQKGDCALYASSFKGYIENCSTPNTYICMQRTVGSGGGGSGGGGSGGGGSFEQVQLQQPGAELVKPGASVKMSCKASGYAFSSYWINWMKQKPGQGLEWIGQIYPGDGTENRFSVNFQKAAKSFSLKISDSQLGDAAMYFCAYRSAVNARLMFGDGTQLVVKPNTRIQNPDPAVYQLRDSKSSDKSVCLFTDFDSQTNVSQSKDSDVYITDKCVLDMRSMDFKSNSAVAWSNKSDFACANAFNNSIIPEDTFFPSPESSCDVKLVEKSFETDTNLNFQNLSVIGFRILLLKVAGFNLLMTLRLWSSRAKRSGSGVKQTLNFDLLKLAGDVESNPGPSRGGIHTMATYEVLCEVARKLGTDDREVVLFLLNVFIPQPTLAQLIGALRALKEEGRLTFPLLAECLFRAGRRDLLRDLLHLDPRFLERHLAGTMSYFSPYQLTVLHVDGELCARDIRSLIFLSKDTIGSRSTPQTFLHWVYCMENLDLLGPTDVDALMSMLRSLSRVDLQRQVQTLMGLHLSGPSHSQHYRHTP

SEQ ID NO: 14293 - protein, 930 aa, Artificial Sequence
  Synthetic Polypeptide
MALPVTALLLPLALLLHAARPEADIYQTPRYLVIGTGKKITLECSQTMGHDKMYWYQQDPGMELHLIHYSYGVNSTEKGDLSSESTVSRIRTEHFPLTLESARPSHTSQYLCASSEARGLAEFTDTQYFGPGTRLTVLEIQNPDPAVYQLRDSKSSDKSVCLFTDFDSQTNVSQSKDSDVYITDKCVLDMRSMDFKSNSAVAWSNKSDFACANAFNNSIIPEDTFFPSPESSCDVKLVEKSFETDTNLNFQNLSVIGFRILLLKVAGFNLLMTLRLWSSRAKRSGSGVKQTLNFDLLKLAGDVESNPGPTSMDWIWRILFLVGAATGAHSGPLFNQEVQIPLTESYCGPCPKNWICYKNNCYQFFDESKNWYESQASCMSQNASLLKVYSKEDQDLLKLVKSYHWMGLVHIPTNGSWQWEDGSILSPNLLTIIEMQKGDCALYASSFKGYIENCSTPNTYICMQRTVGGGGSGGGGSGGGGSDLFNQEVQIPLTESYCGPCPKNWICYKNNCYQFFDESKNWYESQASCMSQNASLLKVYSKEDQDLLKLVKSYHWMGLVHIPTNGSWQWEDGSILSPNLLTIIEMQKGDCALYASSFKGYIENCSTPNTYICMQRTVGSGGGGSGGGGSGGGGSFEQVQLQQPGAELVKPGASVKMSCKASGYAFSSYWINWMKQKPGQGLEWIGQIYPGDGTENRFSVNFQKAAKSFSLKISDSQLGDAAMYFCAYRSAVNARLMFGDGTQLVVKPNTREDLKNVFPPEVAVFEPSEAEISHTQKATLVCLATGFYPDHVELSWWVNGKEVHSGVCTDPQPLKEQPALNDSRYCLSSRLRVSATFWQNPRNHFRCQVQFYGLSENDEWTQDRAKPVTQIVSAEAWGRADCGFTSESYQQGVLSATILYEILLGKATLYAVLVSALVLMAMVKRKDSRG

SEQ ID NO: 14294 - protein, 1152 aa, Artificial Sequence
  Synthetic Polypeptide
MALPVTALLLPLALLLHAARPEADIYQTPRYLVIGTGKKITLECSQTMGHDKMYWYQQDPGMELHLIHYSYGVNSTEKGDLSSESTVSRIRTEHFPLTLESARPSHTSQYLCASSEARGLAEFTDTQYFGPGTRLTVLEIQNPDPAVYQLRDSKSSDKSVCLFTDFDSQTNVSQSKDSDVYITDKCVLDMRSMDFKSNSAVAWSNKSDFACANAFNNSIIPEDTFFPSPESSCDVKLVEKSFETDTNLNFQNLSVIGFRILLLKVAGFNLLMTLRLWSSRAKRSGSGVKQTLNFDLLKLAGDVESNPGPTSMDWIWRILFLVGAATGAHSGPLFNQEVQIPLTESYCGPCPKNWICYKNNCYQFFDESKNWYESQASCMSQNASLLKVYSKEDQDLLKLVKSYHWMGLVHIPTNGSWQWEDGSILSPNLLTIIEMQKGDCALYASSFKGYIENCSTPNTYICMQRTVGGGGSGGGGSGGGGSDLFNQEVQIPLTESYCGPCPKNWICYKNNCYQFFDESKNWYESQASCMSQNASLLKVYSKEDQDLLKLVKSYHWMGLVHIPTNGSWQWEDGSILSPNLLTIIEMQKGDCALYASSFKGYIENCSTPNTYICMQRTVGSGGGGSGGGGSGGGGSFEQVQLQQPGAELVKPGASVKMSCKASGYAFSSYWINWMKQKPGQGLEWIGQIYPGDGTENRFSVNFQKAAKSFSLKISDSQLGDAAMYFCAYRSAVNARLMFGDGTQLVVKPNTREDLKNVFPPEVAVFEPSEAEISHTQKATLVCLATGFYPDHVELSWWVNGKEVHSGVCTDPQPLKEQPALNDSRYCLSSRLRVSATFWQNPRNHFRCQVQFYGLSENDEWTQDRAKPVTQIVSAEAWGRADCGFTSESYQQGVLSATILYEILLGKATLYAVLVSALVLMAMVKRKDSRGRAKRSGSGATNFSLLKQAGDVEENPGPSRGGIHTMATYEVLCEVARKLGTDDREVVLFLLNVFIPQPTLAQLIGALRALKEEGRLTFPLLAECLFRAGRRDLLRDLLHLDPRFLERHLAGTMSYFSPYQLTVLHVDGELCARDIRSLIFLSKDTIGSRSTPQTFLHWVYCMENLDLLGPTDVDALMSMLRSLSRVDLQRQVQTLMGLHLSGPSHSQHYRHTP

SEQ ID NO: 14295 - protein, 1159 aa, Artificial Sequence
  Synthetic Polypeptide
MALPVTALLLPLALLLHAARPEADIYQTPRYLVIGTGKKITLECSQTMGHDKMYWYQQDPGMELHLIHYSYGVNSTEKGDLSSESTVSRIRTEHFPLTLESARPSHTSQYLCASSEARGLAEFTDTQYFGPGTRLTVLEDLKNVFPPEVAVFEPSEAEISHTQKATLVCLATGFYPDHVELSWWVNGKEVHSGVSTDPQPLKEQPALNDSRYCLSSRLRVSATFWQNPRNHFRCQVQFYGLSENDEWTQDRAKPVTQIVSAEAWGRADCGFTSESYQQGVLSATILYEILLGKATLYAVLVSALVLMAMVKRKDSRGRAKRSGSGATNFSLLKQAGDVEENPGPTSMDWIWRILFLVGAATGAHSGPLFNQEVQIPLTESYCGPCPKNWICYKNNCYQFFDESKNWYESQASCMSQNASLLKVYSKEDQDLLKLVKSYHWMGLVHIPTNGSWQWEDGSILSPNLLTIIEMQKGDCALYASSFKGYIENCSTPNTYICMQRTVGGGGSGGGGSGGGGSDLFNQEVQIPLTESYCGPCPKNWICYKNNCYQFFDESKNWYESQASCMSQNASLLKVYSKEDQDLLKLVKSYHWMGLVHIPTNGSWQWEDGSILSPNLLTIIEMQKGDCALYASSFKGYIENCSTPNTYICMQRTVGSGGGGSGGGGSGGGGSFEQVQLQQPGAELVKPGASVKMSCKASGYAFSSYWINWMKQKPGQGLEWIGQIYPGDGTENRFSVNFQKAAKSFSLKISDSQLGDAAMYFCAYRSAVNARLMFGDGTQLVVKPNTRIQNPDPAVYQLRDSKSSDKSVCLFTDFDSQTNVSQSKDSDVYITDKTVLDMRSMDFKSNSAVAWSNKSDFACANAFNNSIIPEDTFFPSPESSCDVKLVEKSFETDTNLNFQNLSVIGFRILLLKVAGFNLLMTLRLWSSRAKRSGSGVKQTLNFDLLKLAGDVESNPGPSRGHMTEYKPTVRLATRDDVPRAVRTLAAAFADYPATRHTVDPDRHIERVTELQELFLTRVGLDIGKVWVADDGAAVAVWTTPESVEAGAVFAEIGPRMAELSGSRLAAQQQMEGLLAPHRPKEPAWFLATVGVSPDHQGKGLGSAVVLPGVEAAERAGVPAFLETSAPRNLPFYERLGFTVTADVEVPEGPRTWCMTRKPGA

SEQ ID NO: 14296 - protein, 1241 aa, Artificial Sequence
  Synthetic Polypeptide
MALPVTALLLPLALLLHAARPEADIYQTPRYLVIGTGKKITLECSQTMGHDKMYWYQQDPGMELHLIHYSYGVNSTEKGDLSSESTVSRIRTEHFPLTLESARPSHTSQYLCASSEARGLAEFTDTQYFGPGTRLTVLEDLKNVFPPEVAVFEPSEAEISHTQKATLVCLATGFYPDHVELSWWVNGKEVHSGVSTDPQPLKEQPALNDSRYCLSSRLRVSATFWQNPRNHFRCQVQFYGLSENDEWTQDRAKPVTQIVSAEAWGRADCGFTSESYQQGVLSATILYEILLGKATLYAVLVSALVLMAMVKRKDSRGRAKRSGSGATNFSLLKQAGDVEENPGPTSMDWIWRILFLVGAATGAHSGPLFNQEVQIPLTESYCGPCPKNWICYKNNCYQFFDESKNWYESQASCMSQNASLLKVYSKEDQDLLKLVKSYHWMGLVHIPTNGSWQWEDGSILSPNLLTIIEMQKGDCALYASSFKGYIENCSTPNTYICMQRTVGGGGSGGGGSGGGGSDLFNQEVQIPLTESYCGPCPKNWICYKNNCYQFFDESKNWYESQASCMSQNASLLKVYSKEDQDLLKLVKSYHWMGLVHIPTNGSWQWEDGSILSPNLLTIIEMQKGDCALYASSFKGYIENCSTPNTYICMQRTVGSGGGGSGGGGSGGGGSFEQVQLQQPGAELVKPGASVKMSCKASGYAFSSYWINWMKQKPGQGLEWIGQIYPGDGTENRFSVNFQKAAKSFSLKISDSQLGDAAMYFCAYRSAVNARLMFGDGTQLVVKPNTREQKLISEEDGSGTPFPSLAPPIMLLVDGKQQMVVVCLVLDVAPPGLDSPIWFSAGNGSALDAFTYGPSPATDGTWTNLAHLSLPSEELASWEPLVCHTGPGAEGHSRSTQPMHLSGEASTARTCPQEPLRGTPGGALWLGVLRLLLFKLLLFDLLLTCSCLCDPAGPLPSPATTTRLRALGSHRLHPATETGGREATSSPRPQPRDRRWGDTPPGRKPGSPVRAKRSGSGVKQTLNFDLLKLAGDVESNPGPSRGHMTEYKPTVRLATRDDVPRAVRTLAAAFADYPATRHTVDPDRHIERVTELQELFLTRVGLDIGKVWVADDGAAVAVWTTPESVEAGAVFAEIGPRMAELSGSRLAAQQQMEGLLAPHRPKEPAWFLATVGVSPDHQGKGLGSAVVLPGVEAAERAGVPAFLETSAPRNLPFYERLGFTVTADVEVPEGPRTWCMTRKPGA

SEQ ID NO: 14297 - protein, 1196 aa, Artificial Sequence
  Synthetic Polypeptide
MALPVTALLLPLALLLHAARPEADIYQTPRYLVIGTGKKITLECSQTMGHDKMYWYQQDPGMELHLIHYSYGVNSTEKGDLSSESTVSRIRTEHFPLTLESARPSHTSQYLCASSEARGLAEFTDTQYFGPGTRLTVLEGKPIPNPLLGLDSTGSGDKQLDADVSPKPTIFLPSIAETKLQKAGTYLCLLEKFFPDVIKIHWQEKKSNTILGSQEGNTMKTNDTYMKFSWLTVPEKSLDKEHRCIVRHENNKNGVDQEIIFPPIKTDVITMDPKDNCSKDANDTLLLQLTNTSAYYMYLLLLLKSVVYFAIITCCLLRRTAFCCNGEKSRAKRSGSGATNFSLLKQAGDVEENPGPTSMDWIWRILFLVGAATGAHSGPLFNQEVQIPLTESYCGPCPKNWICYKNNCYQFFDESKNWYESQASCMSQNASLLKVYSKEDQDLLKLVKSYHWMGLVHIPTNGSWQWEDGSILSPNLLTIIEMQKGDCALYASSFKGYIENCSTPNTYICMQRTVGGGGSGGGGSGGGGSDLFNQEVQIPLTESYCGPCPKNWICYKNNCYQFFDESKNWYESQASCMSQNASLLKVYSKEDQDLLKLVKSYHWMGLVHIPTNGSWQWEDGSILSPNLLTIIEMQKGDCALYASSFKGYIENCSTPNTYICMQRTVGSGGGGSGGGGSGGGGSFEQVQLQQPGAELVKPGASVKMSCKASGYAFSSYWINWMKQKPGQGLEWIGQIYPGDGTENRFSVNFQKAAKSFSLKISDSQLGDAAMYFCAYRSAVNARLMFGDGTQLVVKPNTREQKLISEEDGSGSQPHTKPSVFVMKNGTNVACLVKEFYPKDIRINLVSSKKITEFDPAIVISPSGKYNAVKLGKYEDSNSVTCSVQHDNKTVHSTDFEVKTDSTDHVKPKETENTKQPSKSCHKPKAIVHTEKVNMMSLTVLGLRMLFAKTVAVNFLLTAKLFFLRAKRSGSGVKQTLNFDLLKLAGDVESNPGPSRGHMTEYKPTVRLATRDDVPRAVRTLAAAFADYPATRHTVDPDRHIERVTELQELFLTRVGLDIGKVWVADDGAAVAVWTTPESVEAGAVFAEIGPRMAELSGSRLAAQQQMEGLLAPHRPKEPAWFLATVGVSPDHQGKGLGSAVVLPGVEAAERAGVPAFLETSAPRNLPFYERLGFTVTADVEVPEGPRTWCMTRKPGA

SEQ ID NO: 14298 - protein, 934 aa, Artificial Sequence
  Synthetic Polypeptide
MALPVTALLLPLALLLHAARPEADIYQTPRYLVIGTGKKITLECSQTMGHDKMYWYQQDPGMELHLIHYSYGVNSTEKGDLSSESTVSRIRTEHFPLTLESARPSHTSQYLCASSEARGLAEFTDTQYFGPGTRLTVLESQPHTKPSVFVMKNGTNVACLVKEFYPKDIRINLVSSKKITEFDPAIVISPSGKYNAVKLGKYEDSNSVTCSVQHDNKTVHSTDFEVKTDSTDHVKPKETENTKQPSKSCHKPKAIVHTEKVNMMSLTVLGLRMLFAKTVAVNFLLTAKLFFLRAKRSGSGATNFSLLKQAGDVEENPGPTSMDWIWRILFLVGAATGAHSGPLFNQEVQIPLTESYCGPCPKNWICYKNNCYQFFDESKNWYESQASCMSQNASLLKVYSKEDQDLLKLVKSYHWMGLVHIPTNGSWQWEDGSILSPNLLTIIEMQKGDCALYASSFKGYIENCSTPNTYICMQRTVGGGGSGGGGSGGGGSDLFNQEVQIPLTESYCGPCPKNWICYKNNCYQFFDESKNWYESQASCMSQNASLLKVYSKEDQDLLKLVKSYHWMGLVHIPTNGSWQWEDGSILSPNLLTIIEMQKGDCALYASSFKGYIENCSTPNTYICMQRTVGSGGGGSGGGGSGGGGSFEQVQLQQPGAELVKPGASVKMSCKASGYAFSSYWINWMKQKPGQGLEWIGQIYPGDGTENRFSVNFQKAAKSFSLKISDSQLGDAAMYFCAYRSAVNARLMFGDGTQLVVKPNTRDKQLDADVSPKPTIFLPSIAETKLQKAGTYLCLLEKFFPDVIKIHWQEKKSNTILGSQEGNTMKTNDTYMKFSWLTVPEKSLDKEHRCIVRHENNKNGVDQEIIFPPIKTDVITMDPKDNCSKDANDTLLLQLTNTSAYYMYLLLLLKSVVYFAIITCCLLRRTAFCCNGEKS

SEQ ID NO: 14299 - protein, 1336 aa, Artificial Sequence
  Synthetic Polypeptide
MALPVTALLLPLALLLHAARPEADIYQTPRYLVIGTGKKITLECSQTMGHDKMYWYQQDPGMELHLIHYSYGVNSTEKGDLSSESTVSRIRTEHFPLTLESARPSHTSQYLCASSEARGLAEFTDTQYFGPGTRLTVGQPKANPTVTLFPPSSEELQANKATLVCLISDFYPGAVTVAWKADGSPVKAGVETTKPSKQSNNKYAASSYLSLTPEQWKSHRSYSCQVTHEGSTVEKTVAPTECSGSQSFGLLDPKLCYLLDGILFIYGVILTALFLRVKFSRSADAPAYQQGQNQLYNELNLGRREEYDVLDKRRGRDPEMGGKPQRRKNPQEGLYNELQKDKMAEAYSEIGMKGERRRGKGHDGLYQGLSTATKDTYDALHMQALPPRRAKRSGSGATNFSLLKQAGDVEENPGPTSMDWIWRILFLVGAATGAHSGPLFNQEVQIPLTESYCGPCPKNWICYKNNCYQFFDESKNWYESQASCMSQNASLLKVYSKEDQDLLKLVKSYHWMGLVHIPTNGSWQWEDGSILSPNLLTIIEMQKGDCALYASSFKGYIENCSTPNTYICMQRTVGGGGSGGGGSGGGGSDLFNQEVQIPLTESYCGPCPKNWICYKNNCYQFFDESKNWYESQASCMSQNASLLKVYSKEDQDLLKLVKSYHWMGLVHIPTNGSWQWEDGSILSPNLLTIIEMQKGDCALYASSFKGYIENCSTPNTYICMQRTVGSGGGGSGGGGSGGGGSFEQVQLQQPGAELVKPGASVKMSCKASGYAFSSYWINWMKQKPGQGLEWIGQIYPGDGTENRFSVNFQKAAKSFSLKISDSQLGDAAMYFCAYRSAVNARLMFGDGTQLVVKPNASTKGPSVFPLAPSSKSTSGGTAALGCLVKDYFPEPVTVSWNSGALTSGVHTFPAVLQSSGLYSLSSVVTVPSSSLGTQTYICNVNHKPSNTKVDKRVEPKSCGTQSFGLLDPKLCYLLDGILFIYGVILTALFLRVKFSRSADAPAYQQGQNQLYNELNLGRREEYDVLDKRRGRDPEMGGKPQRRKNPQEGLYNELQKDKMAEAYSEIGMKGERRRGKGHDGLYQGLSTATKDTYDALHMQALPPRRAKRSGSGVKQTLNFDLLKLAGDVESNPGPSRGHMTEYKPTVRLATRDDVPRAVRTLAAAFADYPATRHTVDPDRHIERVTELQELFLTRVGLDIGKVWVADDGAAVAVWTTPESVEAGAVFAEIGPRMAELSGSRLAAQQQMEGLLAPHRPKEPAWFLATVGVSPDHQGKGLGSAVVLPGVEAAERAGVPAFLETSAPRNLPFYERLGFTVTADVEVPEGPRTWCMTRKPGA

SEQ ID NO: 14300 - protein, 1122 aa, Artificial Sequence
  Synthetic Polypeptide
MALPVTALLLPLALLLHAARPEADIYQTPRYLVIGTGKKITLECSQTMGHDKMYWYQQDPGMELHLIHYSYGVNSTEKGDLSSESTVSRIRTEHFPLTLESARPSHTSQYLCASSEARGLAEFTDTQYFGPGTRLTVLEDLKNVFPPEVAVFEPSEAEISHTQKATLVCLATGFYPDHVELSWWVNGKEVHSGVSTDPQPLKEQPALNDSRYCLSSRLRVSATFWQNPRNHFRCQVQFYGLSENDEWTQDRAKPVTQIVSAEAWGRADCGSQSFGLLDPKLCYLLDGILFIYGVILTALFLRVKFSRSADAPAYQQGQNQLYNELNLGRREEYDVLDKRRGRDPEMGGKPQRRKNPQEGLYNELQKDKMAEAYSEIGMKGERRRGKGHDGLYQGLSTATKDTYDALHMQALPPRRAKRSGSGATNFSLLKQAGDVEENPGPTSMDWIWRILFLVGAATGAHSGPLFNQEVQIPLTESYCGPCPKNWICYKNNCYQFFDESKNWYESQASCMSQNASLLKVYSKEDQDLLKLVKSYHWMGLVHIPTNGSWQWEDGSILSPNLLTIIEMQKGDCALYASSFKGYIENCSTPNTYICMQRTVGGGGSGGGGSGGGGSDLFNQEVQIPLTESYCGPCPKNWICYKNNCYQFFDESKNWYESQASCMSQNASLLKVYSKEDQDLLKLVKSYHWMGLVHIPTNGSWQWEDGSILSPNLLTIIEMQKGDCALYASSFKGYIENCSTPNTYICMQRTVGSGGGGSGGGGSGGGGSFEQVQLQQPGAELVKPGASVKMSCKASGYAFSSYWINWMKQKPGQGLEWIGQIYPGDGTENRFSVNFQKAAKSFSLKISDSQLGDAAMYFCAYRSAVNARLMFGDGTQLVVKPNTRIQNPDPAVYQLRDSKSSDKSVCLFTDFDSQTNVSQSKDSDVYITDKTVLDMRSMDFKSNSAVAWSNKSDFACANAFNNSIIPEDTFFPSPESSCGTQSFGLLDPKLCYLLDGILFIYGVILTALFLRVKFSRSADAPAYQQGQNQLYNELNLGRREEYDVLDKRRGRDPEMGGKPQRRKNPQEGLYNELQKDKMAEAYSEIGMKGERRRGKGHDGLYQGLSTATKDTYDALHMQALPPR

SEQ ID NO: 14301 - protein, 1122 aa, Artificial Sequence
  Synthetic Polypeptide
MALPVTALLLPLALLLHAARPEADIYQTPRYLVIGTGKKITLECSQTMGHDKMYWYQQDPGMELHLIHYSYGVNSTEKGDLSSESTVSRIRTEHFPLTLESARPSHTSQYLCASSEARGLAEFTDTQYFGPGTRLTVLEDLKNVFPPEVAVFEPSKAEIAHTQKATLVCLATGFYPDHVELSWWVNGKEVHSGVCTDPQPLKEQPALNDSRYCLSSRLRVSATFWQNPRNHFRCQVQFYGLSENDEWTQDRAKPVTQIVSAEAWGRADCGSQSFGLLDPKLCYLLDGILFIYGVILTALFLRVKFSRSADAPAYQQGQNQLYNELNLGRREEYDVLDKRRGRDPEMGGKPQRRKNPQEGLYNELQKDKMAEAYSEIGMKGERRRGKGHDGLYQGLSTATKDTYDALHMQALPPRRAKRSGSGATNFSLLKQAGDVEENPGPTSMDWIWRILFLVGAATGAHSGPLFNQEVQIPLTESYCGPCPKNWICYKNNCYQFFDESKNWYESQASCMSQNASLLKVYSKEDQDLLKLVKSYHWMGLVHIPTNGSWQWEDGSILSPNLLTIIEMQKGDCALYASSFKGYIENCSTPNTYICMQRTVGGGGSGGGGSGGGGSDLFNQEVQIPLTESYCGPCPKNWICYKNNCYQFFDESKNWYESQASCMSQNASLLKVYSKEDQDLLKLVKSYHWMGLVHIPTNGSWQWEDGSILSPNLLTIIEMQKGDCALYASSFKGYIENCSTPNTYICMQRTVGSGGGGSGGGGSGGGGSFEQVQLQQPGAELVKPGASVKMSCKASGYAFSSYWINWMKQKPGQGLEWIGQIYPGDGTENRFSVNFQKAAKSFSLKISDSQLGDAAMYFCAYRSAVNARLMFGDGTQLVVKPNTRIQNPDPAVYQLRDSKSSDKSVCLFTDFDSQTNVSQSKDSDVYITDKCVLDMRSMDFKSNSAVAWSNKSDFACANAFNNSIIPEDTFFPSSDVPCGTQSFGLLDPKLCYLLDGILFIYGVILTALFLRVKFSRSADAPAYQQGQNQLYNELNLGRREEYDVLDKRRGRDPEMGGKPQRRKNPQEGLYNELQKDKMAEAYSEIGMKGERRRGKGHDGLYQGLSTATKDTYDALHMQALPPR

SEQ ID NO: 14302 - protein, 1193 aa, Artificial Sequence
  Synthetic Polypeptide
MALPVTALLLPLALLLHAARPEADIYQTPRYLVIGTGKKITLECSQTMGHDKMYWYQQDPGMELHLIHYSYGVNSTEKGDLSSESTVSRIRTEHFPLTLESARPSHTSQYLCASSEARGLAEFTDTQYFGPGTRLTVLEGKPIPNPLLGLDSTGSGEDLKNVFPPEVAVFEPSEAEISHTQKATLVCLATGFYPDHVELSWWVNGKEVHSGVSTDPQPLKEQPALNDSRYCLSSRLRVSATFWQNPRNHFRCQVQFYGLSENDEWTQDRAKPVTQIVSAEAWGRADCGSQSFGLLDPKLCYLLDGILFIYGVILTALFLRVKFSRSADAPAYQQGQNQLYNELNLGRREEYDVLDKRRGRDPEMGGKPQRRKNPQEGLYNELQKDKMAEAYSEIGMKGERRRGKGHDGLYQGLSTATKDTYDALHMQALPPRRAKRSGSGATNFSLLKQAGDVEENPGPTSMDWIWRILFLVGAATGAHSGPLFNQEVQIPLTESYCGPCPKNWICYKNNCYQFFDESKNWYESQASCMSQNASLLKVYSKEDQDLLKLVKSYHWMGLVHIPTNGSWQWEDGSILSPNLLTIIEMQKGDCALYASSFKGYIENCSTPNTYICMQRTVGGGGSGGGGSGGGGSDLFNQEVQIPLTESYCGPCPKNWICYKNNCYQFFDESKNWYESQASCMSQNASLLKVYSKEDQDLLKLVKSYHWMGLVHIPTNGSWQWEDGSILSPNLLTIIEMQKGDCALYASSFKGYIENCSTPNTYICMQRTVGSGGGGSGGGGSGGGGSFEQVQLQQPGAELVKPGASVKMSCKASGYAFSSYWINWMKQKPGQGLEWIGQIYPGDGTENRFSVNFQKAAKSFSLKISDSQLGDAAMYFCAYRSAVNARLMFGDGTQLVVKPNTREQKLISEEDGSGIQNPDPAVYQLRDSKSSDKSVCLFTDFDSQTNVSQSKDSDVYITDKTVLDMRSMDFKSNSAVAWSNKSDFACANAFNNSIIPEDTFFPSPESSCGTQSFGLLDPKLCYLLDGILFIYGVILTALFLRSKRSRLLHSDYMNMTPRRPGPTRKHYQPYAPPRDFAAYRSRVKFSRSADAPAYQQGQNQLYNELNLGRREEYDVLDKRRGRDPEMGGKPQRRKNPQEGLYNELQKDKMAEAYSEIGMKGERRRGKGHDGLYQGLSTATKDTYDALHMQALPPR

SEQ ID NO: 14303 - protein, 1234 aa, Artificial Sequence
  Synthetic Polypeptide
MALPVTALLLPLALLLHAARPEADIYQTPRYLVIGTGKKITLECSQTMGHDKMYWYQQDPGMELHLIHYSYGVNSTEKGDLSSESTVSRIRTEHFPLTLESARPSHTSQYLCASSEARGLAEFTDTQYFGPGTRLTVLEGKPIPNPLLGLDSTGSGEDLKNVFPPEVAVFEPSEAEISHTQKATLVCLATGFYPDHVELSWWVNGKEVHSGVSTDPQPLKEQPALNDSRYCLSSRLRVSATFWQNPRNHFRCQVQFYGLSENDEWTQDRAKPVTQIVSAEAWGRADCGSQSFGLLDPKLCYLLDGILFIYGVILTALFLRSKRSRLLHSDYMNMTPRRPGPTRKHYQPYAPPRDFAAYRSRVKFSRSADAPAYQQGQNQLYNELNLGRREEYDVLDKRRGRDPEMGGKPQRRKNPQEGLYNELQKDKMAEAYSEIGMKGERRRGKGHDGLYQGLSTATKDTYDALHMQALPPRRAKRSGSGATNFSLLKQAGDVEENPGPTSMDWIWRILFLVGAATGAHSGPLFNQEVQIPLTESYCGPCPKNWICYKNNCYQFFDESKNWYESQASCMSQNASLLKVYSKEDQDLLKLVKSYHWMGLVHIPTNGSWQWEDGSILSPNLLTIIEMQKGDCALYASSFKGYIENCSTPNTYICMQRTVGGGGSGGGGSGGGGSDLFNQEVQIPLTESYCGPCPKNWICYKNNCYQFFDESKNWYESQASCMSQNASLLKVYSKEDQDLLKLVKSYHWMGLVHIPTNGSWQWEDGSILSPNLLTIIEMQKGDCALYASSFKGYIENCSTPNTYICMQRTVGSGGGGSGGGGSGGGGSFEQVQLQQPGAELVKPGASVKMSCKASGYAFSSYWINWMKQKPGQGLEWIGQIYPGDGTENRFSVNFQKAAKSFSLKISDSQLGDAAMYFCAYRSAVNARLMFGDGTQLVVKPNTREQKLISEEDGSGIQNPDPAVYQLRDSKSSDKSVCLFTDFDSQTNVSQSKDSDVYITDKTVLDMRSMDFKSNSAVAWSNKSDFACANAFNNSIIPEDTFFPSPESSCGTQSFGLLDPKLCYLLDGILFIYGVILTALFLRSKRSRLLHSDYMNMTPRRPGPTRKHYQPYAPPRDFAAYRSRVKFSRSADAPAYQQGQNQLYNELNLGRREEYDVLDKRRGRDPEMGGKPQRRKNPQEGLYNELQKDKMAEAYSEIGMKGERRRGKGHDGLYQGLSTATKDTYDALHMQALPPR

SEQ ID NO: 14304 - protein, 1195 aa, Artificial Sequence
  Synthetic Polypeptide
MALPVTALLLPLALLLHAARPEADIYQTPRYLVIGTGKKITLECSQTMGHDKMYWYQQDPGMELHLIHYSYGVNSTEKGDLSSESTVSRIRTEHFPLTLESARPSHTSQYLCASSEARGLAEFTDTQYFGPGTRLTVLEGKPIPNPLLGLDSTGSGEDLKNVFPPEVAVFEPSEAEISHTQKATLVCLATGFYPDHVELSWWVNGKEVHSGVSTDPQPLKEQPALNDSRYCLSSRLRVSATFWQNPRNHFRCQVQFYGLSENDEWTQDRAKPVTQIVSAEAWGRADCGSQSFGLLDPKLCYLLDGILFIYGVILTALFLRVKFSRSADAPAYQQGQNQLYNELNLGRREEYDVLDKRRGRDPEMGGKPQRRKNPQEGLYNELQKDKMAEAYSEIGMKGERRRGKGHDGLYQGLSTATKDTYDALHMQALPPRRAKRSGSGATNFSLLKQAGDVEENPGPTSMDWIWRILFLVGAATGAHSGPLFNQEVQIPLTESYCGPCPKNWICYKNNCYQFFDESKNWYESQASCMSQNASLLKVYSKEDQDLLKLVKSYHWMGLVHIPTNGSWQWEDGSILSPNLLTIIEMQKGDCALYASSFKGYIENCSTPNTYICMQRTVGGGGSGGGGSGGGGSDLFNQEVQIPLTESYCGPCPKNWICYKNNCYQFFDESKNWYESQASCMSQNASLLKVYSKEDQDLLKLVKSYHWMGLVHIPTNGSWQWEDGSILSPNLLTIIEMQKGDCALYASSFKGYIENCSTPNTYICMQRTVGSGGGGSGGGGSGGGGSFEQVQLQQPGAELVKPGASVKMSCKASGYAFSSYWINWMKQKPGQGLEWIGQIYPGDGTENRFSVNFQKAAKSFSLKISDSQLGDAAMYFCAYRSAVNARLMFGDGTQLVVKPNTREQKLISEEDLGSGIQNPDPAVYQLRDSKSSDKSVCLFTDFDSQTNVSQSKDSDVYITDKTVLDMRSMDFKSNSAVAWSNKSDFACANAFNNSIIPEDTFFPSPESSCGTQSFGLLDPKLCYLLDGILFIYGVILTALFLKRGRKKLLYIFKQPFMRPVQTTQEEDGCSCRFPEEEEGGCELRVKFSRSADAPAYQQGQNQLYNELNLGRREEYDVLDKRRGRDPEMGGKPQRRKNPQEGLYNELQKDKMAEAYSEIGMKGERRRGKGHDGLYQGLSTATKDTYDALHMQALPPR

SEQ ID NO: 14305 - protein, 1237 aa, Artificial Sequence
  Synthetic Polypeptide
MALPVTALLLPLALLLHAARPEADIYQTPRYLVIGTGKKITLECSQTMGHDKMYWYQQDPGMELHLIHYSYGVNSTEKGDLSSESTVSRIRTEHFPLTLESARPSHTSQYLCASSEARGLAEFTDTQYFGPGTRLTVLEGKPIPNPLLGLDSTGSGEDLKNVFPPEVAVFEPSEAEISHTQKATLVCLATGFYPDHVELSWWVNGKEVHSGVSTDPQPLKEQPALNDSRYCLSSRLRVSATFWQNPRNHFRCQVQFYGLSENDEWTQDRAKPVTQIVSAEAWGRADCGSQSFGLLDPKLCYLLDGILFIYGVILTALFLKRGRKKLLYIFKQPFMRPVQTTQEEDGCSCRFPEEEEGGCELRVKFSRSADAPAYQQGQNQLYNELNLGRREEYDVLDKRRGRDPEMGGKPQRRKNPQEGLYNELQKDKMAEAYSEIGMKGERRRGKGHDGLYQGLSTATKDTYDALHMQALPPRRAKRSGSGATNFSLLKQAGDVEENPGPTSMDWIWRILFLVGAATGAHSGPLFNQEVQIPLTESYCGPCPKNWICYKNNCYQFFDESKNWYESQASCMSQNASLLKVYSKEDQDLLKLVKSYHWMGLVHIPTNGSWQWEDGSILSPNLLTIIEMQKGDCALYASSFKGYIENCSTPNTYICMQRTVGGGGSGGGGSGGGGSDLFNQEVQIPLTESYCGPCPKNWICYKNNCYQFFDESKNWYESQASCMSQNASLLKVYSKEDQDLLKLVKSYHWMGLVHIPTNGSWQWEDGSILSPNLLTIIEMQKGDCALYASSFKGYIENCSTPNTYICMQRTVGSGGGGSGGGGSGGGGSFEQVQLQQPGAELVKPGASVKMSCKASGYAFSSYWINWMKQKPGQGLEWIGQIYPGDGTENRFSVNFQKAAKSFSLKISDSQLGDAAMYFCAYRSAVNARLMFGDGTQLVVKPNTREQKLISEEDLGSGIQNPDPAVYQLRDSKSSDKSVCLFTDFDSQTNVSQSKDSDVYITDKTVLDMRSMDFKSNSAVAWSNKSDFACANAFNNSIIPEDTFFPSPESSCGTQSFGLLDPKLCYLLDGILFIYGVILTALFLKRGRKKLLYIFKQPFMRPVQTTQEEDGCSCRFPEEEEGGCELRVKFSRSADAPAYQQGQNQLYNELNLGRREEYDVLDKRRGRDPEMGGKPQRRKNPQEGLYNELQKDKMAEAYSEIGMKGERRRGKGHDGLYQGLSTATKDTYDALHMQALPPR

SEQ ID NO: 14306 - protein, 1127 aa, Artificial Sequence
  Synthetic Polypeptide
MALPVTALLLPLALLLHAARPEADIYQTPRYLVIGTGKKITLECSQTMGHDKMYWYQQDPGMELHLIHYSYGVNSTEKGDLSSESTVSRIRTEHFPLTLESARPSHTSQYLCASSEARGLAEFTDTQYFGPGTRLTVLEQSFGLLDPKLCYLLDGILFIYGVILTALFLRVKFSRSADAPAYQQGQNQLYNELNLGRREEYDVLDKRRGRDPEMGGKPQRRKNPQEGLYNELQKDKMAEAYSEIGMKGERRRGKGHDGLYQGLSTATKDTYDALHMQALPPRRAKRSGSGATNFSLLKQAGDVEENPGPTSMDWIWRILFLVGAATGAHSGPLFNQEVQIPLTESYCGPCPKNWICYKNNCYQFFDESKNWYESQASCMSQNASLLKVYSKEDQDLLKLVKSYHWMGLVHIPTNGSWQWEDGSILSPNLLTIIEMQKGDCALYASSFKGYIENCSTPNTYICMQRTVGGGGSGGGGSGGGGSDLFNQEVQIPLTESYCGPCPKNWICYKNNCYQFFDESKNWYESQASCMSQNASLLKVYSKEDQDLLKLVKSYHWMGLVHIPTNGSWQWEDGSILSPNLLTIIEMQKGDCALYASSFKGYIENCSTPNTYICMQRTVGSGGGGSGGGGSGGGGSFEQVQLQQPGAELVKPGASVKMSCKASGYAFSSYWINWMKQKPGQGLEWIGQIYPGDGTENRFSVNFQKAAKSFSLKISDSQLGDAAMYFCAYRSAVNARLMFGDGTQLVVKPNTRQSFGLLDPKLCYLLDGILFIYGVILTALFLRVKFSRSADAPAYQQGQNQLYNELNLGRREEYDVLDKRRGRDPEMGGKPQRRKNPQEGLYNELQKDKMAEAYSEIGMKGERRRGKGHDGLYQGLSTATKDTYDALHMQALPPRRAKRSGSGVKQTLNFDLLKLAGDVESNPGPSRGHMTEYKPTVRLATRDDVPRAVRTLAAAFADYPATRHTVDPDRHIERVTELQELFLTRVGLDIGKVWVADDGAAVAVWTTPESVEAGAVFAEIGPRMAELSGSRLAAQQQMEGLLAPHRPKEPAWFLATVGVSPDHQGKGLGSAVVLPGVEAAERAGVPAFLETSAPRNLPFYERLGFTVTADVEVPEGPRTWCMTRKPGA

SEQ ID NO: 14307 - protein, 952 aa, Artificial Sequence
  Synthetic Polypeptide
MALPVTALLLPLALLLHAARPEADIYQTPRYLVIGTGKKITLECSQTMGHDKMYWYQQDPGMELHLIHYSYGVNSTEKGDLSSESTVSRIRTEHFPLTLESARPSHTSQYLCASSEARGLAEFTDTQYFGPGTRLTVLEGQPKANPTVTLFPPSSEELQANKATLVCLISDFYPGAVTVAWKADGSPVKAGVETTKPSKQSNNKYAASSYLSLTPEQWKSHRSYSCQVTHEGSTVEKTVAPTECSPIKTDVITMDPKDNCSKDANDTLLLQLTNTSAYYMYLLLLLKSVVYFAIITCCLLRRTAFCCNGEKSRAKRSGSGATNFSLLKQAGDVEENPGPTSMDWIWRILFLVGAATGAHSGPLFNQEVQIPLTESYCGPCPKNWICYKNNCYQFFDESKNWYESQASCMSQNASLLKVYSKEDQDLLKLVKSYHWMGLVHIPTNGSWQWEDGSILSPNLLTIIEMQKGDCALYASSFKGYIENCSTPNTYICMQRTVGGGGSGGGGSGGGGSDLFNQEVQIPLTESYCGPCPKNWICYKNNCYQFFDESKNWYESQASCMSQNASLLKVYSKEDQDLLKLVKSYHWMGLVHIPTNGSWQWEDGSILSPNLLTIIEMQKGDCALYASSFKGYIENCSTPNTYICMQRTVGSGGGGSGGGGSGGGGSFEQVQLQQPGAELVKPGASVKMSCKASGYAFSSYWINWMKQKPGQGLEWIGQIYPGDGTENRFSVNFQKAAKSFSLKISDSQLGDAAMYFCAYRSAVNARLMFGDGTQLVVKPNTRASTKGPSVFPLAPSSKSTSGGTAALGCLVKDYFPEPVTVSWNSGALTSGVHTFPAVLQSSGLYSLSSVVTVPSSSLGTQTYICNVNHKPSNTKVDKRVEPKSCEVKTDSTDHVKPKETENTKQPSKSCHKPKAIVHTEKVNMMSLTVLGLRMLFAKTVAVNFLLTAKLFFL

SEQ ID NO: 14308 - protein, 930 aa, Artificial Sequence
  Synthetic Polypeptide
MALPVTALLLPLALLLHAARPEADIYQTPRYLVIGTGKKITLECSQTMGHDKMYWYQQDPGMELHLIHYSYGVNSTEKGDLSSESTVSRIRTEHFPLTLESARPSHTSQYLCASSEARGLAEFTDTQYFGPGTRLTVLEGQPKANPTVTLFPPSSEELQANKATLVCLISDFYPGAVTVAWKADGSPVKAGVETTKPSKQSNNKYAASSYLSLTPEQWKSHRSYSCQVTHEGSTVEKTVAPTECSGRADCGITSASYHQGVLSATILYEILLGKATLYAVLVSALVLMAMVKRKDSRGRAKRSGSGATNFSLLKQAGDVEENPGPTSMDWIWRILFLVGAATGAHSGPLFNQEVQIPLTESYCGPCPKNWICYKNNCYQFFDESKNWYESQASCMSQNASLLKVYSKEDQDLLKLVKSYHWMGLVHIPTNGSWQWEDGSILSPNLLTIIEMQKGDCALYASSFKGYIENCSTPNTYICMQRTVGGGGSGGGGSGGGGSDLFNQEVQIPLTESYCGPCPKNWICYKNNCYQFFDESKNWYESQASCMSQNASLLKVYSKEDQDLLKLVKSYHWMGLVHIPTNGSWQWEDGSILSPNLLTIIEMQKGDCALYASSFKGYIENCSTPNTYICMQRTVGSGGGGSGGGGSGGGGSFEQVQLQQPGAELVKPGASVKMSCKASGYAFSSYWINWMKQKPGQGLEWIGQIYPGDGTENRFSVNFQKAAKSFSLKISDSQLGDAAMYFCAYRSAVNARLMFGDGTQLVVKPNTRASTKGPSVFPLAPSSKSTSGGTAALGCLVKDYFPEPVTVSWNSGALTSGVHTFPAVLQSSGLYSLSSVVTVPSSSLGTQTYICNVNHKPSNTKVDKRVEPKSCIPEDTFFPSSDVPCDVKLVEKSFETDTNLNFQNLSVIGFRILLLKVAGFNLLMTLRLWSS

SEQ ID NO: 14309 - protein, 930 aa, Artificial Sequence
  Synthetic Polypeptide
MALPVTALLLPLALLLHAARPEADIYQTPRYLVIGTGKKITLECSQTMGHDKMYWYQQDPGMELHLIHYSYGVNSTEKGDLSSESTVSRIRTEHFPLTLESARPSHTSQYLCASSEARGLAEFTDTQYFGPGTRLTVLEGQPKANPTVTLFPPSSEELQANKATLVCLISDFYPGAVTVAWKADGSPVKAGVETTKPSKQSNNKYAASSYLSLTPEQWKSHRSYSCQVTHEGSTVEKTVAPTECSGRADCGFTSESYQQGVLSATILYEILLGKATLYAVLVSALVLMAMVKRKDSRGRAKRSGSGATNFSLLKQAGDVEENPGPTSMDWIWRILFLVGAATGAHSGPLFNQEVQIPLTESYCGPCPKNWICYKNNCYQFFDESKNWYESQASCMSQNASLLKVYSKEDQDLLKLVKSYHWMGLVHIPTNGSWQWEDGSILSPNLLTIIEMQKGDCALYASSFKGYIENCSTPNTYICMQRTVGGGGSGGGGSGGGGSDLFNQEVQIPLTESYCGPCPKNWICYKNNCYQFFDESKNWYESQASCMSQNASLLKVYSKEDQDLLKLVKSYHWMGLVHIPTNGSWQWEDGSILSPNLLTIIEMQKGDCALYASSFKGYIENCSTPNTYICMQRTVGSGGGGSGGGGSGGGGSFEQVQLQQPGAELVKPGASVKMSCKASGYAFSSYWINWMKQKPGQGLEWIGQIYPGDGTENRFSVNFQKAAKSFSLKISDSQLGDAAMYFCAYRSAVNARLMFGDGTQLVVKPNTRASTKGPSVFPLAPSSKSTSGGTAALGCLVKDYFPEPVTVSWNSGALTSGVHTFPAVLQSSGLYSLSSVVTVPSSSLGTQTYICNVNHKPSNTKVDKRVEPKSCIPEDTFFPSPESSCDVKLVEKSFETDTNLNFQNLSVIGFRILLLKVAGFNLLMTLRLWSS

SEQ ID NO: 14310 - protein, 758 aa, Artificial Sequence
  Synthetic Polypeptide
MDWIWRILFLVGAATGAHSLFNQEVQIPLTESYCGPCPKNWICYKNNCYQFFDESKNWYESQASCMSQNASLLKVYSKEDQDLLKLVKSYHWMGLVHIPTNGSWQWEDGSILSPNLLTIIEMQKGDCALYASSFKGYIENCSTPNTYICMQRTVGGGGSGGGGSGGGGSDLFNQEVQIPLTESYCGPCPKNWICYKNNCYQFFDESKNWYESQASCMSQNASLLKVYSKEDQDLLKLVKSYHWMGLVHIPTNGSWQWEDGSILSPNLLTIIEMQKGDCALYASSFKGYIENCSTPNTYICMQRTVGSGGGGSGGGGSGGGGSFEQVQLQQPGAELVKPGASVKMSCKASGYAFSSYWINWMKQKPGQGLEWIGQIYPGDGTENRFSVNFQKAAKSFSLKISDSQLGDAAMYFCAYRSAVNARLMFGDGTQLVVKPNGGGGSGGGGSGGGGSEADIYQTPRYLVIGTGKKITLECSQTMGHDKMYWYQQDPGMELHLIHYSYGVNSTEKGDLSSESTVSRIRTEHFPLTLESARPSHTSQYLCASSEARGLAEFTDTQYFGPGTRLTVTRGGGSDGNEEMGGITQTPYKVSISGTTVILTCPQYPGSEILWQHNDKNIGGDEDDKNIGSDEDHLSLKEFSELEQSGYYVCYPRGSKPEDANFYLYLRARVCENCMEMDVMSVATIVIVDICITGGLLLLVYYWSKNRKAKAKPVTRGAGAGGRQRGQNKERPPPVPNPDYEPIRKGQRDLYSGLNQRRI

SEQ ID NO: 14311 - protein, 723 aa, Artificial Sequence
  Synthetic Polypeptide
MDWIWRILFLVGAATGAHSLFNQEVQIPLTESYCGPCPKNWICYKNNCYQFFDESKNWYESQASCMSQNASLLKVYSKEDQDLLKLVKSYHWMGLVHIPTNGSWQWEDGSILSPNLLTIIEMQKGDCALYASSFKGYIENCSTPNTYICMQRTVGGGGSGGGGSGGGGSDLFNQEVQIPLTESYCGPCPKNWICYKNNCYQFFDESKNWYESQASCMSQNASLLKVYSKEDQDLLKLVKSYHWMGLVHIPTNGSWQWEDGSILSPNLLTIIEMQKGDCALYASSFKGYIENCSTPNTYICMQRTVGSGGGGSGGGGSGGGGSFEQVQLQQPGAELVKPGASVKMSCKASGYAFSSYWINWMKQKPGQGLEWIGQIYPGDGTENRFSVNFQKAAKSFSLKISDSQLGDAAMYFCAYRSAVNARLMFGDGTQLVVKPNGGGGSGGGGSGGGGSEADIYQTPRYLVIGTGKKITLECSQTMGHDKMYWYQQDPGMELHLIHYSYGVNSTEKGDLSSESTVSRIRTEHFPLTLESARPSHTSQYLCASSEARGLAEFTDTQYFGPGTRLTVTRGGGSFKIPIEELEDRVFVNCNTSITWVEGTVGTLLSDITRLDLGKRILDPRGIYRCNGTDIYKDKESTVQVHYRMCQSCVELDPATVAGIIVTDVIATLLLALGVFCFAGHETGRLSGAADTQALLRNDQVYQPLRDRDDAQYSHLGGNWARNK

SEQ ID NO: 14312 - protein, 733 aa, Artificial Sequence
  Synthetic Polypeptide
MDWIWRILFLVGAATGAHSLFNQEVQIPLTESYCGPCPKNWICYKNNCYQFFDESKNWYESQASCMSQNASLLKVYSKEDQDLLKLVKSYHWMGLVHIPTNGSWQWEDGSILSPNLLTIIEMQKGDCALYASSFKGYIENCSTPNTYICMQRTVGGGGSGGGGSGGGGSDLFNQEVQIPLTESYCGPCPKNWICYKNNCYQFFDESKNWYESQASCMSQNASLLKVYSKEDQDLLKLVKSYHWMGLVHIPTNGSWQWEDGSILSPNLLTIIEMQKGDCALYASSFKGYIENCSTPNTYICMQRTVGSGGGGSGGGGSGGGGSFEQVQLQQPGAELVKPGASVKMSCKASGYAFSSYWINWMKQKPGQGLEWIGQIYPGDGTENRFSVNFQKAAKSFSLKISDSQLGDAAMYFCAYRSAVNARLMFGDGTQLVVKPNGGGGSGGGGSGGGGSEADIYQTPRYLVIGTGKKITLECSQTMGHDKMYWYQQDPGMELHLIHYSYGVNSTEKGDLSSESTVSRIRTEHFPLTLESARPSHTSQYLCASSEARGLAEFTDTQYFGPGTRLTVTRGGGSQSIKGNHLVKVYDYQEDGSVLLTCDAEAKNITWFKDGKMIGFLTEDKKKWNLGSNAKDPRGMYQCKGSQNKSKPLQVYYRMCQNCIELNAATISGFLFAEIVSIFVLAVGVYFIAGQDGVRQSRASDKQTLLPNDQLYQPLKDREDDQYSHLQGNQLRRN

SEQ ID NO: 14313 - protein, 716 aa, Artificial Sequence
  Synthetic Polypeptide
MDWIWRILFLVGAATGAHSLFNQEVQIPLTESYCGPCPKNWICYKNNCYQFFDESKNWYESQASCMSQNASLLKVYSKEDQDLLKLVKSYHWMGLVHIPTNGSWQWEDGSILSPNLLTIIEMQKGDCALYASSFKGYIENCSTPNTYICMQRTVGGGGSGGGGSGGGGSDLFNQEVQIPLTESYCGPCPKNWICYKNNCYQFFDESKNWYESQASCMSQNASLLKVYSKEDQDLLKLVKSYHWMGLVHIPTNGSWQWEDGSILSPNLLTIIEMQKGDCALYASSFKGYIENCSTPNTYICMQRTVGSGGGGSGGGGSGGGGSFEQVQLQQPGAELVKPGASVKMSCKASGYAFSSYWINWMKQKPGQGLEWIGQIYPGDGTENRFSVNFQKAAKSFSLKISDSQLGDAAMYFCAYRSAVNARLMFGDGTQLVVKPNGGGGSGGGGSGGGGSEADIYQTPRYLVIGTGKKITLECSQTMGHDKMYWYQQDPGMELHLIHYSYGVNSTEKGDLSSESTVSRIRTEHFPLTLESARPSHTSQYLCASSEARGLAEFTDTQYFGPGTRLTVTRGGGSQSFGLLDPKLCYLLDGILFIYGVILTALFLRVKFSRSADAPAYQQGQNQLYNELNLGRREEYDVLDKRRGRDPEMGGKPQRRKNPQEGLYNELQKDKMAEAYSEIGMKGERRRGKGHDGLYQGLSTATKDTYDALHMQALPPR

SEQ ID NO: 14314 - protein, 746 aa, Artificial Sequence
  Synthetic Polypeptide
MDWIWRILFLVGAATGAHSGPLFNQEVQIPLTESYCGPCPKNWICYKNNCYQFFDESKNWYESQASCMSQNASLLKVYSKEDQDLLKLVKSYHWMGLVHIPTNGSWQWEDGSILSPNLLTIIEMQKGDCALYASSFKGYIENCSTPNTYICMQRTVGGGGSGGGGSGGGGSDLFNQEVQIPLTESYCGPCPKNWICYKNNCYQFFDESKNWYESQASCMSQNASLLKVYSKEDQDLLKLVKSYHWMGLVHIPTNGSWQWEDGSILSPNLLTIIEMQKGDCALYASSFKGYIENCSTPNTYICMQRTVGSGGGGSGGGGSGGGGSFEQVQLQQPGAELVKPGASVKMSCKASGYAFSSYWINWMKQKPGQGLEWIGQIYPGDGTENRFSVNFQKAAKSFSLKISDSQLGDAAMYFCAYRSAVNARLMFGDGTQLVVKPNTRIQNPDPAVYQLRDSKSSDKSVCLFTDFDSQTNVSQSKDSDVYITDKTVLDMRSMDFKSNSAVAWSNKSDFACANAFNNSIIPEDTFFPSPESSCDVKLVEKSFETDTNLNFQNLSVIGFRILLLKVAGFNLLMTLRLWSSRAKRSGSGVKQTLNFDLLKLAGDVESNPGPSRGHMAKPLSQEESTLIERATATINSIPISEDYSVASAALSSDGRIFTGVNVYHFTGGPCAELVVLGTAAAAAAGNLTCIVAIGNENRGILSPCGRCRQVLLDLHPGIKAIVKDSDGQPTAVGIRELLPSGYVWEG

SEQ ID NO: 14315 - protein, 580 aa, Artificial Sequence
  Synthetic Polypeptide
MDWIWRILFLVGAATGAHSGPLFNQEVQIPLTESYCGPCPKNWICYKNNCYQFFDESKNWYESQASCMSQNASLLKVYSKEDQDLLKLVKSYHWMGLVHIPTNGSWQWEDGSILSPNLLTIIEMQKGDCALYASSFKGYIENCSTPNTYICMQRTVGGGGSGGGGSGGGGSDLFNQEVQIPLTESYCGPCPKNWICYKNNCYQFFDESKNWYESQASCMSQNASLLKVYSKEDQDLLKLVKSYHWMGLVHIPTNGSWQWEDGSILSPNLLTIIEMQKGDCALYASSFKGYIENCSTPNTYICMQRTVGSGGGGSGGGGSGGGGSFEQVQLQQPGAELVKPGASVKMSCKASGYAFSSYWINWMKQKPGQGLEWIGQIYPGDGTENRFSVNFQKAAKSFSLKISDSQLGDAAMYFCAYRSAVNARLMFGDGTQLVVKPNTRIQNPDPAVYQLRDSKSSDKSVCLFTDFDSQTNVSQSKDSDVYITDKTVLDMRSMDFKSNSAVAWSNKSDFACANAFNNSIIPEDTFFPSPESSCDVKLVEKSFETDTNLNFQNLSVIGFRILLLKVAGFNLLMTLRLWSS

SEQ ID NO: 14316 - protein, 758 aa, Artificial Sequence
  Synthetic Polypeptide
MDWIWRILFLVGAATGAHSGPLFNQEVQIPLTESYCGPCPKNWICYKNNCYQFFDESKNWYESQASCMSQNASLLKVYSKEDQDLLKLVKSYHWMGLVHIPTNGSWQWEDGSILSPNLLTIIEMQKGDCALYASSFKGYIENCSTPNTYICMQRTVGGGGSGGGGSGGGGSDLFNQEVQIPLTESYCGPCPKNWICYKNNCYQFFDESKNWYESQASCMSQNASLLKVYSKEDQDLLKLVKSYHWMGLVHIPTNGSWQWEDGSILSPNLLTIIEMQKGDCALYASSFKGYIENCSTPNTYICMQRTVGSGGGGSGGGGSGGGGSFEQVQLQQPGAELVKPGASVKMSCKASGYAFSSYWINWMKQKPGQGLEWIGQIYPGDGTENRFSVNFQKAAKSFSLKISDSQLGDAAMYFCAYRSAVNARLMFGDGTQLVVKPNTREQKLISEEDGSGIQNPDPAVYQLRDSKSSDKSVCLFTDFDSQTNVSQSKDSDVYITDKCVLDMRSMDFKSNSAVAWSNKSDFACANAFNNSIIPEDTFFPSPESSCDVKLVEKSFETDTNLNFQNLSVIGFRILLLKVAGFNLLMTLRLWSSRAKRSGSGVKQTLNFDLLKLAGDVESNPGPSRGHMAKPLSQEESTLIERATATINSIPISEDYSVASAALSSDGRIFTGVNVYHFTGGPCAELVVLGTAAAAAAGNLTCIVAIGNENRGILSPCGRCRQVLLDLHPGIKAIVKDSDGQPTAVGIRELLPSGYVWEG

SEQ ID NO: 14317 - protein, 592 aa, Artificial Sequence
  Synthetic Polypeptide
MDWIWRILFLVGAATGAHSGPLFNQEVQIPLTESYCGPCPKNWICYKNNCYQFFDESKNWYESQASCMSQNASLLKVYSKEDQDLLKLVKSYHWMGLVHIPTNGSWQWEDGSILSPNLLTIIEMQKGDCALYASSFKGYIENCSTPNTYICMQRTVGGGGSGGGGSGGGGSDLFNQEVQIPLTESYCGPCPKNWICYKNNCYQFFDESKNWYESQASCMSQNASLLKVYSKEDQDLLKLVKSYHWMGLVHIPTNGSWQWEDGSILSPNLLTIIEMQKGDCALYASSFKGYIENCSTPNTYICMQRTVGSGGGGSGGGGSGGGGSFEQVQLQQPGAELVKPGASVKMSCKASGYAFSSYWINWMKQKPGQGLEWIGQIYPGDGTENRFSVNFQKAAKSFSLKISDSQLGDAAMYFCAYRSAVNARLMFGDGTQLVVKPNTREQKLISEEDGSGIQNPDPAVYQLRDSKSSDKSVCLFTDFDSQTNVSQSKDSDVYITDKCVLDMRSMDFKSNSAVAWSNKSDFACANAFNNSIIPEDTFFPSPESSCDVKLVEKSFETDTNLNFQNLSVIGFRILLLKVAGFNLLMTLRLWSS

SEQ ID NO: 14318 - protein, 640 aa, Artificial Sequence; identical to SEQ ID NO: 14220
  Synthetic Polypeptide

SEQ ID NO: 14319 - protein, 646 aa, Artificial Sequence; identical to SEQ ID NO: 14221
  Synthetic Polypeptide

SEQ ID NO: 14320 - protein, 1059 aa, Artificial Sequence; identical to SEQ ID NO: 14222
  Synthetic Polypeptide

SEQ ID NO: 14321 - protein, 999 aa, Artificial Sequence; identical to SEQ ID NO: 14223
  Synthetic Polypeptide

SEQ ID NO: 14322 - protein, 998 aa, Artificial Sequence; identical to SEQ ID NO: 14224
  Synthetic Polypeptide

SEQ ID NO: 14323 - protein, 765 aa, Artificial Sequence; identical to SEQ ID NO: 14225
  Synthetic Polypeptide

SEQ ID NO: 14324 - protein, 990 aa, Artificial Sequence; identical to SEQ ID NO: 14226
  Synthetic Polypeptide

SEQ ID NO: 14325 - protein, 769 aa, Artificial Sequence; identical to SEQ ID NO: 14227
  Synthetic Polypeptide

SEQ ID NO: 14326 - protein, 991 aa, Artificial Sequence; identical to SEQ ID NO: 14228
  Synthetic Polypeptide

SEQ ID NO: 14327 - protein, 1043 aa, Artificial Sequence; identical to SEQ ID NO: 14229
  Synthetic Polypeptide

SEQ ID NO: 14328 - protein, 1044 aa, Artificial Sequence; identical to SEQ ID NO: 14230
  Synthetic Polypeptide

SEQ ID NO: 14329 - protein, 998 aa, Artificial Sequence; identical to SEQ ID NO: 14231
  Synthetic Polypeptide

SEQ ID NO: 14330 - protein, 1080 aa, Artificial Sequence; identical to SEQ ID NO: 14232
  Synthetic Polypeptide

SEQ ID NO: 14331 - protein, 1098 aa, Artificial Sequence; identical to SEQ ID NO: 14233
  Synthetic Polypeptide

SEQ ID NO: 14332 - protein, 1035 aa, Artificial Sequence; identical to SEQ ID NO: 14234
  Synthetic Polypeptide

SEQ ID NO: 14333 - protein, 773 aa, Artificial Sequence; identical to SEQ ID NO: 14235
  Synthetic Polypeptide

SEQ ID NO: 14334 - protein, 1050 aa, Artificial Sequence; identical to SEQ ID NO: 14236
  Synthetic Polypeptide

SEQ ID NO: 14335 - protein, 1175 aa, Artificial Sequence; identical to SEQ ID NO: 14237
  Synthetic Polypeptide

SEQ ID NO: 14336 - protein, 961 aa, Artificial Sequence; identical to SEQ ID NO: 14238
  Synthetic Polypeptide

SEQ ID NO: 14337 - protein, 961 aa, Artificial Sequence; identical to SEQ ID NO: 14239
  Synthetic Polypeptide

SEQ ID NO: 14338 - protein, 1032 aa, Artificial Sequence; identical to SEQ ID NO: 14240
  Synthetic Polypeptide

SEQ ID NO: 14339 - protein, 1073 aa, Artificial Sequence; identical to SEQ ID NO: 14241
  Synthetic Polypeptide

SEQ ID NO: 14340 - protein, 1034 aa, Artificial Sequence; identical to SEQ ID NO: 14242
  Synthetic Polypeptide

SEQ ID NO: 14341 - protein, 1076 aa, Artificial Sequence; identical to SEQ ID NO: 14243
  Synthetic Polypeptide

SEQ ID NO: 14342 - protein, 966 aa, Artificial Sequence; identical to SEQ ID NO: 14244
  Synthetic Polypeptide

SEQ ID NO: 14343 - protein, 791 aa, Artificial Sequence; identical to SEQ ID NO: 14245
  Synthetic Polypeptide

SEQ ID NO: 14344 - protein, 769 aa, Artificial Sequence; identical to SEQ ID NO: 14246
  Synthetic Polypeptide

SEQ ID NO: 14345 - protein, 769 aa, Artificial Sequence; identical to SEQ ID NO: 14247
  Synthetic Polypeptide

SEQ ID NO: 14346 - protein, 595 aa, Artificial Sequence; identical to SEQ ID NO: 14248
  Synthetic Polypeptide

SEQ ID NO: 14347 - protein, 560 aa, Artificial Sequence; identical to SEQ ID NO: 14249
  Synthetic Polypeptide

SEQ ID NO: 14348 - protein, 570 aa, Artificial Sequence; identical to SEQ ID NO: 14250
  Synthetic Polypeptide

SEQ ID NO: 14349 - protein, 553 aa, Artificial Sequence; identical to SEQ ID NO: 14251
  Synthetic Polypeptide

SEQ ID NO: 14350 - protein, 786 aa, Artificial Sequence; identical to SEQ ID NO: 14252
  Synthetic Polypeptide

SEQ ID NO: 14351 - protein, 818 aa, Artificial Sequence; identical to SEQ ID NO: 14253
  Synthetic Polypeptide

SEQ ID NO: 14352 - protein, 868 aa, Artificial Sequence; identical to SEQ ID NO: 14254
  Synthetic Polypeptide

SEQ ID NO: 14353 - protein, 691 aa, Artificial Sequence; identical to SEQ ID NO: 14255
  Synthetic Polypeptide

SEQ ID NO: 14354 - protein, 461 aa, Artificial Sequence; identical to SEQ ID NO: 14256
  Synthetic Polypeptide

SEQ ID NO: 14355 - protein, 441 aa, Artificial Sequence; identical to SEQ ID NO: 14257
  Synthetic Polypeptide

SEQ ID NO: 14356 - protein, 275 aa, Artificial Sequence; identical to SEQ ID NO: 14258
  Synthetic Polypeptide

SEQ ID NO: 14357 - protein, 709 aa, Artificial Sequence; identical to SEQ ID NO: 14259
  Synthetic Polypeptide

SEQ ID NO: 14358 - protein, 479 aa, Artificial Sequence; identical to SEQ ID NO: 14260
  Synthetic Polypeptide

SEQ ID NO: 14359 - protein, 453 aa, Artificial Sequence; identical to SEQ ID NO: 14261
  Synthetic Polypeptide

SEQ ID NO: 14360 - protein, 287 aa, Artificial Sequence; identical to SEQ ID NO: 14262
  Synthetic Polypeptide

SEQ ID NO: 14361 - protein, 786 aa, Artificial Sequence; identical to SEQ ID NO: 14263
  Synthetic Polypeptide

SEQ ID NO: 14362 - protein, 818 aa, Artificial Sequence; identical to SEQ ID NO: 14264
  Synthetic Polypeptide

SEQ ID NO: 14363 - protein, 1304 aa, Artificial Sequence
  Synthetic Polypeptide
MALPVTALLLPLALLLHAARPACQVQLVESGGGLVQAGDSVTLSCTASGRTFSSYALAWFRQRPGKEREFVAGLRWGGPTNYADSVKDRFTISGDSAKHTMYLQMNSLKPEDTAVYYCGYNPGGWAVPSQYEYDSWGQGTQVTVSSGTGGGGSGGGGSGGGGSEFEADIYQTPRYLVIGTGKKITLECSQTMGHDKMYWYQQDPGMELHLIHYSYGVNSTEKGDLSSESTVSRIRTEHFPLTLESARPSHTSQYLCASSEARGLAEFTDTQYFGPGTRLTVLEIQNPDPAVYQLRDSKSSDKSVCLFTDFDSQTNVSQSKDSDVYITDKCVLDMRSMDFKSNSAVAWSNKSDFACANAFNNSIIPEDTFFPSSDVPCDVKLVEKSFETDTNLNFQNLSVIGFRILLLKVAGFNLLMTLRLWSSRAKRSGSGVKQTLNFDLLKLAGDVESNPGPTSMDWIWRILFLVGAATGAHSGPLFNQEVQIPLTESYCGPCPKNWICYKNNCYQFFDESKNWYESQASCMSQNASLLKVYSKEDQDLLKLVKSYHWMGLVHIPTNGSWQWEDGSILSPNLLTIIEMQKGDCALYASSFKGYIENCSTPNTYICMQRTVGGGGSGGGGSGGGGSDLFNQEVQIPLTESYCGPCPKNWICYKNNCYQFFDESKNWYESQASCMSQNASLLKVYSKEDQDLLKLVKSYHWMGLVHIPTNGSWQWEDGSILSPNLLTIIEMQKGDCALYASSFKGYIENCSTPNTYICMQRTVGSGGGGSGGGGSGGGGSFEQVQLQQPGAELVKPGASVKMSCKASGYAFSSYWINWMKQKPGQGLEWIGQIYPGDGTENRFSVNFQKAAKSFSLKISDSQLGDAAMYFCAYRSAVNARLMFGDGTQLVVKPNTREDLKNVFPPEVAVFEPSKAEIAHTQKATLVCLATGFYPDHVELSWWVNGKEVHSGVCTDPQPLKEQPALNDSRYCLSSRLRVSATFWQNPRNHFRCQVQFYGLSENDEWTQDRAKPVTQIVSAEAWGRADCGITSASYHQGVLSATILYEILLGKATLYAVLVSALVLMAMVKRKDSRGRAKRSGSGATNFSLLKQAGDVEENPGPSRGHMTEYKPTVRLATRDDVPRAVRTLAAAFADYPATRHTVDPDRHIERVTELQELFLTRVGLDIGKVWVADDGAAVAVWTTPESVEAGAVFAEIGPRMAELSGSRLAAQQQMEGLLAPHRPKEPAWFLATVGVSPDHQGKGLGSAVVLPGVEAAERAGVPAFLETSAPRNLPFYERLGFTVTADVEVPEGPRTWCMTRKPGA

SEQ ID NO: 14364 - protein, 1303 aa, Artificial Sequence
  Synthetic Polypeptide
MALPVTALLLPLALLLHAARPACQVQLVESGGGLVQAGDSVTLSCTASGRTFSSYALAWFRQRPGKEREFVAGLRWGGPTNYADSVKDRFTISGDSAKHTMYLQMNSLKPEDTAVYYCGYNPGGWAVPSQYEYDSWGQGTQVTVSSGTGGGGSGGGGSGGGGSEFEADIYQTPRYLVIGTGKKITLECSQTMGHDKMYWYQQDPGMELHLIHYSYGVNSTEKGDLSSESTVSRIRTEHFPLTLESARPSHTSQYLCASSEARGLAEFTDTQYFGPGTRLTVLEDLKNVFPPEVAVFEPSKAEIAHTQKATLVCLATGFYPDHVELSWWVNGKEVHSGVCTDPQPLKEQPALNDSRYCLSSRLRVSATFWQNPRNHFRCQVQFYGLSENDEWTQDRAKPVTQIVSAEAWGRADCGITSASYHQGVLSATILYEILLGKATLYAVLVSALVLMAMVKRKDSRGRAKRSGSGATNFSLLKQAGDVEENPGPTSMDWIWRILFLVGAATGAHSGPLFNQEVQIPLTESYCGPCPKNWICYKNNCYQFFDESKNWYESQASCMSQNASLLKVYSKEDQDLLKLVKSYHWMGLVHIPTNGSWQWEDGSILSPNLLTIIEMQKGDCALYASSFKGYIENCSTPNTYICMQRTVGGGGSGGGGSGGGGSDLFNQEVQIPLTESYCGPCPKNWICYKNNCYQFFDESKNWYESQASCMSQNASLLKVYSKEDQDLLKLVKSYHWMGLVHIPTNGSWQWEDGSILSPNLLTIIEMQKGDCALYASSFKGYIENCSTPNTYICMQRTVGSGGGGSGGGGSGGGGSFEQVQLQQPGAELVKPGASVKMSCKASGYAFSSYWINWMKQKPGQGLEWIGQIYPGDGTENRFSVNFQKAAKSFSLKISDSQLGDAAMYFCAYRSAVNARLMFGDGTQLVVKPNTRIQNPDPAVYQLRDSKSSDKSVCLFTDFDSQTNVSQSKDSDVYITDKCVLDMRSMDFKSNSAVAWSNKSDFACANAFNNSIIPEDTFFPSSDVPCDVKLVEKSFETDTNLNFQNLSVIGFRILLLKVAGFNLLMTLRLWSSRAKRSGSGVKQTLNFDLLKLAGDVESNPGPSRGHMTEYKPTVRLATRDDVPRAVRTLAAAFADYPATRHTVDPDRHIERVTELQELFLTRVGLDIGKVWVADDGAAVAVWTTPESVEAGAVFAEIGPRMAELSGSRLAAQQQMEGLLAPHRPKEPAWFLATVGVSPDHQGKGLGSAVVLPGVEAAERAGVPAFLETSAPRNLPFYERLGFTVTADVEVPEGPRTWCMTRKPGA

SEQ ID NO: 14365 - protein, 1301 aa, Artificial Sequence
  Synthetic Polypeptide
MALPVTALLLPLALLLHAARPACQVQLVESGGGLVQAGDSVTLSCTASGRTFSSYALAWFRQRPGKEREFVAGLRWGGPTNYADSVKDRFTISGDSAKHTMYLQMNSLKPEDTAVYYCGYNPGGWAVPSQYEYDSWGQGTQVTVSSGTGGGGSGGGGSGGGGSEFEADIYQTPRYLVIGTGKKITLECSQTMGHDKMYWYQQDPGMELHLIHYSYGVNSTEKGDLSSESTVSRIRTEHFPLTLESARPSHTSQYLCASSEARGLAEFTDTQYFGPGTRLTVLEDLKNVFPPEVAVFEPSEAEISHTQKATLVCLATGFYPDHVELSWWVNGKEVHSGVCTDPQPLKEQPALNDSRYCLSSRLRVSATFWQNPRNHFRCQVQFYGLSENDEWTQDRAKPVTQIVSAEAWGRADCGFTSESYQQGVLSATILYEILLGKATLYAVLVSALVLMAMVKRKDSRGRAKRSGSGATNFSLLKQAGDVEENPGPTSMDWIWRILFLVGAATGAHSLFNQEVQIPLTESYCGPCPKNWICYKNNCYQFFDESKNWYESQASCMSQNASLLKVYSKEDQDLLKLVKSYHWMGLVHIPTNGSWQWEDGSILSPNLLTIIEMQKGDCALYASSFKGYIENCSTPNTYICMQRTVGGGGSGGGGSGGGGSDLFNQEVQIPLTESYCGPCPKNWICYKNNCYQFFDESKNWYESQASCMSQNASLLKVYSKEDQDLLKLVKSYHWMGLVHIPTNGSWQWEDGSILSPNLLTIIEMQKGDCALYASSFKGYIENCSTPNTYICMQRTVGSGGGGSGGGGSGGGGSFEQVQLQQPGAELVKPGASVKMSCKASGYAFSSYWINWMKQKPGQGLEWIGQIYPGDGTENRFSVNFQKAAKSFSLKISDSQLGDAAMYFCAYRSAVNARLMFGDGTQLVVKPNTRIQNPDPAVYQLRDSKSSDKSVCLFTDFDSQTNVSQSKDSDVYITDKCVLDMRSMDFKSNSAVAWSNKSDFACANAFNNSIIPEDTFFPSPESSCDVKLVEKSFETDTNLNFQNLSVIGFRILLLKVAGFNLLMTLRLWSSRAKRSGSGVKQTLNFDLLKLAGDVESNPGPSRGHMTEYKPTVRLATRDDVPRAVRTLAAAFADYPATRHTVDPDRHIERVTELQELFLTRVGLDIGKVWVADDGAAVAVWTTPESVEAGAVFAEIGPRMAELSGSRLAAQQQMEGLLAPHRPKEPAWFLATVGVSPDHQGKGLGSAVVLPGVEAAERAGVPAFLETSAPRNLPFYERLGFTVTADVEVPEGPRTWCMTRKPGA

SEQ ID NO: 14366 - protein, 1070 aa, Artificial Sequence
  Synthetic Polypeptide
MALPVTALLLPLALLLHAARPACQVQLVESGGGLVQAGDSVTLSCTASGRTFSSYALAWFRQRPGKEREFVAGLRWGGPTNYADSVKDRFTISGDSAKHTMYLQMNSLKPEDTAVYYCGYNPGGWAVPSQYEYDSWGQGTQVTVSSGTGGGGSGGGGSGGGGSEFEADIYQTPRYLVIGTGKKITLECSQTMGHDKMYWYQQDPGMELHLIHYSYGVNSTEKGDLSSESTVSRIRTEHFPLTLESARPSHTSQYLCASSEARGLAEFTDTQYFGPGTRLTVLEDLKNVFPPEVAVFEPSEAEISHTQKATLVCLATGFYPDHVELSWWVNGKEVHSGVCTDPQPLKEQPALNDSRYCLSSRLRVSATFWQNPRNHFRCQVQFYGLSENDEWTQDRAKPVTQIVSAEAWGRADCGFTSESYQQGVLSATILYEILLGKATLYAVLVSALVLMAMVKRKDSRGRAKRSGSGATNFSLLKQAGDVEENPGPTSMDWIWRILFLVGAATGAHSGPLFNQEVQIPLTESYCGPCPKNWICYKNNCYQFFDESKNWYESQASCMSQNASLLKVYSKEDQDLLKLVKSYHWMGLVHIPTNGSWQWEDGSILSPNLLTIIEMQKGDCALYASSFKGYIENCSTPNTYICMQRTVGGGGSGGGGSGGGGSDLFNQEVQIPLTESYCGPCPKNWICYKNNCYQFFDESKNWYESQASCMSQNASLLKVYSKEDQDLLKLVKSYHWMGLVHIPTNGSWQWEDGSILSPNLLTIIEMQKGDCALYASSFKGYIENCSTPNTYICMQRTVGSGGGGSGGGGSGGGGSFEQVQLQQPGAELVKPGASVKMSCKASGYAFSSYWINWMKQKPGQGLEWIGQIYPGDGTENRFSVNFQKAAKSFSLKISDSQLGDAAMYFCAYRSAVNARLMFGDGTQLVVKPNTRIQNPDPAVYQLRDSKSSDKSVCLFTDFDSQTNVSQSKDSDVYITDKCVLDMRSMDFKSNSAVAWSNKSDFACANAFNNSIIPEDTFFPSPESSCDVKLVEKSFETDTNLNFQNLSVIGFRILLLKVAGFNLLMTLRLWSS

SEQ ID NO: 14367 - protein, 1295 aa, Artificial Sequence
  Synthetic Polypeptide
MALPVTALLLPLALLLHAARPACQVQLVESGGGLVQAGDSVTLSCTASGRTFSSYALAWFRQRPGKEREFVAGLRWGGPTNYADSVKDRFTISGDSAKHTMYLQMNSLKPEDTAVYYCGYNPGGWAVPSQYEYDSWGQGTQVTVSSGTGGGGSGGGGSGGGGSEFEADIYQTPRYLVIGTGKKITLECSQTMGHDKMYWYQQDPGMELHLIHYSYGVNSTEKGDLSSESTVSRIRTEHFPLTLESARPSHTSQYLCASSEARGLAEFTDTQYFGPGTRLTVLEDLKNVFPPEVAVFEPSEAEISHTQKATLVCLATGFYPDHVELSWWVNGKEVHSGVCTDPQPLKEQPALNDSRYCLSSRLRVSATFWQNPRNHFRCQVQFYGLSENDEWTQDRAKPVTQIVSAEAWGRADCGFTSESYQQGVLSATILYEILLGKATLYAVLVSALVLMAMVKRKDSRGRAKRSGSGATNFSLLKQAGDVEENPGPTSMDWIWRILFLVGAATGAHSGPLFNQEVQIPLTESYCGPCPKNWICYKNNCYQFFDESKNWYESQASCMSQNASLLKVYSKEDQDLLKLVKSYHWMGLVHIPTNGSWQWEDGSILSPNLLTIIEMQKGDCALYASSFKGYIENCSTPNTYICMQRTVGGGGSGGGGSGGGGSDLFNQEVQIPLTESYCGPCPKNWICYKNNCYQFFDESKNWYESQASCMSQNASLLKVYSKEDQDLLKLVKSYHWMGLVHIPTNGSWQWEDGSILSPNLLTIIEMQKGDCALYASSFKGYIENCSTPNTYICMQRTVGSGGGGSGGGGSGGGGSFEQVQLQQPGAELVKPGASVKMSCKASGYAFSSYWINWMKQKPGQGLEWIGQIYPGDGTENRFSVNFQKAAKSFSLKISDSQLGDAAMYFCAYRSAVNARLMFGDGTQLVVKPNTRIQNPDPAVYQLRDSKSSDKSVCLFTDFDSQTNVSQSKDSDVYITDKCVLDMRSMDFKSNSAVAWSNKSDFACANAFNNSIIPEDTFFPSPESSCDVKLVEKSFETDTNLNFQNLSVIGFRILLLKVAGFNLLMTLRLWSSRAKRSGSGVKQTLNFDLLKLAGDVESNPGPSRGGIHTMATYEVLCEVARKLGTDDREVVLFLLNVFIPQPTLAQLIGALRALKEEGRLTFPLLAECLFRAGRRDLLRDLLHLDPRFLERHLAGTMSYFSPYQLTVLHVDGELCARDIRSLIFLSKDTIGSRSTPQTFLHWVYCMENLDLLGPTDVDALMSMLRSLSRVDLQRQVQTLMGLHLSGPSHSQHYRHTP

SEQ ID NO: 14368 - protein, 1074 aa, Artificial Sequence
  Synthetic Polypeptide
MALPVTALLLPLALLLHAARPACQVQLVESGGGLVQAGDSVTLSCTASGRTFSSYALAWFRQRPGKEREFVAGLRWGGPTNYADSVKDRFTISGDSAKHTMYLQMNSLKPEDTAVYYCGYNPGGWAVPSQYEYDSWGQGTQVTVSSGTGGGGSGGGGSGGGGSEFEADIYQTPRYLVIGTGKKITLECSQTMGHDKMYWYQQDPGMELHLIHYSYGVNSTEKGDLSSESTVSRIRTEHFPLTLESARPSHTSQYLCASSEARGLAEFTDTQYFGPGTRLTVLEIQNPDPAVYQLRDSKSSDKSVCLFTDFDSQTNVSQSKDSDVYITDKCVLDMRSMDFKSNSAVAWSNKSDFACANAFNNSIIPEDTFFPSPESSCDVKLVEKSFETDTNLNFQNLSVIGFRILLLKVAGFNLLMTLRLWSSRAKRSGSGVKQTLNFDLLKLAGDVESNPGPTSMDWIWRILFLVGAATGAHSGPLFNQEVQIPLTESYCGPCPKNWICYKNNCYQFFDESKNWYESQASCMSQNASLLKVYSKEDQDLLKLVKSYHWMGLVHIPTNGSWQWEDGSILSPNLLTIIEMQKGDCALYASSFKGYIENCSTPNTYICMQRTVGGGGSGGGGSGGGGSDLFNQEVQIPLTESYCGPCPKNWICYKNNCYQFFDESKNWYESQASCMSQNASLLKVYSKEDQDLLKLVKSYHWMGLVHIPTNGSWQWEDGSILSPNLLTIIEMQKGDCALYASSFKGYIENCSTPNTYICMQRTVGSGGGGSGGGGSGGGGSFEQVQLQQPGAELVKPGASVKMSCKASGYAFSSYWINWMKQKPGQGLEWIGQIYPGDGTENRFSVNFQKAAKSFSLKISDSQLGDAAMYFCAYRSAVNARLMFGDGTQLVVKPNTREDLKNVFPPEVAVFEPSEAEISHTQKATLVCLATGFYPDHVELSWWVNGKEVHSGVCTDPQPLKEQPALNDSRYCLSSRLRVSATFWQNPRNHFRCQVQFYGLSENDEWTQDRAKPVTQIVSAEAWGRADCGFTSESYQQGVLSATILYEILLGKATLYAVLVSALVLMAMVKRKDSRG

SEQ ID NO: 14369 - protein, 1296 aa, Artificial Sequence
  Synthetic Polypeptide
MALPVTALLLPLALLLHAARPACQVQLVESGGGLVQAGDSVTLSCTASGRTFSSYALAWFRQRPGKEREFVAGLRWGGPTNYADSVKDRFTISGDSAKHTMYLQMNSLKPEDTAVYYCGYNPGGWAVPSQYEYDSWGQGTQVTVSSGTGGGGSGGGGSGGGGSEFEADIYQTPRYLVIGTGKKITLECSQTMGHDKMYWYQQDPGMELHLIHYSYGVNSTEKGDLSSESTVSRIRTEHFPLTLESARPSHTSQYLCASSEARGLAEFTDTQYFGPGTRLTVLEIQNPDPAVYQLRDSKSSDKSVCLFTDFDSQTNVSQSKDSDVYITDKCVLDMRSMDFKSNSAVAWSNKSDFACANAFNNSIIPEDTFFPSPESSCDVKLVEKSFETDTNLNFQNLSVIGFRILLLKVAGFNLLMTLRLWSSRAKRSGSGVKQTLNFDLLKLAGDVESNPGPTSMDWIWRILFLVGAATGAHSGPLFNQEVQIPLTESYCGPCPKNWICYKNNCYQFFDESKNWYESQASCMSQNASLLKVYSKEDQDLLKLVKSYHWMGLVHIPTNGSWQWEDGSILSPNLLTIIEMQKGDCALYASSFKGYIENCSTPNTYICMQRTVGGGGSGGGGSGGGGSDLFNQEVQIPLTESYCGPCPKNWICYKNNCYQFFDESKNWYESQASCMSQNASLLKVYSKEDQDLLKLVKSYHWMGLVHIPTNGSWQWEDGSILSPNLLTIIEMQKGDCALYASSFKGYIENCSTPNTYICMQRTVGSGGGGSGGGGSGGGGSFEQVQLQQPGAELVKPGASVKMSCKASGYAFSSYWINWMKQKPGQGLEWIGQIYPGDGTENRFSVNFQKAAKSFSLKISDSQLGDAAMYFCAYRSAVNARLMFGDGTQLVVKPNTREDLKNVFPPEVAVFEPSEAEISHTQKATLVCLATGFYPDHVELSWWVNGKEVHSGVCTDPQPLKEQPALNDSRYCLSSRLRVSATFWQNPRNHFRCQVQFYGLSENDEWTQDRAKPVTQIVSAEAWGRADCGFTSESYQQGVLSATILYEILLGKATLYAVLVSALVLMAMVKRKDSRGRAKRSGSGATNFSLLKQAGDVEENPGPSRGGIHTMATYEVLCEVARKLGTDDREVVLFLLNVFIPQPTLAQLIGALRALKEEGRLTFPLLAECLFRAGRRDLLRDLLHLDPRFLERHLAGTMSYFSPYQLTVLHVDGELCARDIRSLIFLSKDTIGSRSTPQTFLHWVYCMENLDLLGPTDVDALMSMLRSLSRVDLQRQVQTLMGLHLSGPSHSQHYRHTP

SEQ ID NO: 14370 - protein, 1303 aa, Artificial Sequence
  Synthetic Polypeptide
MALPVTALLLPLALLLHAARPACQVQLVESGGGLVQAGDSVTLSCTASGRTFSSYALAWFRQRPGKEREFVAGLRWGGPTNYADSVKDRFTISGDSAKHTMYLQMNSLKPEDTAVYYCGYNPGGWAVPSQYEYDSWGQGTQVTVSSGTGGGGSGGGGSGGGGSEFEADIYQTPRYLVIGTGKKITLECSQTMGHDKMYWYQQDPGMELHLIHYSYGVNSTEKGDLSSESTVSRIRTEHFPLTLESARPSHTSQYLCASSEARGLAEFTDTQYFGPGTRLTVLEDLKNVFPPEVAVFEPSEAEISHTQKATLVCLATGFYPDHVELSWWVNGKEVHSGVSTDPQPLKEQPALNDSRYCLSSRLRVSATFWQNPRNHFRCQVQFYGLSENDEWTQDRAKPVTQIVSAEAWGRADCGFTSESYQQGVLSATILYEILLGKATLYAVLVSALVLMAMVKRKDSRGRAKRSGSGATNFSLLKQAGDVEENPGPTSMDWIWRILFLVGAATGAHSGPLFNQEVQIPLTESYCGPCPKNWICYKNNCYQFFDESKNWYESQASCMSQNASLLKVYSKEDQDLLKLVKSYHWMGLVHIPTNGSWQWEDGSILSPNLLTIIEMQKGDCALYASSFKGYIENCSTPNTYICMQRTVGGGGSGGGGSGGGGSDLFNQEVQIPLTESYCGPCPKNWICYKNNCYQFFDESKNWYESQASCMSQNASLLKVYSKEDQDLLKLVKSYHWMGLVHIPTNGSWQWEDGSILSPNLLTIIEMQKGDCALYASSFKGYIENCSTPNTYICMQRTVGSGGGGSGGGGSGGGGSFEQVQLQQPGAELVKPGASVKMSCKASGYAFSSYWINWMKQKPGQGLEWIGQIYPGDGTENRFSVNFQKAAKSFSLKISDSQLGDAAMYFCAYRSAVNARLMFGDGTQLVVKPNTRIQNPDPAVYQLRDSKSSDKSVCLFTDFDSQTNVSQSKDSDVYITDKTVLDMRSMDFKSNSAVAWSNKSDFACANAFNNSIIPEDTFFPSPESSCDVKLVEKSFETDTNLNFQNLSVIGFRILLLKVAGFNLLMTLRLWSSRAKRSGSGVKQTLNFDLLKLAGDVESNPGPSRGHMTEYKPTVRLATRDDVPRAVRTLAAAFADYPATRHTVDPDRHIERVTELQELFLTRVGLDIGKVWVADDGAAVAVWTTPESVEAGAVFAEIGPRMAELSGSRLAAQQQMEGLLAPHRPKEPAWFLATVGVSPDHQGKGLGSAVVLPGVEAAERAGVPAFLETSAPRNLPFYERLGFTVTADVEVPEGPRTWCMTRKPGA

SEQ ID NO: 14371 - protein, 1385 aa, Artificial Sequence
  Synthetic Polypeptide
MALPVTALLLPLALLLHAARPACQVQLVESGGGLVQAGDSVTLSCTASGRTFSSYALAWFRQRPGKEREFVAGLRWGGPTNYADSVKDRFTISGDSAKHTMYLQMNSLKPEDTAVYYCGYNPGGWAVPSQYEYDSWGQGTQVTVSSGTGGGGSGGGGSGGGGSEFEADIYQTPRYLVIGTGKKITLECSQTMGHDKMYWYQQDPGMELHLIHYSYGVNSTEKGDLSSESTVSRIRTEHFPLTLESARPSHTSQYLCASSEARGLAEFTDTQYFGPGTRLTVLEDLKNVFPPEVAVFEPSEAEISHTQKATLVCLATGFYPDHVELSWWVNGKEVHSGVSTDPQPLKEQPALNDSRYCLSSRLRVSATFWQNPRNHFRCQVQFYGLSENDEWTQDRAKPVTQIVSAEAWGRADCGFTSESYQQGVLSATILYEILLGKATLYAVLVSALVLMAMVKRKDSRGRAKRSGSGATNFSLLKQAGDVEENPGPTSMDWIWRILFLVGAATGAHSGPLFNQEVQIPLTESYCGPCPKNWICYKNNCYQFFDESKNWYESQASCMSQNASLLKVYSKEDQDLLKLVKSYHWMGLVHIPTNGSWQWEDGSILSPNLLTIIEMQKGDCALYASSFKGYIENCSTPNTYICMQRTVGGGGSGGGGSGGGGSDLFNQEVQIPLTESYCGPCPKNWICYKNNCYQFFDESKNWYESQASCMSQNASLLKVYSKEDQDLLKLVKSYHWMGLVHIPTNGSWQWEDGSILSPNLLTIIEMQKGDCALYASSFKGYIENCSTPNTYICMQRTVGSGGGGSGGGGSGGGGSFEQVQLQQPGAELVKPGASVKMSCKASGYAFSSYWINWMKQKPGQGLEWIGQIYPGDGTENRFSVNFQKAAKSFSLKISDSQLGDAAMYFCAYRSAVNARLMFGDGTQLVVKPNTREQKLISEEDGSGTPFPSLAPPIMLLVDGKQQMVVVCLVLDVAPPGLDSPIWFSAGNGSALDAFTYGPSPATDGTWTNLAHLSLPSEELASWEPLVCHTGPGAEGHSRSTQPMHLSGEASTARTCPQEPLRGTPGGALWLGVLRLLLFKLLLFDLLLTCSCLCDPAGPLPSPATTTRLRALGSHRLHPATETGGREATSSPRPQPRDRRWGDTPPGRKPGSPVRAKRSGSGVKQTLNFDLLKLAGDVESNPGPSRGHMTEYKPTVRLATRDDVPRAVRTLAAAFADYPATRHTVDPDRHIERVTELQELFLTRVGLDIGKVWVADDGAAVAVWTTPESVEAGAVFAEIGPRMAELSGSRLAAQQQMEGLLAPHRPKEPAWFLATVGVSPDHQGKGLGSAVVLPGVEAAERAGVPAFLETSAPRNLPFYERLGFTVTADVEVPEGPRTWCMTRKPGA

SEQ ID NO: 14372 - protein, 1340 aa, Artificial Sequence
  Synthetic Polypeptide
MALPVTALLLPLALLLHAARPACQVQLVESGGGLVQAGDSVTLSCTASGRTFSSYALAWFRQRPGKEREFVAGLRWGGPTNYADSVKDRFTISGDSAKHTMYLQMNSLKPEDTAVYYCGYNPGGWAVPSQYEYDSWGQGTQVTVSSGTGGGGSGGGGSGGGGSEFEADIYQTPRYLVIGTGKKITLECSQTMGHDKMYWYQQDPGMELHLIHYSYGVNSTEKGDLSSESTVSRIRTEHFPLTLESARPSHTSQYLCASSEARGLAEFTDTQYFGPGTRLTVLEGKPIPNPLLGLDSTGSGDKQLDADVSPKPTIFLPSIAETKLQKAGTYLCLLEKFFPDVIKIHWQEKKSNTILGSQEGNTMKTNDTYMKFSWLTVPEKSLDKEHRCIVRHENNKNGVDQEIIFPPIKTDVITMDPKDNCSKDANDTLLLQLTNTSAYYMYLLLLLKSVVYFAIITCCLLRRTAFCCNGEKSRAKRSGSGATNFSLLKQAGDVEENPGPTSMDWIWRILFLVGAATGAHSGPLFNQEVQIPLTESYCGPCPKNWICYKNNCYQFFDESKNWYESQASCMSQNASLLKVYSKEDQDLLKLVKSYHWMGLVHIPTNGSWQWEDGSILSPNLLTIIEMQKGDCALYASSFKGYIENCSTPNTYICMQRTVGGGGSGGGGSGGGGSDLFNQEVQIPLTESYCGPCPKNWICYKNNCYQFFDESKNWYESQASCMSQNASLLKVYSKEDQDLLKLVKSYHWMGLVHIPTNGSWQWEDGSILSPNLLTIIEMQKGDCALYASSFKGYIENCSTPNTYICMQRTVGSGGGGSGGGGSGGGGSFEQVQLQQPGAELVKPGASVKMSCKASGYAFSSYWINWMKQKPGQGLEWIGQIYPGDGTENRFSVNFQKAAKSFSLKISDSQLGDAAMYFCAYRSAVNARLMFGDGTQLVVKPNTREQKLISEEDGSGSQPHTKPSVFVMKNGTNVACLVKEFYPKDIRINLVSSKKITEFDPAIVISPSGKYNAVKLGKYEDSNSVTCSVQHDNKTVHSTDFEVKTDSTDHVKPKETENTKQPSKSCHKPKAIVHTEKVNMMSLTVLGLRMLFAKTVAVNFLLTAKLFFLRAKRSGSGVKQTLNFDLLKLAGDVESNPGPSRGHMTEYKPTVRLATRDDVPRAVRTLAAAFADYPATRHTVDPDRHIERVTELQELFLTRVGLDIGKVWVADDGAAVAVWTTPESVEAGAVFAEIGPRMAELSGSRLAAQQQMEGLLAPHRPKEPAWFLATVGVSPDHQGKGLGSAVVLPGVEAAERAGVPAFLETSAPRNLPFYERLGFTVTADVEVPEGPRTWCMTRKPGA

SEQ ID NO: 14373 - protein, 1078 aa, Artificial Sequence
  Synthetic Polypeptide
MALPVTALLLPLALLLHAARPACQVQLVESGGGLVQAGDSVTLSCTASGRTFSSYALAWFRQRPGKEREFVAGLRWGGPTNYADSVKDRFTISGDSAKHTMYLQMNSLKPEDTAVYYCGYNPGGWAVPSQYEYDSWGQGTQVTVSSGTGGGGSGGGGSGGGGSEFEADIYQTPRYLVIGTGKKITLECSQTMGHDKMYWYQQDPGMELHLIHYSYGVNSTEKGDLSSESTVSRIRTEHFPLTLESARPSHTSQYLCASSEARGLAEFTDTQYFGPGTRLTVLESQPHTKPSVFVMKNGTNVACLVKEFYPKDIRINLVSSKKITEFDPAIVISPSGKYNAVKLGKYEDSNSVTCSVQHDNKTVHSTDFEVKTDSTDHVKPKETENTKQPSKSCHKPKAIVHTEKVNMMSLTVLGLRMLFAKTVAVNFLLTAKLFFLRAKRSGSGATNFSLLKQAGDVEENPGPTSMDWIWRILFLVGAATGAHSGPLFNQEVQIPLTESYCGPCPKNWICYKNNCYQFFDESKNWYESQASCMSQNASLLKVYSKEDQDLLKLVKSYHWMGLVHIPTNGSWQWEDGSILSPNLLTIIEMQKGDCALYASSFKGYIENCSTPNTYICMQRTVGGGGSGGGGSGGGGSDLFNQEVQIPLTESYCGPCPKNWICYKNNCYQFFDESKNWYESQASCMSQNASLLKVYSKEDQDLLKLVKSYHWMGLVHIPTNGSWQWEDGSILSPNLLTIIEMQKGDCALYASSFKGYIENCSTPNTYICMQRTVGSGGGGSGGGGSGGGGSFEQVQLQQPGAELVKPGASVKMSCKASGYAFSSYWINWMKQKPGQGLEWIGQIYPGDGTENRFSVNFQKAAKSFSLKISDSQLGDAAMYFCAYRSAVNARLMFGDGTQLVVKPNTRDKQLDADVSPKPTIFLPSIAETKLQKAGTYLCLLEKFFPDVIKIHWQEKKSNTILGSQEGNTMKTNDTYMKFSWLTVPEKSLDKEHRCIVRHENNKNGVDQEIIFPPIKTDVITMDPKDNCSKDANDTLLLQLTNTSAYYMYLLLLLKSVVYFAIITCCLLRRTAFCCNGEKS

SEQ ID NO: 14374 - protein, 1480 aa, Artificial Sequence
  Synthetic Polypeptide
MALPVTALLLPLALLLHAARPACQVQLVESGGGLVQAGDSVTLSCTASGRTFSSYALAWFRQRPGKEREFVAGLRWGGPTNYADSVKDRFTISGDSAKHTMYLQMNSLKPEDTAVYYCGYNPGGWAVPSQYEYDSWGQGTQVTVSSGTGGGGSGGGGSGGGGSEFEADIYQTPRYLVIGTGKKITLECSQTMGHDKMYWYQQDPGMELHLIHYSYGVNSTEKGDLSSESTVSRIRTEHFPLTLESARPSHTSQYLCASSEARGLAEFTDTQYFGPGTRLTVGQPKANPTVTLFPPSSEELQANKATLVCLISDFYPGAVTVAWKADGSPVKAGVETTKPSKQSNNKYAASSYLSLTPEQWKSHRSYSCQVTHEGSTVEKTVAPTECSGSQSFGLLDPKLCYLLDGILFIYGVILTALFLRVKFSRSADAPAYQQGQNQLYNELNLGRREEYDVLDKRRGRDPEMGGKPQRRKNPQEGLYNELQKDKMAEAYSEIGMKGERRRGKGHDGLYQGLSTATKDTYDALHMQALPPRRAKRSGSGATNFSLLKQAGDVEENPGPTSMDWIWRILFLVGAATGAHSGPLFNQEVQIPLTESYCGPCPKNWICYKNNCYQFFDESKNWYESQASCMSQNASLLKVYSKEDQDLLKLVKSYHWMGLVHIPTNGSWQWEDGSILSPNLLTIIEMQKGDCALYASSFKGYIENCSTPNTYICMQRTVGGGGSGGGGSGGGGSDLFNQEVQIPLTESYCGPCPKNWICYKNNCYQFFDESKNWYESQASCMSQNASLLKVYSKEDQDLLKLVKSYHWMGLVHIPTNGSWQWEDGSILSPNLLTIIEMQKGDCALYASSFKGYIENCSTPNTYICMQRTVGSGGGGSGGGGSGGGGSFEQVQLQQPGAELVKPGASVKMSCKASGYAFSSYWINWMKQKPGQGLEWIGQIYPGDGTENRFSVNFQKAAKSFSLKISDSQLGDAAMYFCAYRSAVNARLMFGDGTQLVVKPNASTKGPSVFPLAPSSKSTSGGTAALGCLVKDYFPEPVTVSWNSGALTSGVHTFPAVLQSSGLYSLSSVVTVPSSSLGTQTYICNVNHKPSNTKVDKRVEPKSCGTQSFGLLDPKLCYLLDGILFIYGVILTALFLRVKFSRSADAPAYQQGQNQLYNELNLGRREEYDVLDKRRGRDPEMGGKPQRRKNPQEGLYNELQKDKMAEAYSEIGMKGERRRGKGHDGLYQGLSTATKDTYDALHMQALPPRRAKRSGSGVKQTLNFDLLKLAGDVESNPGPSRGHMTEYKPTVRLATRDDVPRAVRTLAAAFADYPATRHTVDPDRHIERVTELQELFLTRVGLDIGKVWVADDGAAVAVWTTPESVEAGAVFAEIGPRMAELSGSRLAAQQQMEGLLAPHRPKEPAWFLATVGVSPDHQGKGLGSAVVLPGVEAAERAGVPAFLETSAPRNLPFYERLGFTVTADVEVPEGPRTWCMTRKPGA

SEQ ID NO: 14375 - protein, 1266 aa, Artificial Sequence
  Synthetic Polypeptide
MALPVTALLLPLALLLHAARPACQVQLVESGGGLVQAGDSVTLSCTASGRTFSSYALAWFRQRPGKEREFVAGLRWGGPTNYADSVKDRFTISGDSAKHTMYLQMNSLKPEDTAVYYCGYNPGGWAVPSQYEYDSWGQGTQVTVSSGTGGGGSGGGGSGGGGSEFEADIYQTPRYLVIGTGKKITLECSQTMGHDKMYWYQQDPGMELHLIHYSYGVNSTEKGDLSSESTVSRIRTEHFPLTLESARPSHTSQYLCASSEARGLAEFTDTQYFGPGTRLTVLEDLKNVFPPEVAVFEPSEAEISHTQKATLVCLATGFYPDHVELSWWVNGKEVHSGVSTDPQPLKEQPALNDSRYCLSSRLRVSATFWQNPRNHFRCQVQFYGLSENDEWTQDRAKPVTQIVSAEAWGRADCGSQSFGLLDPKLCYLLDGILFIYGVILTALFLRVKFSRSADAPAYQQGQNQLYNELNLGRREEYDVLDKRRGRDPEMGGKPQRRKNPQEGLYNELQKDKMAEAYSEIGMKGERRRGKGHDGLYQGLSTATKDTYDALHMQALPPRRAKRSGSGATNFSLLKQAGDVEENPGPTSMDWIWRILFLVGAATGAHSGPLFNQEVQIPLTESYCGPCPKNWICYKNNCYQFFDESKNWYESQASCMSQNASLLKVYSKEDQDLLKLVKSYHWMGLVHIPTNGSWQWEDGSILSPNLLTIIEMQKGDCALYASSFKGYIENCSTPNTYICMQRTVGGGGSGGGGSGGGGSDLFNQEVQIPLTESYCGPCPKNWICYKNNCYQFFDESKNWYESQASCMSQNASLLKVYSKEDQDLLKLVKSYHWMGLVHIPTNGSWQWEDGSILSPNLLTIIEMQKGDCALYASSFKGYIENCSTPNTYICMQRTVGSGGGGSGGGGSGGGGSFEQVQLQQPGAELVKPGASVKMSCKASGYAFSSYWINWMKQKPGQGLEWIGQIYPGDGTENRFSVNFQKAAKSFSLKISDSQLGDAAMYFCAYRSAVNARLMFGDGTQLVVKPNTRIQNPDPAVYQLRDSKSSDKSVCLFTDFDSQTNVSQSKDSDVYITDKTVLDMRSMDFKSNSAVAWSNKSDFACANAFNNSIIPEDTFFPSPESSCGTQSFGLLDPKLCYLLDGILFIYGVILTALFLRVKFSRSADAPAYQQGQNQLYNELNLGRREEYDVLDKRRGRDPEMGGKPQRRKNPQEGLYNELQKDKMAEAYSEIGMKGERRRGKGHDGLYQGLSTATKDTYDALHMQALPPR

SEQ ID NO: 14376 - protein, 1266 aa, Artificial Sequence
  Synthetic Polypeptide
MALPVTALLLPLALLLHAARPACQVQLVESGGGLVQAGDSVTLSCTASGRTFSSYALAWFRQRPGKEREFVAGLRWGGPTNYADSVKDRFTISGDSAKHTMYLQMNSLKPEDTAVYYCGYNPGGWAVPSQYEYDSWGQGTQVTVSSGTGGGGSGGGGSGGGGSEFEADIYQTPRYLVIGTGKKITLECSQTMGHDKMYWYQQDPGMELHLIHYSYGVNSTEKGDLSSESTVSRIRTEHFPLTLESARPSHTSQYLCASSEARGLAEFTDTQYFGPGTRLTVLEDLKNVFPPEVAVFEPSKAEIAHTQKATLVCLATGFYPDHVELSWWVNGKEVHSGVCTDPQPLKEQPALNDSRYCLSSRLRVSATFWQNPRNHFRCQVQFYGLSENDEWTQDRAKPVTQIVSAEAWGRADCGSQSFGLLDPKLCYLLDGILFIYGVILTALFLRVKFSRSADAPAYQQGQNQLYNELNLGRREEYDVLDKRRGRDPEMGGKPQRRKNPQEGLYNELQKDKMAEAYSEIGMKGERRRGKGHDGLYQGLSTATKDTYDALHMQALPPRRAKRSGSGATNFSLLKQAGDVEENPGPTSMDWIWRILFLVGAATGAHSGPLFNQEVQIPLTESYCGPCPKNWICYKNNCYQFFDESKNWYESQASCMSQNASLLKVYSKEDQDLLKLVKSYHWMGLVHIPTNGSWQWEDGSILSPNLLTIIEMQKGDCALYASSFKGYIENCSTPNTYICMQRTVGGGGSGGGGSGGGGSDLFNQEVQIPLTESYCGPCPKNWICYKNNCYQFFDESKNWYESQASCMSQNASLLKVYSKEDQDLLKLVKSYHWMGLVHIPTNGSWQWEDGSILSPNLLTIIEMQKGDCALYASSFKGYIENCSTPNTYICMQRTVGSGGGGSGGGGSGGGGSFEQVQLQQPGAELVKPGASVKMSCKASGYAFSSYWINWMKQKPGQGLEWIGQIYPGDGTENRFSVNFQKAAKSFSLKISDSQLGDAAMYFCAYRSAVNARLMFGDGTQLVVKPNTRIQNPDPAVYQLRDSKSSDKSVCLFTDFDSQTNVSQSKDSDVYITDKCVLDMRSMDFKSNSAVAWSNKSDFACANAFNNSIIPEDTFFPSSDVPCGTQSFGLLDPKLCYLLDGILFIYGVILTALFLRVKFSRSADAPAYQQGQNQLYNELNLGRREEYDVLDKRRGRDPEMGGKPQRRKNPQEGLYNELQKDKMAEAYSEIGMKGERRRGKGHDGLYQGLSTATKDTYDALHMQALPPR

SEQ ID NO: 14377 - protein, 1337 aa, Artificial Sequence
  Synthetic Polypeptide
MALPVTALLLPLALLLHAARPACQVQLVESGGGLVQAGDSVTLSCTASGRTFSSYALAWFRQRPGKEREFVAGLRWGGPTNYADSVKDRFTISGDSAKHTMYLQMNSLKPEDTAVYYCGYNPGGWAVPSQYEYDSWGQGTQVTVSSGTGGGGSGGGGSGGGGSEFEADIYQTPRYLVIGTGKKITLECSQTMGHDKMYWYQQDPGMELHLIHYSYGVNSTEKGDLSSESTVSRIRTEHFPLTLESARPSHTSQYLCASSEARGLAEFTDTQYFGPGTRLTVLEGKPIPNPLLGLDSTGSGEDLKNVFPPEVAVFEPSEAEISHTQKATLVCLATGFYPDHVELSWWVNGKEVHSGVSTDPQPLKEQPALNDSRYCLSSRLRVSATFWQNPRNHFRCQVQFYGLSENDEWTQDRAKPVTQIVSAEAWGRADCGSQSFGLLDPKLCYLLDGILFIYGVILTALFLRVKFSRSADAPAYQQGQNQLYNELNLGRREEYDVLDKRRGRDPEMGGKPQRRKNPQEGLYNELQKDKMAEAYSEIGMKGERRRGKGHDGLYQGLSTATKDTYDALHMQALPPRRAKRSGSGATNFSLLKQAGDVEENPGPTSMDWIWRILFLVGAATGAHSGPLFNQEVQIPLTESYCGPCPKNWICYKNNCYQFFDESKNWYESQASCMSQNASLLKVYSKEDQDLLKLVKSYHWMGLVHIPTNGSWQWEDGSILSPNLLTIIEMQKGDCALYASSFKGYIENCSTPNTYICMQRTVGGGGSGGGGSGGGGSDLFNQEVQIPLTESYCGPCPKNWICYKNNCYQFFDESKNWYESQASCMSQNASLLKVYSKEDQDLLKLVKSYHWMGLVHIPTNGSWQWEDGSILSPNLLTIIEMQKGDCALYASSFKGYIENCSTPNTYICMQRTVGSGGGGSGGGGSGGGGSFEQVQLQQPGAELVKPGASVKMSCKASGYAFSSYWINWMKQKPGQGLEWIGQIYPGDGTENRFSVNFQKAAKSFSLKISDSQLGDAAMYFCAYRSAVNARLMFGDGTQLVVKPNTREQKLISEEDGSGIQNPDPAVYQLRDSKSSDKSVCLFTDFDSQTNVSQSKDSDVYITDKTVLDMRSMDFKSNSAVAWSNKSDFACANAFNNSIIPEDTFFPSPESSCGTQSFGLLDPKLCYLLDGILFIYGVILTALFLRSKRSRLLHSDYMNMTPRRPGPTRKHYQPYAPPRDFAAYRSRVKFSRSADAPAYQQGQNQLYNELNLGRREEYDVLDKRRGRDPEMGGKPQRRKNPQEGLYNELQKDKMAEAYSEIGMKGERRRGKGHDGLYQGLSTATKDTYDALHMQALPPR

SEQ ID NO: 14378 - protein, 1378 aa, Artificial Sequence
  Synthetic Polypeptide
MALPVTALLLPLALLLHAARPACQVQLVESGGGLVQAGDSVTLSCTASGRTFSSYALAWFRQRPGKEREFVAGLRWGGPTNYADSVKDRFTISGDSAKHTMYLQMNSLKPEDTAVYYCGYNPGGWAVPSQYEYDSWGQGTQVTVSSGTGGGGSGGGGSGGGGSEFEADIYQTPRYLVIGTGKKITLECSQTMGHDKMYWYQQDPGMELHLIHYSYGVNSTEKGDLSSESTVSRIRTEHFPLTLESARPSHTSQYLCASSEARGLAEFTDTQYFGPGTRLTVLEGKPIPNPLLGLDSTGSGEDLKNVFPPEVAVFEPSEAEISHTQKATLVCLATGFYPDHVELSWWVNGKEVHSGVSTDPQPLKEQPALNDSRYCLSSRLRVSATFWQNPRNHFRCQVQFYGLSENDEWTQDRAKPVTQIVSAEAWGRADCGSQSFGLLDPKLCYLLDGILFIYGVILTALFLRSKRSRLLHSDYMNMTPRRPGPTRKHYQPYAPPRDFAAYRSRVKFSRSADAPAYQQGQNQLYNELNLGRREEYDVLDKRRGRDPEMGGKPQRRKNPQEGLYNELQKDKMAEAYSEIGMKGERRRGKGHDGLYQGLSTATKDTYDALHMQALPPRRAKRSGSGATNFSLLKQAGDVEENPGPTSMDWIWRILFLVGAATGAHSGPLFNQEVQIPLTESYCGPCPKNWICYKNNCYQFFDESKNWYESQASCMSQNASLLKVYSKEDQDLLKLVKSYHWMGLVHIPTNGSWQWEDGSILSPNLLTIIEMQKGDCALYASSFKGYIENCSTPNTYICMQRTVGGGGSGGGGSGGGGSDLFNQEVQIPLTESYCGPCPKNWICYKNNCYQFFDESKNWYESQASCMSQNASLLKVYSKEDQDLLKLVKSYHWMGLVHIPTNGSWQWEDGSILSPNLLTIIEMQKGDCALYASSFKGYIENCSTPNTYICMQRTVGSGGGGSGGGGSGGGGSFEQVQLQQPGAELVKPGASVKMSCKASGYAFSSYWINWMKQKPGQGLEWIGQIYPGDGTENRFSVNFQKAAKSFSLKISDSQLGDAAMYFCAYRSAVNARLMFGDGTQLVVKPNTREQKLISEEDGSGIQNPDPAVYQLRDSKSSDKSVCLFTDFDSQTNVSQSKDSDVYITDKTVLDMRSMDFKSNSAVAWSNKSDFACANAFNNSIIPEDTFFPSPESSCGTQSFGLLDPKLCYLLDGILFIYGVILTALFLRSKRSRLLHSDYMNMTPRRPGPTRKHYQPYAPPRDFAAYRSRVKFSRSADAPAYQQGQNQLYNELNLGRREEYDVLDKRRGRDPEMGGKPQRRKNPQEGLYNELQKDKMAEAYSEIGMKGERRRGKGHDGLYQGLSTATKDTYDALHMQALPPR

SEQ ID NO: 14379 - protein, 1339 aa, Artificial Sequence
  Synthetic Polypeptide
MALPVTALLLPLALLLHAARPACQVQLVESGGGLVQAGDSVTLSCTASGRTFSSYALAWFRQRPGKEREFVAGLRWGGPTNYADSVKDRFTISGDSAKHTMYLQMNSLKPEDTAVYYCGYNPGGWAVPSQYEYDSWGQGTQVTVSSGTGGGGSGGGGSGGGGSEFEADIYQTPRYLVIGTGKKITLECSQTMGHDKMYWYQQDPGMELHLIHYSYGVNSTEKGDLSSESTVSRIRTEHFPLTLESARPSHTSQYLCASSEARGLAEFTDTQYFGPGTRLTVLEGKPIPNPLLGLDSTGSGEDLKNVFPPEVAVFEPSEAEISHTQKATLVCLATGFYPDHVELSWWVNGKEVHSGVSTDPQPLKEQPALNDSRYCLSSRLRVSATFWQNPRNHFRCQVQFYGLSENDEWTQDRAKPVTQIVSAEAWGRADCGSQSFGLLDPKLCYLLDGILFIYGVILTALFLRVKFSRSADAPAYQQGQNQLYNELNLGRREEYDVLDKRRGRDPEMGGKPQRRKNPQEGLYNELQKDKMAEAYSEIGMKGERRRGKGHDGLYQGLSTATKDTYDALHMQALPPRRAKRSGSGATNFSLLKQAGDVEENPGPTSMDWIWRILFLVGAATGAHSGPLFNQEVQIPLTESYCGPCPKNWICYKNNCYQFFDESKNWYESQASCMSQNASLLKVYSKEDQDLLKLVKSYHWMGLVHIPTNGSWQWEDGSILSPNLLTIIEMQKGDCALYASSFKGYIENCSTPNTYICMQRTVGGGGSGGGGSGGGGSDLFNQEVQIPLTESYCGPCPKNWICYKNNCYQFFDESKNWYESQASCMSQNASLLKVYSKEDQDLLKLVKSYHWMGLVHIPTNGSWQWEDGSILSPNLLTIIEMQKGDCALYASSFKGYIENCSTPNTYICMQRTVGSGGGGSGGGGSGGGGSFEQVQLQQPGAELVKPGASVKMSCKASGYAFSSYWINWMKQKPGQGLEWIGQIYPGDGTENRFSVNFQKAAKSFSLKISDSQLGDAAMYFCAYRSAVNARLMFGDGTQLVVKPNTREQKLISEEDLGSGIQNPDPAVYQLRDSKSSDKSVCLFTDFDSQTNVSQSKDSDVYITDKTVLDMRSMDFKSNSAVAWSNKSDFACANAFNNSIIPEDTFFPSPESSCGTQSFGLLDPKLCYLLDGILFIYGVILTALFLKRGRKKLLYIFKQPFMRPVQTTQEEDGCSCRFPEEEEGGCELRVKFSRSADAPAYQQGQNQLYNELNLGRREEYDVLDKRRGRDPEMGGKPQRRKNPQEGLYNELQKDKMAEAYSEIGMKGERRRGKGHDGLYQGLSTATKDTYDALHMQALPPR

SEQ ID NO: 14380 - protein, 1381 aa, Artificial Sequence
  Synthetic Polypeptide
MALPVTALLLPLALLLHAARPACQVQLVESGGGLVQAGDSVTLSCTASGRTFSSYALAWFRQRPGKEREFVAGLRWGGPTNYADSVKDRFTISGDSAKHTMYLQMNSLKPEDTAVYYCGYNPGGWAVPSQYEYDSWGQGTQVTVSSGTGGGGSGGGGSGGGGSEFEADIYQTPRYLVIGTGKKITLECSQTMGHDKMYWYQQDPGMELHLIHYSYGVNSTEKGDLSSESTVSRIRTEHFPLTLESARPSHTSQYLCASSEARGLAEFTDTQYFGPGTRLTVLEGKPIPNPLLGLDSTGSGEDLKNVFPPEVAVFEPSEAEISHTQKATLVCLATGFYPDHVELSWWVNGKEVHSGVSTDPQPLKEQPALNDSRYCLSSRLRVSATFWQNPRNHFRCQVQFYGLSENDEWTQDRAKPVTQIVSAEAWGRADCGSQSFGLLDPKLCYLLDGILFIYGVILTALFLKRGRKKLLYIFKQPFMRPVQTTQEEDGCSCRFPEEEEGGCELRVKFSRSADAPAYQQGQNQLYNELNLGRREEYDVLDKRRGRDPEMGGKPQRRKNPQEGLYNELQKDKMAEAYSEIGMKGERRRGKGHDGLYQGLSTATKDTYDALHMQALPPRRAKRSGSGATNFSLLKQAGDVEENPGPTSMDWIWRILFLVGAATGAHSGPLFNQEVQIPLTESYCGPCPKNWICYKNNCYQFFDESKNWYESQASCMSQNASLLKVYSKEDQDLLKLVKSYHWMGLVHIPTNGSWQWEDGSILSPNLLTIIEMQKGDCALYASSFKGYIENCSTPNTYICMQRTVGGGGSGGGGSGGGGSDLFNQEVQIPLTESYCGPCPKNWICYKNNCYQFFDESKNWYESQASCMSQNASLLKVYSKEDQDLLKLVKSYHWMGLVHIPTNGSWQWEDGSILSPNLLTIIEMQKGDCALYASSFKGYIENCSTPNTYICMQRTVGSGGGGSGGGGSGGGGSFEQVQLQQPGAELVKPGASVKMSCKASGYAFSSYWINWMKQKPGQGLEWIGQIYPGDGTENRFSVNFQKAAKSFSLKISDSQLGDAAMYFCAYRSAVNARLMFGDGTQLVVKPNTREQKLISEEDLGSGIQNPDPAVYQLRDSKSSDKSVCLFTDFDSQTNVSQSKDSDVYITDKTVLDMRSMDFKSNSAVAWSNKSDFACANAFNNSIIPEDTFFPSPESSCGTQSFGLLDPKLCYLLDGILFIYGVILTALFLKRGRKKLLYIFKQPFMRPVQTTQEEDGCSCRFPEEEEGGCELRVKFSRSADAPAYQQGQNQLYNELNLGRREEYDVLDKRRGRDPEMGGKPQRRKNPQEGLYNELQKDKMAEAYSEIGMKGERRRGKGHDGLYQGLSTATKDTYDALHMQALPPR

SEQ ID NO: 14381 - protein, 1271 aa, Artificial Sequence
  Synthetic Polypeptide
MALPVTALLLPLALLLHAARPACQVQLVESGGGLVQAGDSVTLSCTASGRTFSSYALAWFRQRPGKEREFVAGLRWGGPTNYADSVKDRFTISGDSAKHTMYLQMNSLKPEDTAVYYCGYNPGGWAVPSQYEYDSWGQGTQVTVSSGTGGGGSGGGGSGGGGSEFEADIYQTPRYLVIGTGKKITLECSQTMGHDKMYWYQQDPGMELHLIHYSYGVNSTEKGDLSSESTVSRIRTEHFPLTLESARPSHTSQYLCASSEARGLAEFTDTQYFGPGTRLTVLEQSFGLLDPKLCYLLDGILFIYGVILTALFLRVKFSRSADAPAYQQGQNQLYNELNLGRREEYDVLDKRRGRDPEMGGKPQRRKNPQEGLYNELQKDKMAEAYSEIGMKGERRRGKGHDGLYQGLSTATKDTYDALHMQALPPRRAKRSGSGATNFSLLKQAGDVEENPGPTSMDWIWRILFLVGAATGAHSGPLFNQEVQIPLTESYCGPCPKNWICYKNNCYQFFDESKNWYESQASCMSQNASLLKVYSKEDQDLLKLVKSYHWMGLVHIPTNGSWQWEDGSILSPNLLTIIEMQKGDCALYASSFKGYIENCSTPNTYICMQRTVGGGGSGGGGSGGGGSDLFNQEVQIPLTESYCGPCPKNWICYKNNCYQFFDESKNWYESQASCMSQNASLLKVYSKEDQDLLKLVKSYHWMGLVHIPTNGSWQWEDGSILSPNLLTIIEMQKGDCALYASSFKGYIENCSTPNTYICMQRTVGSGGGGSGGGGSGGGGSFEQVQLQQPGAELVKPGASVKMSCKASGYAFSSYWINWMKQKPGQGLEWIGQIYPGDGTENRFSVNFQKAAKSFSLKISDSQLGDAAMYFCAYRSAVNARLMFGDGTQLVVKPNTRQSFGLLDPKLCYLLDGILFIYGVILTALFLRVKFSRSADAPAYQQGQNQLYNELNLGRREEYDVLDKRRGRDPEMGGKPQRRKNPQEGLYNELQKDKMAEAYSEIGMKGERRRGKGHDGLYQGLSTATKDTYDALHMQALPPRRAKRSGSGVKQTLNFDLLKLAGDVESNPGPSRGHMTEYKPTVRLATRDDVPRAVRTLAAAFADYPATRHTVDPDRHIERVTELQELFLTRVGLDIGKVWVADDGAAVAVWTTPESVEAGAVFAEIGPRMAELSGSRLAAQQQMEGLLAPHRPKEPAWFLATVGVSPDHQGKGLGSAVVLPGVEAAERAGVPAFLETSAPRNLPFYERLGFTVTADVEVPEGPRTWCMTRKPGA

SEQ ID NO: 14382 - protein, 1096 aa, Artificial Sequence
  Synthetic Polypeptide
MALPVTALLLPLALLLHAARPACQVQLVESGGGLVQAGDSVTLSCTASGRTFSSYALAWFRQRPGKEREFVAGLRWGGPTNYADSVKDRFTISGDSAKHTMYLQMNSLKPEDTAVYYCGYNPGGWAVPSQYEYDSWGQGTQVTVSSGTGGGGSGGGGSGGGGSEFEADIYQTPRYLVIGTGKKITLECSQTMGHDKMYWYQQDPGMELHLIHYSYGVNSTEKGDLSSESTVSRIRTEHFPLTLESARPSHTSQYLCASSEARGLAEFTDTQYFGPGTRLTVLEGQPKANPTVTLFPPSSEELQANKATLVCLISDFYPGAVTVAWKADGSPVKAGVETTKPSKQSNNKYAASSYLSLTPEQWKSHRSYSCQVTHEGSTVEKTVAPTECSPIKTDVITMDPKDNCSKDANDTLLLQLTNTSAYYMYLLLLLKSVVYFAIITCCLLRRTAFCCNGEKSRAKRSGSGATNFSLLKQAGDVEENPGPTSMDWIWRILFLVGAATGAHSGPLFNQEVQIPLTESYCGPCPKNWICYKNNCYQFFDESKNWYESQASCMSQNASLLKVYSKEDQDLLKLVKSYHWMGLVHIPTNGSWQWEDGSILSPNLLTIIEMQKGDCALYASSFKGYIENCSTPNTYICMQRTVGGGGSGGGGSGGGGSDLFNQEVQIPLTESYCGPCPKNWICYKNNCYQFFDESKNWYESQASCMSQNASLLKVYSKEDQDLLKLVKSYHWMGLVHIPTNGSWQWEDGSILSPNLLTIIEMQKGDCALYASSFKGYIENCSTPNTYICMQRTVGSGGGGSGGGGSGGGGSFEQVQLQQPGAELVKPGASVKMSCKASGYAFSSYWINWMKQKPGQGLEWIGQIYPGDGTENRFSVNFQKAAKSFSLKISDSQLGDAAMYFCAYRSAVNARLMFGDGTQLVVKPNTRASTKGPSVFPLAPSSKSTSGGTAALGCLVKDYFPEPVTVSWNSGALTSGVHTFPAVLQSSGLYSLSSVVTVPSSSLGTQTYICNVNHKPSNTKVDKRVEPKSCEVKTDSTDHVKPKETENTKQPSKSCHKPKAIVHTEKVNMMSLTVLGLRMLFAKTVAVNFLLTAKLFFL

SEQ ID NO: 14383 - protein, 1074 aa, Artificial Sequence
  Synthetic Polypeptide
MALPVTALLLPLALLLHAARPACQVQLVESGGGLVQAGDSVTLSCTASGRTFSSYALAWFRQRPGKEREFVAGLRWGGPTNYADSVKDRFTISGDSAKHTMYLQMNSLKPEDTAVYYCGYNPGGWAVPSQYEYDSWGQGTQVTVSSGTGGGGSGGGGSGGGGSEFEADIYQTPRYLVIGTGKKITLECSQTMGHDKMYWYQQDPGMELHLIHYSYGVNSTEKGDLSSESTVSRIRTEHFPLTLESARPSHTSQYLCASSEARGLAEFTDTQYFGPGTRLTVLEGQPKANPTVTLFPPSSEELQANKATLVCLISDFYPGAVTVAWKADGSPVKAGVETTKPSKQSNNKYAASSYLSLTPEQWKSHRSYSCQVTHEGSTVEKTVAPTECSGRADCGITSASYHQGVLSATILYEILLGKATLYAVLVSALVLMAMVKRKDSRGRAKRSGSGATNFSLLKQAGDVEENPGPTSMDWIWRILFLVGAATGAHSGPLFNQEVQIPLTESYCGPCPKNWICYKNNCYQFFDESKNWYESQASCMSQNASLLKVYSKEDQDLLKLVKSYHWMGLVHIPTNGSWQWEDGSILSPNLLTIIEMQKGDCALYASSFKGYIENCSTPNTYICMQRTVGGGGSGGGGSGGGGSDLFNQEVQIPLTESYCGPCPKNWICYKNNCYQFFDESKNWYESQASCMSQNASLLKVYSKEDQDLLKLVKSYHWMGLVHIPTNGSWQWEDGSILSPNLLTIIEMQKGDCALYASSFKGYIENCSTPNTYICMQRTVGSGGGGSGGGGSGGGGSFEQVQLQQPGAELVKPGASVKMSCKASGYAFSSYWINWMKQKPGQGLEWIGQIYPGDGTENRFSVNFQKAAKSFSLKISDSQLGDAAMYFCAYRSAVNARLMFGDGTQLVVKPNTRASTKGPSVFPLAPSSKSTSGGTAALGCLVKDYFPEPVTVSWNSGALTSGVHTFPAVLQSSGLYSLSSVVTVPSSSLGTQTYICNVNHKPSNTKVDKRVEPKSCIPEDTFFPSSDVPCDVKLVEKSFETDTNLNFQNLSVIGFRILLLKVAGFNLLMTLRLWSS

SEQ ID NO: 14384 - protein, 1074 aa, Artificial Sequence
  Synthetic Polypeptide
MALPVTALLLPLALLLHAARPACQVQLVESGGGLVQAGDSVTLSCTASGRTFSSYALAWFRQRPGKEREFVAGLRWGGPTNYADSVKDRFTISGDSAKHTMYLQMNSLKPEDTAVYYCGYNPGGWAVPSQYEYDSWGQGTQVTVSSGTGGGGSGGGGSGGGGSEFEADIYQTPRYLVIGTGKKITLECSQTMGHDKMYWYQQDPGMELHLIHYSYGVNSTEKGDLSSESTVSRIRTEHFPLTLESARPSHTSQYLCASSEARGLAEFTDTQYFGPGTRLTVLEGQPKANPTVTLFPPSSEELQANKATLVCLISDFYPGAVTVAWKADGSPVKAGVETTKPSKQSNNKYAASSYLSLTPEQWKSHRSYSCQVTHEGSTVEKTVAPTECSGRADCGFTSESYQQGVLSATILYEILLGKATLYAVLVSALVLMAMVKRKDSRGRAKRSGSGATNFSLLKQAGDVEENPGPTSMDWIWRILFLVGAATGAHSGPLFNQEVQIPLTESYCGPCPKNWICYKNNCYQFFDESKNWYESQASCMSQNASLLKVYSKEDQDLLKLVKSYHWMGLVHIPTNGSWQWEDGSILSPNLLTIIEMQKGDCALYASSFKGYIENCSTPNTYICMQRTVGGGGSGGGGSGGGGSDLFNQEVQIPLTESYCGPCPKNWICYKNNCYQFFDESKNWYESQASCMSQNASLLKVYSKEDQDLLKLVKSYHWMGLVHIPTNGSWQWEDGSILSPNLLTIIEMQKGDCALYASSFKGYIENCSTPNTYICMQRTVGSGGGGSGGGGSGGGGSFEQVQLQQPGAELVKPGASVKMSCKASGYAFSSYWINWMKQKPGQGLEWIGQIYPGDGTENRFSVNFQKAAKSFSLKISDSQLGDAAMYFCAYRSAVNARLMFGDGTQLVVKPNTRASTKGPSVFPLAPSSKSTSGGTAALGCLVKDYFPEPVTVSWNSGALTSGVHTFPAVLQSSGLYSLSSVVTVPSSSLGTQTYICNVNHKPSNTKVDKRVEPKSCIPEDTFFPSPESSCDVKLVEKSFETDTNLNFQNLSVIGFRILLLKVAGFNLLMTLRLWSS

SEQ ID NO: 14385 - protein, 572 aa, Artificial Sequence
  Synthetic Polypeptide
MDWIWRILFLVGAATGAHSGPMDPDLEIRAAFLRQRNTALRTEVAELEQEVQRLENEVSQYETRYGPLGGGKGSGGGGSGGGGSGGGGSFEQVQLQQPGAELVKPGASVKMSCKASGYAFSSYWINWMKQKPGQGLEWIGQIYPGDGTENRFSVNFQKAAKSFSLKISDSQLGDAAMYFCAYRSAVNARLMFGDGTQLVVKPNGGGGSGGGGSGGGGSEADIYQTPRYLVIGTGKKITLECSQTMGHDKMYWYQQDPGMELHLIHYSYGVNSTEKGDLSSESTVSRIRTEHFPLTLESARPSHTSQYLCASSEARGLAEFTDTQYFGPGTRLTVTREQKLISEEDLAKPTTTPAPRPPTPAPTIASQPLSLRPEACRPAAGGAVHTRGLDFACDIYIWAPLAGTCGVLLLSLVITLYCKRGRKKLLYIFKQPFMRPVQTTQEEDGCSCRFPEEEEGGCELRVKFSRSADAPAYQQGQNQLYNELNLGRREEYDVLDKRRGRDPEMGGKPRRKNPQEGLYNELQKDKMAEAYSEIGMKGERRRGKGHDGLYQGLSTATKDTYDALHMQALPPR

SEQ ID NO: 14386 - protein, 925 aa, Artificial Sequence
  Synthetic Polypeptide
MALPVTALLLPLALLLHAARPEADIYQTPRYLVIGTGKKITLECSQTMGHDKMYWYQQDPGMELHLIHYSYGVNSTEKGDLSSESTVSRIRTEHFPLTLESARPSHTSQYLCASSEARGLAEFTDTQYFGPGTRLTVLEIQNPDPAVYQLRDSKSSDKSVCLFTDFDSQTNVSQSKDSDVYITDKCVLDMRSMDFKSNSAVAWSNKSDFACANAFNNSIIPEDTFFPSSDVPCDVKLVEKSFETDTNLNFQNLSVIGFRILLLKVAGFNLLMTLRLWSSRAKRSGSGVKQTLNFDLLKLAGDVESNPGPTSMDWIWRILFLVGAATGAHSGPMDPDLEIRAAFLRQRNTALRTEVAELEQEVQRLENEVSQYETRYGPLGGGKGSGGGGSGGGGSGGGGSFEQVQLQQPGAELVKPGASVKMSCKASGYAFSSYWINWMKQKPGQGLEWIGQIYPGDGTENRFSVNFQKAAKSFSLKISDSQLGDAAMYFCAYRSAVNARLMFGDGTQLVVKPNTREDLKNVFPPEVAVFEPSKAEIAHTQKATLVCLATGFYPDHVELSWWVNGKEVHSGVCTDPQPLKEQPALNDSRYCLSSRLRVSATFWQNPRNHFRCQVQFYGLSENDEWTQDRAKPVTQIVSAEAWGRADCGITSASYHQGVLSATILYEILLGKATLYAVLVSALVLMAMVKRKDSRGRAKRSGSGATNFSLLKQAGDVEENPGPSRGHMTEYKPTVRLATRDDVPRAVRTLAAAFADYPATRHTVDPDRHIERVTELQELFLTRVGLDIGKVWVADDGAAVAVWTTPESVEAGAVFAEIGPRMAELSGSRLAAQQQMEGLLAPHRPKEPAWFLATVGVSPDHQGKGLGSAVVLPGVEAAERAGVPAFLETSAPRNLPFYERLGFTVTADVEVPEGPRTWCMTRKPGA

SEQ ID NO: 14387 - protein, 924 aa, Artificial Sequence
  Synthetic Polypeptide
MALPVTALLLPLALLLHAARPEADIYQTPRYLVIGTGKKITLECSQTMGHDKMYWYQQDPGMELHLIHYSYGVNSTEKGDLSSESTVSRIRTEHFPLTLESARPSHTSQYLCASSEARGLAEFTDTQYFGPGTRLTVLEDLKNVFPPEVAVFEPSKAEIAHTQKATLVCLATGFYPDHVELSWWVNGKEVHSGVCTDPQPLKEQPALNDSRYCLSSRLRVSATFWQNPRNHFRCQVQFYGLSENDEWTQDRAKPVTQIVSAEAWGRADCGITSASYHQGVLSATILYEILLGKATLYAVLVSALVLMAMVKRKDSRGRAKRSGSGATNFSLLKQAGDVEENPGPTSMDWIWRILFLVGAATGAHSGPMDPDLEIRAAFLRQRNTALRTEVAELEQEVQRLENEVSQYETRYGPLGGGKGSGGGGSGGGGSGGGGSFEQVQLQQPGAELVKPGASVKMSCKASGYAFSSYWINWMKQKPGQGLEWIGQIYPGDGTENRFSVNFQKAAKSFSLKISDSQLGDAAMYFCAYRSAVNARLMFGDGTQLVVKPNTRIQNPDPAVYQLRDSKSSDKSVCLFTDFDSQTNVSQSKDSDVYITDKCVLDMRSMDFKSNSAVAWSNKSDFACANAFNNSIIPEDTFFPSSDVPCDVKLVEKSFETDTNLNFQNLSVIGFRILLLKVAGFNLLMTLRLWSSRAKRSGSGVKQTLNFDLLKLAGDVESNPGPSRGHMTEYKPTVRLATRDDVPRAVRTLAAAFADYPATRHTVDPDRHIERVTELQELFLTRVGLDIGKVWVADDGAAVAVWTTPESVEAGAVFAEIGPRMAELSGSRLAAQQQMEGLLAPHRPKEPAWFLATVGVSPDHQGKGLGSAVVLPGVEAAERAGVPAFLETSAPRNLPFYERLGFTVTADVEVPEGPRTWCMTRKPGA

SEQ ID NO: 14388 - protein, 924 aa, Artificial Sequence
  Synthetic Polypeptide
MALPVTALLLPLALLLHAARPEADIYQTPRYLVIGTGKKITLECSQTMGHDKMYWYQQDPGMELHLIHYSYGVNSTEKGDLSSESTVSRIRTEHFPLTLESARPSHTSQYLCASSEARGLAEFTDTQYFGPGTRLTVLEDLKNVFPPEVAVFEPSEAEISHTQKATLVCLATGFYPDHVELSWWVNGKEVHSGVCTDPQPLKEQPALNDSRYCLSSRLRVSATFWQNPRNHFRCQVQFYGLSENDEWTQDRAKPVTQIVSAEAWGRADCGFTSESYQQGVLSATILYEILLGKATLYAVLVSALVLMAMVKRKDSRGRAKRSGSGATNFSLLKQAGDVEENPGPTSMDWIWRILFLVGAATGAHSGPMDPDLEIRAAFLRQRNTALRTEVAELEQEVQRLENEVSQYETRYGPLGGGKGSGGGGSGGGGSGGGGSFEQVQLQQPGAELVKPGASVKMSCKASGYAFSSYWINWMKQKPGQGLEWIGQIYPGDGTENRFSVNFQKAAKSFSLKISDSQLGDAAMYFCAYRSAVNARLMFGDGTQLVVKPNTRIQNPDPAVYQLRDSKSSDKSVCLFTDFDSQTNVSQSKDSDVYITDKCVLDMRSMDFKSNSAVAWSNKSDFACANAFNNSIIPEDTFFPSPESSCDVKLVEKSFETDTNLNFQNLSVIGFRILLLKVAGFNLLMTLRLWSSRAKRSGSGVKQTLNFDLLKLAGDVESNPGPSRGHMTEYKPTVRLATRDDVPRAVRTLAAAFADYPATRHTVDPDRHIERVTELQELFLTRVGLDIGKVWVADDGAAVAVWTTPESVEAGAVFAEIGPRMAELSGSRLAAQQQMEGLLAPHRPKEPAWFLATVGVSPDHQGKGLGSAVVLPGVEAAERAGVPAFLETSAPRNLPFYERLGFTVTADVEVPEGPRTWCMTRKPGA

SEQ ID NO: 14389 - protein, 691 aa, Artificial Sequence
  Synthetic Polypeptide
MALPVTALLLPLALLLHAARPEADIYQTPRYLVIGTGKKITLECSQTMGHDKMYWYQQDPGMELHLIHYSYGVNSTEKGDLSSESTVSRIRTEHFPLTLESARPSHTSQYLCASSEARGLAEFTDTQYFGPGTRLTVLEDLKNVFPPEVAVFEPSEAEISHTQKATLVCLATGFYPDHVELSWWVNGKEVHSGVCTDPQPLKEQPALNDSRYCLSSRLRVSATFWQNPRNHFRCQVQFYGLSENDEWTQDRAKPVTQIVSAEAWGRADCGFTSESYQQGVLSATILYEILLGKATLYAVLVSALVLMAMVKRKDSRGRAKRSGSGATNFSLLKQAGDVEENPGPTSMDWIWRILFLVGAATGAHSGPMDPDLEIRAAFLRQRNTALRTEVAELEQEVQRLENEVSQYETRYGPLGGGKGSGGGGSGGGGSGGGGSFEQVQLQQPGAELVKPGASVKMSCKASGYAFSSYWINWMKQKPGQGLEWIGQIYPGDGTENRFSVNFQKAAKSFSLKISDSQLGDAAMYFCAYRSAVNARLMFGDGTQLVVKPNTRIQNPDPAVYQLRDSKSSDKSVCLFTDFDSQTNVSQSKDSDVYITDKCVLDMRSMDFKSNSAVAWSNKSDFACANAFNNSIIPEDTFFPSPESSCDVKLVEKSFETDTNLNFQNLSVIGFRILLLKVAGFNLLMTLRLWSS

SEQ ID NO: 14390 - protein, 916 aa, Artificial Sequence
  Synthetic Polypeptide
MALPVTALLLPLALLLHAARPEADIYQTPRYLVIGTGKKITLECSQTMGHDKMYWYQQDPGMELHLIHYSYGVNSTEKGDLSSESTVSRIRTEHFPLTLESARPSHTSQYLCASSEARGLAEFTDTQYFGPGTRLTVLEDLKNVFPPEVAVFEPSEAEISHTQKATLVCLATGFYPDHVELSWWVNGKEVHSGVCTDPQPLKEQPALNDSRYCLSSRLRVSATFWQNPRNHFRCQVQFYGLSENDEWTQDRAKPVTQIVSAEAWGRADCGFTSESYQQGVLSATILYEILLGKATLYAVLVSALVLMAMVKRKDSRGRAKRSGSGATNFSLLKQAGDVEENPGPTSMDWIWRILFLVGAATGAHSGPMDPDLEIRAAFLRQRNTALRTEVAELEQEVQRLENEVSQYETRYGPLGGGKGSGGGGSGGGGSGGGGSFEQVQLQQPGAELVKPGASVKMSCKASGYAFSSYWINWMKQKPGQGLEWIGQIYPGDGTENRFSVNFQKAAKSFSLKISDSQLGDAAMYFCAYRSAVNARLMFGDGTQLVVKPNTRIQNPDPAVYQLRDSKSSDKSVCLFTDFDSQTNVSQSKDSDVYITDKCVLDMRSMDFKSNSAVAWSNKSDFACANAFNNSIIPEDTFFPSPESSCDVKLVEKSFETDTNLNFQNLSVIGFRILLLKVAGFNLLMTLRLWSSRAKRSGSGVKQTLNFDLLKLAGDVESNPGPSRGGIHTMATYEVLCEVARKLGTDDREVVLFLLNVFIPQPTLAQLIGALRALKEEGRLTFPLLAECLFRAGRRDLLRDLLHLDPRFLERHLAGTMSYFSPYQLTVLHVDGELCARDIRSLIFLSKDTIGSRSTPQTFLHWVYCMENLDLLGPTDVDALMSMLRSLSRVDLQRQVQTLMGLHLSGPSHSQHYRHTP

SEQ ID NO: 14391 - protein, 695 aa, Artificial Sequence
  Synthetic Polypeptide
MALPVTALLLPLALLLHAARPEADIYQTPRYLVIGTGKKITLECSQTMGHDKMYWYQQDPGMELHLIHYSYGVNSTEKGDLSSESTVSRIRTEHFPLTLESARPSHTSQYLCASSEARGLAEFTDTQYFGPGTRLTVLEIQNPDPAVYQLRDSKSSDKSVCLFTDFDSQTNVSQSKDSDVYITDKCVLDMRSMDFKSNSAVAWSNKSDFACANAFNNSIIPEDTFFPSPESSCDVKLVEKSFETDTNLNFQNLSVIGFRILLLKVAGFNLLMTLRLWSSRAKRSGSGVKQTLNFDLLKLAGDVESNPGPTSMDWIWRILFLVGAATGAHSGPMDPDLEIRAAFLRQRNTALRTEVAELEQEVQRLENEVSQYETRYGPLGGGKGSGGGGSGGGGSGGGGSFEQVQLQQPGAELVKPGASVKMSCKASGYAFSSYWINWMKQKPGQGLEWIGQIYPGDGTENRFSVNFQKAAKSFSLKISDSQLGDAAMYFCAYRSAVNARLMFGDGTQLVVKPNTREDLKNVFPPEVAVFEPSEAEISHTQKATLVCLATGFYPDHVELSWWVNGKEVHSGVCTDPQPLKEQPALNDSRYCLSSRLRVSATFWQNPRNHFRCQVQFYGLSENDEWTQDRAKPVTQIVSAEAWGRADCGFTSESYQQGVLSATILYEILLGKATLYAVLVSALVLMAMVKRKDSRG

SEQ ID NO: 14392 - protein, 917 aa, Artificial Sequence
  Synthetic Polypeptide
MALPVTALLLPLALLLHAARPEADIYQTPRYLVIGTGKKITLECSQTMGHDKMYWYQQDPGMELHLIHYSYGVNSTEKGDLSSESTVSRIRTEHFPLTLESARPSHTSQYLCASSEARGLAEFTDTQYFGPGTRLTVLEIQNPDPAVYQLRDSKSSDKSVCLFTDFDSQTNVSQSKDSDVYITDKCVLDMRSMDFKSNSAVAWSNKSDFACANAFNNSIIPEDTFFPSPESSCDVKLVEKSFETDTNLNFQNLSVIGFRILLLKVAGFNLLMTLRLWSSRAKRSGSGVKQTLNFDLLKLAGDVESNPGPTSMDWIWRILFLVGAATGAHSGPMDPDLEIRAAFLRQRNTALRTEVAELEQEVQRLENEVSQYETRYGPLGGGKGSGGGGSGGGGSGGGGSFEQVQLQQPGAELVKPGASVKMSCKASGYAFSSYWINWMKQKPGQGLEWIGQIYPGDGTENRFSVNFQKAAKSFSLKISDSQLGDAAMYFCAYRSAVNARLMFGDGTQLVVKPNTREDLKNVFPPEVAVFEPSEAEISHTQKATLVCLATGFYPDHVELSWWVNGKEVHSGVCTDPQPLKEQPALNDSRYCLSSRLRVSATFWQNPRNHFRCQVQFYGLSENDEWTQDRAKPVTQIVSAEAWGRADCGFTSESYQQGVLSATILYEILLGKATLYAVLVSALVLMAMVKRKDSRGRAKRSGSGATNFSLLKQAGDVEENPGPSRGGIHTMATYEVLCEVARKLGTDDREVVLFLLNVFIPQPTLAQLIGALRALKEEGRLTFPLLAECLFRAGRRDLLRDLLHLDPRFLERHLAGTMSYFSPYQLTVLHVDGELCARDIRSLIFLSKDTIGSRSTPQTFLHWVYCMENLDLLGPTDVDALMSMLRSLSRVDLQRQVQTLMGLHLSGPSHSQHYRHTP

SEQ ID NO: 14393 - protein, 924 aa, Artificial Sequence
  Synthetic Polypeptide
MALPVTALLLPLALLLHAARPEADIYQTPRYLVIGTGKKITLECSQTMGHDKMYWYQQDPGMELHLIHYSYGVNSTEKGDLSSESTVSRIRTEHFPLTLESARPSHTSQYLCASSEARGLAEFTDTQYFGPGTRLTVLEDLKNVFPPEVAVFEPSEAEISHTQKATLVCLATGFYPDHVELSWWVNGKEVHSGVSTDPQPLKEQPALNDSRYCLSSRLRVSATFWQNPRNHFRCQVQFYGLSENDEWTQDRAKPVTQIVSAEAWGRADCGFTSESYQQGVLSATILYEILLGKATLYAVLVSALVLMAMVKRKDSRGRAKRSGSGATNFSLLKQAGDVEENPGPTSMDWIWRILFLVGAATGAHSGPMDPDLEIRAAFLRQRNTALRTEVAELEQEVQRLENEVSQYETRYGPLGGGKGSGGGGSGGGGSGGGGSFEQVQLQQPGAELVKPGASVKMSCKASGYAFSSYWINWMKQKPGQGLEWIGQIYPGDGTENRFSVNFQKAAKSFSLKISDSQLGDAAMYFCAYRSAVNARLMFGDGTQLVVKPNTRIQNPDPAVYQLRDSKSSDKSVCLFTDFDSQTNVSQSKDSDVYITDKTVLDMRSMDFKSNSAVAWSNKSDFACANAFNNSIIPEDTFFPSPESSCDVKLVEKSFETDTNLNFQNLSVIGFRILLLKVAGFNLLMTLRLWSSRAKRSGSGVKQTLNFDLLKLAGDVESNPGPSRGHMTEYKPTVRLATRDDVPRAVRTLAAAFADYPATRHTVDPDRHIERVTELQELFLTRVGLDIGKVWVADDGAAVAVWTTPESVEAGAVFAEIGPRMAELSGSRLAAQQQMEGLLAPHRPKEPAWFLATVGVSPDHQGKGLGSAVVLPGVEAAERAGVPAFLETSAPRNLPFYERLGFTVTADVEVPEGPRTWCMTRKPGA

SEQ ID NO: 14394 - protein, 1006 aa, Artificial Sequence
  Synthetic Polypeptide
MALPVTALLLPLALLLHAARPEADIYQTPRYLVIGTGKKITLECSQTMGHDKMYWYQQDPGMELHLIHYSYGVNSTEKGDLSSESTVSRIRTEHFPLTLESARPSHTSQYLCASSEARGLAEFTDTQYFGPGTRLTVLEDLKNVFPPEVAVFEPSEAEISHTQKATLVCLATGFYPDHVELSWWVNGKEVHSGVSTDPQPLKEQPALNDSRYCLSSRLRVSATFWQNPRNHFRCQVQFYGLSENDEWTQDRAKPVTQIVSAEAWGRADCGFTSESYQQGVLSATILYEILLGKATLYAVLVSALVLMAMVKRKDSRGRAKRSGSGATNFSLLKQAGDVEENPGPTSMDWIWRILFLVGAATGAHSGPMDPDLEIRAAFLRQRNTALRTEVAELEQEVQRLENEVSQYETRYGPLGGGKGSGGGGSGGGGSGGGGSFEQVQLQQPGAELVKPGASVKMSCKASGYAFSSYWINWMKQKPGQGLEWIGQIYPGDGTENRFSVNFQKAAKSFSLKISDSQLGDAAMYFCAYRSAVNARLMFGDGTQLVVKPNTREQKLISEEDGSGTPFPSLAPPIMLLVDGKQQMVVVCLVLDVAPPGLDSPIWFSAGNGSALDAFTYGPSPATDGTWTNLAHLSLPSEELASWEPLVCHTGPGAEGHSRSTQPMHLSGEASTARTCPQEPLRGTPGGALWLGVLRLLLFKLLLFDLLLTCSCLCDPAGPLPSPATTTRLRALGSHRLHPATETGGREATSSPRPQPRDRRWGDTPPGRKPGSPVRAKRSGSGVKQTLNFDLLKLAGDVESNPGPSRGHMTEYKPTVRLATRDDVPRAVRTLAAAFADYPATRHTVDPDRHIERVTELQELFLTRVGLDIGKVWVADDGAAVAVWTTPESVEAGAVFAEIGPRMAELSGSRLAAQQQMEGLLAPHRPKEPAWFLATVGVSPDHQGKGLGSAVVLPGVEAAERAGVPAFLETSAPRNLPFYERLGFTVTADVEVPEGPRTWCMTRKPGA

SEQ ID NO: 14395 - protein, 961 aa, Artificial Sequence
  Synthetic Polypeptide
MALPVTALLLPLALLLHAARPEADIYQTPRYLVIGTGKKITLECSQTMGHDKMYWYQQDPGMELHLIHYSYGVNSTEKGDLSSESTVSRIRTEHFPLTLESARPSHTSQYLCASSEARGLAEFTDTQYFGPGTRLTVLEGKPIPNPLLGLDSTGSGDKQLDADVSPKPTIFLPSIAETKLQKAGTYLCLLEKFFPDVIKIHWQEKKSNTILGSQEGNTMKTNDTYMKFSWLTVPEKSLDKEHRCIVRHENNKNGVDQEIIFPPIKTDVITMDPKDNCSKDANDTLLLQLTNTSAYYMYLLLLLKSVVYFAIITCCLLRRTAFCCNGEKSRAKRSGSGATNFSLLKQAGDVEENPGPTSMDWIWRILFLVGAATGAHSGPMDPDLEIRAAFLRQRNTALRTEVAELEQEVQRLENEVSQYETRYGPLGGGKGSGGGGSGGGGSGGGGSFEQVQLQQPGAELVKPGASVKMSCKASGYAFSSYWINWMKQKPGQGLEWIGQIYPGDGTENRFSVNFQKAAKSFSLKISDSQLGDAAMYFCAYRSAVNARLMFGDGTQLVVKPNTREQKLISEEDGSGSQPHTKPSVFVMKNGTNVACLVKEFYPKDIRINLVSSKKITEFDPAIVISPSGKYNAVKLGKYEDSNSVTCSVQHDNKTVHSTDFEVKTDSTDHVKPKETENTKQPSKSCHKPKAIVHTEKVNMMSLTVLGLRMLFAKTVAVNFLLTAKLFFLRAKRSGSGVKQTLNFDLLKLAGDVESNPGPSRGHMTEYKPTVRLATRDDVPRAVRTLAAAFADYPATRHTVDPDRHIERVTELQELFLTRVGLDIGKVWVADDGAAVAVWTTPESVEAGAVFAEIGPRMAELSGSRLAAQQQMEGLLAPHRPKEPAWFLATVGVSPDHQGKGLGSAVVLPGVEAAERAGVPAFLETSAPRNLPFYERLGFTVTADVEVPEGPRTWCMTRKPGA

SEQ ID NO: 14396 - protein, 699 aa, Artificial Sequence
  Synthetic Polypeptide
MALPVTALLLPLALLLHAARPEADIYQTPRYLVIGTGKKITLECSQTMGHDKMYWYQQDPGMELHLIHYSYGVNSTEKGDLSSESTVSRIRTEHFPLTLESARPSHTSQYLCASSEARGLAEFTDTQYFGPGTRLTVLESQPHTKPSVFVMKNGTNVACLVKEFYPKDIRINLVSSKKITEFDPAIVISPSGKYNAVKLGKYEDSNSVTCSVQHDNKTVHSTDFEVKTDSTDHVKPKETENTKQPSKSCHKPKAIVHTEKVNMMSLTVLGLRMLFAKTVAVNFLLTAKLFFLRAKRSGSGATNFSLLKQAGDVEENPGPTSMDWIWRILFLVGAATGAHSGPMDPDLEIRAAFLRQRNTALRTEVAELEQEVQRLENEVSQYETRYGPLGGGKGSGGGGSGGGGSGGGGSFEQVQLQQPGAELVKPGASVKMSCKASGYAFSSYWINWMKQKPGQGLEWIGQIYPGDGTENRFSVNFQKAAKSFSLKISDSQLGDAAMYFCAYRSAVNARLMFGDGTQLVVKPNTRDKQLDADVSPKPTIFLPSIAETKLQKAGTYLCLLEKFFPDVIKIHWQEKKSNTILGSQEGNTMKTNDTYMKFSWLTVPEKSLDKEHRCIVRHENNKNGVDQEIIFPPIKTDVITMDPKDNCSKDANDTLLLQLTNTSAYYMYLLLLLKSVVYFAIITCCLLRRTAFCCNGEKS

SEQ ID NO: 14397 - protein, 1101 aa, Artificial Sequence
  Synthetic Polypeptide
MALPVTALLLPLALLLHAARPEADIYQTPRYLVIGTGKKITLECSQTMGHDKMYWYQQDPGMELHLIHYSYGVNSTEKGDLSSESTVSRIRTEHFPLTLESARPSHTSQYLCASSEARGLAEFTDTQYFGPGTRLTVGQPKANPTVTLFPPSSEELQANKATLVCLISDFYPGAVTVAWKADGSPVKAGVETTKPSKQSNNKYAASSYLSLTPEQWKSHRSYSCQVTHEGSTVEKTVAPTECSGSQSFGLLDPKLCYLLDGILFIYGVILTALFLRVKFSRSADAPAYQQGQNQLYNELNLGRREEYDVLDKRRGRDPEMGGKPQRRKNPQEGLYNELQKDKMAEAYSEIGMKGERRRGKGHDGLYQGLSTATKDTYDALHMQALPPRRAKRSGSGATNFSLLKQAGDVEENPGPTSMDWIWRILFLVGAATGAHSGPMDPDLEIRAAFLRQRNTALRTEVAELEQEVQRLENEVSQYETRYGPLGGGKGSGGGGSGGGGSGGGGSFEQVQLQQPGAELVKPGASVKMSCKASGYAFSSYWINWMKQKPGQGLEWIGQIYPGDGTENRFSVNFQKAAKSFSLKISDSQLGDAAMYFCAYRSAVNARLMFGDGTQLVVKPNASTKGPSVFPLAPSSKSTSGGTAALGCLVKDYFPEPVTVSWNSGALTSGVHTFPAVLQSSGLYSLSSVVTVPSSSLGTQTYICNVNHKPSNTKVDKRVEPKSCGTQSFGLLDPKLCYLLDGILFIYGVILTALFLRVKFSRSADAPAYQQGQNQLYNELNLGRREEYDVLDKRRGRDPEMGGKPQRRKNPQEGLYNELQKDKMAEAYSEIGMKGERRRGKGHDGLYQGLSTATKDTYDALHMQALPPRRAKRSGSGVKQTLNFDLLKLAGDVESNPGPSRGHMTEYKPTVRLATRDDVPRAVRTLAAAFADYPATRHTVDPDRHIERVTELQELFLTRVGLDIGKVWVADDGAAVAVWTTPESVEAGAVFAEIGPRMAELSGSRLAAQQQMEGLLAPHRPKEPAWFLATVGVSPDHQGKGLGSAVVLPGVEAAERAGVPAFLETSAPRNLPFYERLGFTVTADVEVPEGPRTWCMTRKPGA

SEQ ID NO: 14398 - protein, 887 aa, Artificial Sequence
  Synthetic Polypeptide
MALPVTALLLPLALLLHAARPEADIYQTPRYLVIGTGKKITLECSQTMGHDKMYWYQQDPGMELHLIHYSYGVNSTEKGDLSSESTVSRIRTEHFPLTLESARPSHTSQYLCASSEARGLAEFTDTQYFGPGTRLTVLEDLKNVFPPEVAVFEPSEAEISHTQKATLVCLATGFYPDHVELSWWVNGKEVHSGVSTDPQPLKEQPALNDSRYCLSSRLRVSATFWQNPRNHFRCQVQFYGLSENDEWTQDRAKPVTQIVSAEAWGRADCGSQSFGLLDPKLCYLLDGILFIYGVILTALFLRVKFSRSADAPAYQQGQNQLYNELNLGRREEYDVLDKRRGRDPEMGGKPQRRKNPQEGLYNELQKDKMAEAYSEIGMKGERRRGKGHDGLYQGLSTATKDTYDALHMQALPPRRAKRSGSGATNFSLLKQAGDVEENPGPTSMDWIWRILFLVGAATGAHSGPMDPDLEIRAAFLRQRNTALRTEVAELEQEVQRLENEVSQYETRYGPLGGGKGSGGGGSGGGGSGGGGSFEQVQLQQPGAELVKPGASVKMSCKASGYAFSSYWINWMKQKPGQGLEWIGQIYPGDGTENRFSVNFQKAAKSFSLKISDSQLGDAAMYFCAYRSAVNARLMFGDGTQLVVKPNTRIQNPDPAVYQLRDSKSSDKSVCLFTDFDSQTNVSQSKDSDVYITDKTVLDMRSMDFKSNSAVAWSNKSDFACANAFNNSIIPEDTFFPSPESSCGTQSFGLLDPKLCYLLDGILFIYGVILTALFLRVKFSRSADAPAYQQGQNQLYNELNLGRREEYDVLDKRRGRDPEMGGKPQRRKNPQEGLYNELQKDKMAEAYSEIGMKGERRRGKGHDGLYQGLSTATKDTYDALHMQALPPR

SEQ ID NO: 14399 - protein, 887 aa, Artificial Sequence
  Synthetic Polypeptide
MALPVTALLLPLALLLHAARPEADIYQTPRYLVIGTGKKITLECSQTMGHDKMYWYQQDPGMELHLIHYSYGVNSTEKGDLSSESTVSRIRTEHFPLTLESARPSHTSQYLCASSEARGLAEFTDTQYFGPGTRLTVLEDLKNVFPPEVAVFEPSKAEIAHTQKATLVCLATGFYPDHVELSWWVNGKEVHSGVCTDPQPLKEQPALNDSRYCLSSRLRVSATFWQNPRNHFRCQVQFYGLSENDEWTQDRAKPVTQIVSAEAWGRADCGSQSFGLLDPKLCYLLDGILFIYGVILTALFLRVKFSRSADAPAYQQGQNQLYNELNLGRREEYDVLDKRRGRDPEMGGKPQRRKNPQEGLYNELQKDKMAEAYSEIGMKGERRRGKGHDGLYQGLSTATKDTYDALHMQALPPRRAKRSGSGATNFSLLKQAGDVEENPGPTSMDWIWRILFLVGAATGAHSGPMDPDLEIRAAFLRQRNTALRTEVAELEQEVQRLENEVSQYETRYGPLGGGKGSGGGGSGGGGSGGGGSFEQVQLQQPGAELVKPGASVKMSCKASGYAFSSYWINWMKQKPGQGLEWIGQIYPGDGTENRFSVNFQKAAKSFSLKISDSQLGDAAMYFCAYRSAVNARLMFGDGTQLVVKPNTRIQNPDPAVYQLRDSKSSDKSVCLFTDFDSQTNVSQSKDSDVYITDKCVLDMRSMDFKSNSAVAWSNKSDFACANAFNNSIIPEDTFFPSSDVPCGTQSFGLLDPKLCYLLDGILFIYGVILTALFLRVKFSRSADAPAYQQGQNQLYNELNLGRREEYDVLDKRRGRDPEMGGKPQRRKNPQEGLYNELQKDKMAEAYSEIGMKGERRRGKGHDGLYQGLSTATKDTYDALHMQALPPR

SEQ ID NO: 14400 - protein, 958 aa, Artificial Sequence
  Synthetic Polypeptide
MALPVTALLLPLALLLHAARPEADIYQTPRYLVIGTGKKITLECSQTMGHDKMYWYQQDPGMELHLIHYSYGVNSTEKGDLSSESTVSRIRTEHFPLTLESARPSHTSQYLCASSEARGLAEFTDTQYFGPGTRLTVLEGKPIPNPLLGLDSTGSGEDLKNVFPPEVAVFEPSEAEISHTQKATLVCLATGFYPDHVELSWWVNGKEVHSGVSTDPQPLKEQPALNDSRYCLSSRLRVSATFWQNPRNHFRCQVQFYGLSENDEWTQDRAKPVTQIVSAEAWGRADCGSQSFGLLDPKLCYLLDGILFIYGVILTALFLRVKFSRSADAPAYQQGQNQLYNELNLGRREEYDVLDKRRGRDPEMGGKPQRRKNPQEGLYNELQKDKMAEAYSEIGMKGERRRGKGHDGLYQGLSTATKDTYDALHMQALPPRRAKRSGSGATNFSLLKQAGDVEENPGPTSMDWIWRILFLVGAATGAHSGPMDPDLEIRAAFLRQRNTALRTEVAELEQEVQRLENEVSQYETRYGPLGGGKGSGGGGSGGGGSGGGGSFEQVQLQQPGAELVKPGASVKMSCKASGYAFSSYWINWMKQKPGQGLEWIGQIYPGDGTENRFSVNFQKAAKSFSLKISDSQLGDAAMYFCAYRSAVNARLMFGDGTQLVVKPNTREQKLISEEDGSGIQNPDPAVYQLRDSKSSDKSVCLFTDFDSQTNVSQSKDSDVYITDKTVLDMRSMDFKSNSAVAWSNKSDFACANAFNNSIIPEDTFFPSPESSCGTQSFGLLDPKLCYLLDGILFIYGVILTALFLRSKRSRLLHSDYMNMTPRRPGPTRKHYQPYAPPRDFAAYRSRVKFSRSADAPAYQQGQNQLYNELNLGRREEYDVLDKRRGRDPEMGGKPQRRKNPQEGLYNELQKDKMAEAYSEIGMKGERRRGKGHDGLYQGLSTATKDTYDALHMQALPPR

SEQ ID NO: 14401 - protein, 999 aa, Artificial Sequence
  Synthetic Polypeptide
MALPVTALLLPLALLLHAARPEADIYQTPRYLVIGTGKKITLECSQTMGHDKMYWYQQDPGMELHLIHYSYGVNSTEKGDLSSESTVSRIRTEHFPLTLESARPSHTSQYLCASSEARGLAEFTDTQYFGPGTRLTVLEGKPIPNPLLGLDSTGSGEDLKNVFPPEVAVFEPSEAEISHTQKATLVCLATGFYPDHVELSWWVNGKEVHSGVSTDPQPLKEQPALNDSRYCLSSRLRVSATFWQNPRNHFRCQVQFYGLSENDEWTQDRAKPVTQIVSAEAWGRADCGSQSFGLLDPKLCYLLDGILFIYGVILTALFLRSKRSRLLHSDYMNMTPRRPGPTRKHYQPYAPPRDFAAYRSRVKFSRSADAPAYQQGQNQLYNELNLGRREEYDVLDKRRGRDPEMGGKPQRRKNPQEGLYNELQKDKMAEAYSEIGMKGERRRGKGHDGLYQGLSTATKDTYDALHMQALPPRRAKRSGSGATNFSLLKQAGDVEENPGPTSMDWIWRILFLVGAATGAHSGPMDPDLEIRAAFLRQRNTALRTEVAELEQEVQRLENEVSQYETRYGPLGGGKGSGGGGSGGGGSGGGGSFEQVQLQQPGAELVKPGASVKMSCKASGYAFSSYWINWMKQKPGQGLEWIGQIYPGDGTENRFSVNFQKAAKSFSLKISDSQLGDAAMYFCAYRSAVNARLMFGDGTQLVVKPNTREQKLISEEDGSGIQNPDPAVYQLRDSKSSDKSVCLFTDFDSQTNVSQSKDSDVYITDKTVLDMRSMDFKSNSAVAWSNKSDFACANAFNNSIIPEDTFFPSPESSCGTQSFGLLDPKLCYLLDGILFIYGVILTALFLRSKRSRLLHSDYMNMTPRRPGPTRKHYQPYAPPRDFAAYRSRVKFSRSADAPAYQQGQNQLYNELNLGRREEYDVLDKRRGRDPEMGGKPQRRKNPQEGLYNELQKDKMAEAYSEIGMKGERRRGKGHDGLYQGLSTATKDTYDALHMQALPPR

SEQ ID NO: 14402 - protein, 960 aa, Artificial Sequence
  Synthetic Polypeptide
MALPVTALLLPLALLLHAARPEADIYQTPRYLVIGTGKKITLECSQTMGHDKMYWYQQDPGMELHLIHYSYGVNSTEKGDLSSESTVSRIRTEHFPLTLESARPSHTSQYLCASSEARGLAEFTDTQYFGPGTRLTVLEGKPIPNPLLGLDSTGSGEDLKNVFPPEVAVFEPSEAEISHTQKATLVCLATGFYPDHVELSWWVNGKEVHSGVSTDPQPLKEQPALNDSRYCLSSRLRVSATFWQNPRNHFRCQVQFYGLSENDEWTQDRAKPVTQIVSAEAWGRADCGSQSFGLLDPKLCYLLDGILFIYGVILTALFLRVKFSRSADAPAYQQGQNQLYNELNLGRREEYDVLDKRRGRDPEMGGKPQRRKNPQEGLYNELQKDKMAEAYSEIGMKGERRRGKGHDGLYQGLSTATKDTYDALHMQALPPRRAKRSGSGATNFSLLKQAGDVEENPGPTSMDWIWRILFLVGAATGAHSGPMDPDLEIRAAFLRQRNTALRTEVAELEQEVQRLENEVSQYETRYGPLGGGKGSGGGGSGGGGSGGGGSFEQVQLQQPGAELVKPGASVKMSCKASGYAFSSYWINWMKQKPGQGLEWIGQIYPGDGTENRFSVNFQKAAKSFSLKISDSQLGDAAMYFCAYRSAVNARLMFGDGTQLVVKPNTREQKLISEEDLGSGIQNPDPAVYQLRDSKSSDKSVCLFTDFDSQTNVSQSKDSDVYITDKTVLDMRSMDFKSNSAVAWSNKSDFACANAFNNSIIPEDTFFPSPESSCGTQSFGLLDPKLCYLLDGILFIYGVILTALFLKRGRKKLLYIFKQPFMRPVQTTQEEDGCSCRFPEEEEGGCELRVKFSRSADAPAYQQGQNQLYNELNLGRREEYDVLDKRRGRDPEMGGKPQRRKNPQEGLYNELQKDKMAEAYSEIGMKGERRRGKGHDGLYQGLSTATKDTYDALHMQALPPR

SEQ ID NO: 14403 - protein, 1002 aa, Artificial Sequence
  Synthetic Polypeptide
MALPVTALLLPLALLLHAARPEADIYQTPRYLVIGTGKKITLECSQTMGHDKMYWYQQDPGMELHLIHYSYGVNSTEKGDLSSESTVSRIRTEHFPLTLESARPSHTSQYLCASSEARGLAEFTDTQYFGPGTRLTVLEGKPIPNPLLGLDSTGSGEDLKNVFPPEVAVFEPSEAEISHTQKATLVCLATGFYPDHVELSWWVNGKEVHSGVSTDPQPLKEQPALNDSRYCLSSRLRVSATFWQNPRNHFRCQVQFYGLSENDEWTQDRAKPVTQIVSAEAWGRADCGSQSFGLLDPKLCYLLDGILFIYGVILTALFLKRGRKKLLYIFKQPFMRPVQTTQEEDGCSCRFPEEEEGGCELRVKFSRSADAPAYQQGQNQLYNELNLGRREEYDVLDKRRGRDPEMGGKPQRRKNPQEGLYNELQKDKMAEAYSEIGMKGERRRGKGHDGLYQGLSTATKDTYDALHMQALPPRRAKRSGSGATNFSLLKQAGDVEENPGPTSMDWIWRILFLVGAATGAHSGPMDPDLEIRAAFLRQRNTALRTEVAELEQEVQRLENEVSQYETRYGPLGGGKGSGGGGSGGGGSGGGGSFEQVQLQQPGAELVKPGASVKMSCKASGYAFSSYWINWMKQKPGQGLEWIGQIYPGDGTENRFSVNFQKAAKSFSLKISDSQLGDAAMYFCAYRSAVNARLMFGDGTQLVVKPNTREQKLISEEDLGSGIQNPDPAVYQLRDSKSSDKSVCLFTDFDSQTNVSQSKDSDVYITDKTVLDMRSMDFKSNSAVAWSNKSDFACANAFNNSIIPEDTFFPSPESSCGTQSFGLLDPKLCYLLDGILFIYGVILTALFLKRGRKKLLYIFKQPFMRPVQTTQEEDGCSCRFPEEEEGGCELRVKFSRSADAPAYQQGQNQLYNELNLGRREEYDVLDKRRGRDPEMGGKPQRRKNPQEGLYNELQKDKMAEAYSEIGMKGERRRGKGHDGLYQGLSTATKDTYDALHMQALPPR

SEQ ID NO: 14404 - protein, 892 aa, Artificial Sequence
  Synthetic Polypeptide
MALPVTALLLPLALLLHAARPEADIYQTPRYLVIGTGKKITLECSQTMGHDKMYWYQQDPGMELHLIHYSYGVNSTEKGDLSSESTVSRIRTEHFPLTLESARPSHTSQYLCASSEARGLAEFTDTQYFGPGTRLTVLEQSFGLLDPKLCYLLDGILFIYGVILTALFLRVKFSRSADAPAYQQGQNQLYNELNLGRREEYDVLDKRRGRDPEMGGKPQRRKNPQEGLYNELQKDKMAEAYSEIGMKGERRRGKGHDGLYQGLSTATKDTYDALHMQALPPRRAKRSGSGATNFSLLKQAGDVEENPGPTSMDWIWRILFLVGAATGAHSGPMDPDLEIRAAFLRQRNTALRTEVAELEQEVQRLENEVSQYETRYGPLGGGKGSGGGGSGGGGSGGGGSFEQVQLQQPGAELVKPGASVKMSCKASGYAFSSYWINWMKQKPGQGLEWIGQIYPGDGTENRFSVNFQKAAKSFSLKISDSQLGDAAMYFCAYRSAVNARLMFGDGTQLVVKPNTRQSFGLLDPKLCYLLDGILFIYGVILTALFLRVKFSRSADAPAYQQGQNQLYNELNLGRREEYDVLDKRRGRDPEMGGKPQRRKNPQEGLYNELQKDKMAEAYSEIGMKGERRRGKGHDGLYQGLSTATKDTYDALHMQALPPRRAKRSGSGVKQTLNFDLLKLAGDVESNPGPSRGHMTEYKPTVRLATRDDVPRAVRTLAAAFADYPATRHTVDPDRHIERVTELQELFLTRVGLDIGKVWVADDGAAVAVWTTPESVEAGAVFAEIGPRMAELSGSRLAAQQQMEGLLAPHRPKEPAWFLATVGVSPDHQGKGLGSAVVLPGVEAAERAGVPAFLETSAPRNLPFYERLGFTVTADVEVPEGPRTWCMTRKPGA

SEQ ID NO: 14405 - protein, 717 aa, Artificial Sequence
  Synthetic Polypeptide
MALPVTALLLPLALLLHAARPEADIYQTPRYLVIGTGKKITLECSQTMGHDKMYWYQQDPGMELHLIHYSYGVNSTEKGDLSSESTVSRIRTEHFPLTLESARPSHTSQYLCASSEARGLAEFTDTQYFGPGTRLTVLEGQPKANPTVTLFPPSSEELQANKATLVCLISDFYPGAVTVAWKADGSPVKAGVETTKPSKQSNNKYAASSYLSLTPEQWKSHRSYSCQVTHEGSTVEKTVAPTECSPIKTDVITMDPKDNCSKDANDTLLLQLTNTSAYYMYLLLLLKSVVYFAIITCCLLRRTAFCCNGEKSRAKRSGSGATNFSLLKQAGDVEENPGPTSMDWIWRILFLVGAATGAHSGPMDPDLEIRAAFLRQRNTALRTEVAELEQEVQRLENEVSQYETRYGPLGGGKGSGGGGSGGGGSGGGGSFEQVQLQQPGAELVKPGASVKMSCKASGYAFSSYWINWMKQKPGQGLEWIGQIYPGDGTENRFSVNFQKAAKSFSLKISDSQLGDAAMYFCAYRSAVNARLMFGDGTQLVVKPNTRASTKGPSVFPLAPSSKSTSGGTAALGCLVKDYFPEPVTVSWNSGALTSGVHTFPAVLQSSGLYSLSSVVTVPSSSLGTQTYICNVNHKPSNTKVDKRVEPKSCEVKTDSTDHVKPKETENTKQPSKSCHKPKAIVHTEKVNMMSLTVLGLRMLFAKTVAVNFLLTAKLFFL

SEQ ID NO: 14406 - protein, 695 aa, Artificial Sequence
  Synthetic Polypeptide
MALPVTALLLPLALLLHAARPEADIYQTPRYLVIGTGKKITLECSQTMGHDKMYWYQQDPGMELHLIHYSYGVNSTEKGDLSSESTVSRIRTEHFPLTLESARPSHTSQYLCASSEARGLAEFTDTQYFGPGTRLTVLEGQPKANPTVTLFPPSSEELQANKATLVCLISDFYPGAVTVAWKADGSPVKAGVETTKPSKQSNNKYAASSYLSLTPEQWKSHRSYSCQVTHEGSTVEKTVAPTECSGRADCGITSASYHQGVLSATILYEILLGKATLYAVLVSALVLMAMVKRKDSRGRAKRSGSGATNFSLLKQAGDVEENPGPTSMDWIWRILFLVGAATGAHSGPMDPDLEIRAAFLRQRNTALRTEVAELEQEVQRLENEVSQYETRYGPLGGGKGSGGGGSGGGGSGGGGSFEQVQLQQPGAELVKPGASVKMSCKASGYAFSSYWINWMKQKPGQGLEWIGQIYPGDGTENRFSVNFQKAAKSFSLKISDSQLGDAAMYFCAYRSAVNARLMFGDGTQLVVKPNTRASTKGPSVFPLAPSSKSTSGGTAALGCLVKDYFPEPVTVSWNSGALTSGVHTFPAVLQSSGLYSLSSVVTVPSSSLGTQTYICNVNHKPSNTKVDKRVEPKSCIPEDTFFPSSDVPCDVKLVEKSFETDTNLNFQNLSVIGFRILLLKVAGFNLLMTLRLWSS

SEQ ID NO: 14407 - protein, 695 aa, Artificial Sequence
  Synthetic Polypeptide
MALPVTALLLPLALLLHAARPEADIYQTPRYLVIGTGKKITLECSQTMGHDKMYWYQQDPGMELHLIHYSYGVNSTEKGDLSSESTVSRIRTEHFPLTLESARPSHTSQYLCASSEARGLAEFTDTQYFGPGTRLTVLEGQPKANPTVTLFPPSSEELQANKATLVCLISDFYPGAVTVAWKADGSPVKAGVETTKPSKQSNNKYAASSYLSLTPEQWKSHRSYSCQVTHEGSTVEKTVAPTECSGRADCGFTSESYQQGVLSATILYEILLGKATLYAVLVSALVLMAMVKRKDSRGRAKRSGSGATNFSLLKQAGDVEENPGPTSMDWIWRILFLVGAATGAHSGPMDPDLEIRAAFLRQRNTALRTEVAELEQEVQRLENEVSQYETRYGPLGGGKGSGGGGSGGGGSGGGGSFEQVQLQQPGAELVKPGASVKMSCKASGYAFSSYWINWMKQKPGQGLEWIGQIYPGDGTENRFSVNFQKAAKSFSLKISDSQLGDAAMYFCAYRSAVNARLMFGDGTQLVVKPNTRASTKGPSVFPLAPSSKSTSGGTAALGCLVKDYFPEPVTVSWNSGALTSGVHTFPAVLQSSGLYSLSSVVTVPSSSLGTQTYICNVNHKPSNTKVDKRVEPKSCIPEDTFFPSPESSCDVKLVEKSFETDTNLNFQNLSVIGFRILLLKVAGFNLLMTLRLWSS

SEQ ID NO: 14408 - protein, 525 aa, Artificial Sequence
  Synthetic Polypeptide
MDWIWRILFLVGAATGAHSGPMDPDLEIRAAFLRQRNTALRTEVAELEQEVQRLENEVSQYETRYGPLGGGKGSGGGGSGGGGSGGGGSFEQVQLQQPGAELVKPGASVKMSCKASGYAFSSYWINWMKQKPGQGLEWIGQIYPGDGTENRFSVNFQKAAKSFSLKISDSQLGDAAMYFCAYRSAVNARLMFGDGTQLVVKPNGGGGSGGGGSGGGGSEADIYQTPRYLVIGTGKKITLECSQTMGHDKMYWYQQDPGMELHLIHYSYGVNSTEKGDLSSESTVSRIRTEHFPLTLESARPSHTSQYLCASSEARGLAEFTDTQYFGPGTRLTVTRGGGSDGNEEMGGITQTPYKVSISGTTVILTCPQYPGSEILWQHNDKNIGGDEDDKNIGSDEDHLSLKEFSELEQSGYYVCYPRGSKPEDANFYLYLRARVCENCMEMDVMSVATIVIVDICITGGLLLLVYYWSKNRKAKAKPVTRGAGAGGRQRGQNKERPPPVPNPDYEPIRKGQRDLYSGLNQRRI

SEQ ID NO: 14409 - protein, 490 aa, Artificial Sequence
  Synthetic Polypeptide
MDWIWRILFLVGAATGAHSGPMDPDLEIRAAFLRQRNTALRTEVAELEQEVQRLENEVSQYETRYGPLGGGKGSGGGGSGGGGSGGGGSFEQVQLQQPGAELVKPGASVKMSCKASGYAFSSYWINWMKQKPGQGLEWIGQIYPGDGTENRFSVNFQKAAKSFSLKISDSQLGDAAMYFCAYRSAVNARLMFGDGTQLVVKPNGGGGSGGGGSGGGGSEADIYQTPRYLVIGTGKKITLECSQTMGHDKMYWYQQDPGMELHLIHYSYGVNSTEKGDLSSESTVSRIRTEHFPLTLESARPSHTSQYLCASSEARGLAEFTDTQYFGPGTRLTVTRGGGSFKIPIEELEDRVFVNCNTSITWVEGTVGTLLSDITRLDLGKRILDPRGIYRCNGTDIYKDKESTVQVHYRMCQSCVELDPATVAGIIVTDVIATLLLALGVFCFAGHETGRLSGAADTQALLRNDQVYQPLRDRDDAQYSHLGGNWARNK

SEQ ID NO: 14410 - protein, 500 aa, Artificial Sequence
  Synthetic Polypeptide
MDWIWRILFLVGAATGAHSGPMDPDLEIRAAFLRQRNTALRTEVAELEQEVQRLENEVSQYETRYGPLGGGKGSGGGGSGGGGSGGGGSFEQVQLQQPGAELVKPGASVKMSCKASGYAFSSYWINWMKQKPGQGLEWIGQIYPGDGTENRFSVNFQKAAKSFSLKISDSQLGDAAMYFCAYRSAVNARLMFGDGTQLVVKPNGGGGSGGGGSGGGGSEADIYQTPRYLVIGTGKKITLECSQTMGHDKMYWYQQDPGMELHLIHYSYGVNSTEKGDLSSESTVSRIRTEHFPLTLESARPSHTSQYLCASSEARGLAEFTDTQYFGPGTRLTVTRGGGSQSIKGNHLVKVYDYQEDGSVLLTCDAEAKNITWFKDGKMIGFLTEDKKKWNLGSNAKDPRGMYQCKGSQNKSKPLQVYYRMCQNCIELNAATISGFLFAEIVSIFVLAVGVYFIAGQDGVRQSRASDKQTLLPNDQLYQPLKDREDDQYSHLQGNQLRRN

SEQ ID NO: 14411 - protein, 483 aa, Artificial Sequence
  Synthetic Polypeptide
MDWIWRILFLVGAATGAHSGPMDPDLEIRAAFLRQRNTALRTEVAELEQEVQRLENEVSQYETRYGPLGGGKGSGGGGSGGGGSGGGGSFEQVQLQQPGAELVKPGASVKMSCKASGYAFSSYWINWMKQKPGQGLEWIGQIYPGDGTENRFSVNFQKAAKSFSLKISDSQLGDAAMYFCAYRSAVNARLMFGDGTQLVVKPNGGGGSGGGGSGGGGSEADIYQTPRYLVIGTGKKITLECSQTMGHDKMYWYQQDPGMELHLIHYSYGVNSTEKGDLSSESTVSRIRTEHFPLTLESARPSHTSQYLCASSEARGLAEFTDTQYFGPGTRLTVTRGGGSQSFGLLDPKLCYLLDGILFIYGVILTALFLRVKFSRSADAPAYQQGQNQLYNELNLGRREEYDVLDKRRGRDPEMGGKPQRRKNPQEGLYNELQKDKMAEAYSEIGMKGERRRGKGHDGLYQGLSTATKDTYDALHMQALPPR

SEQ ID NO: 14412 - protein, 511 aa, Artificial Sequence
  Synthetic Polypeptide
MDWIWRILFLVGAATGAHSGPMDPDLEIRAAFLRQRNTALRTEVAELEQEVQRLENEVSQYETRYGPLGGGKGSGGGGSGGGGSGGGGSFEQVQLQQPGAELVKPGASVKMSCKASGYAFSSYWINWMKQKPGQGLEWIGQIYPGDGTENRFSVNFQKAAKSFSLKISDSQLGDAAMYFCAYRSAVNARLMFGDGTQLVVKPNTRIQNPDPAVYQLRDSKSSDKSVCLFTDFDSQTNVSQSKDSDVYITDKTVLDMRSMDFKSNSAVAWSNKSDFACANAFNNSIIPEDTFFPSPESSCDVKLVEKSFETDTNLNFQNLSVIGFRILLLKVAGFNLLMTLRLWSSRAKRSGSGVKQTLNFDLLKLAGDVESNPGPSRGHMAKPLSQEESTLIERATATINSIPISEDYSVASAALSSDGRIFTGVNVYHFTGGPCAELVVLGTAAAAAAGNLTCIVAIGNENRGILSPCGRCRQVLLDLHPGIKAIVKDSDGQPTAVGIRELLPSGYVWEG

SEQ ID NO: 14413 - protein, 345 aa, Artificial Sequence
  Synthetic Polypeptide
MDWIWRILFLVGAATGAHSGPMDPDLEIRAAFLRQRNTALRTEVAELEQEVQRLENEVSQYETRYGPLGGGKGSGGGGSGGGGSGGGGSFEQVQLQQPGAELVKPGASVKMSCKASGYAFSSYWINWMKQKPGQGLEWIGQIYPGDGTENRFSVNFQKAAKSFSLKISDSQLGDAAMYFCAYRSAVNARLMFGDGTQLVVKPNTRIQNPDPAVYQLRDSKSSDKSVCLFTDFDSQTNVSQSKDSDVYITDKTVLDMRSMDFKSNSAVAWSNKSDFACANAFNNSIIPEDTFFPSPESSCDVKLVEKSFETDTNLNFQNLSVIGFRILLLKVAGFNLLMTLRLWSS

SEQ ID NO: 14414 - protein, 523 aa, Artificial Sequence
  Synthetic Polypeptide
MDWIWRILFLVGAATGAHSGPMDPDLEIRAAFLRQRNTALRTEVAELEQEVQRLENEVSQYETRYGPLGGGKGSGGGGSGGGGSGGGGSFEQVQLQQPGAELVKPGASVKMSCKASGYAFSSYWINWMKQKPGQGLEWIGQIYPGDGTENRFSVNFQKAAKSFSLKISDSQLGDAAMYFCAYRSAVNARLMFGDGTQLVVKPNTREQKLISEEDGSGIQNPDPAVYQLRDSKSSDKSVCLFTDFDSQTNVSQSKDSDVYITDKCVLDMRSMDFKSNSAVAWSNKSDFACANAFNNSIIPEDTFFPSPESSCDVKLVEKSFETDTNLNFQNLSVIGFRILLLKVAGFNLLMTLRLWSSRAKRSGSGVKQTLNFDLLKLAGDVESNPGPSRGHMAKPLSQEESTLIERATATINSIPISEDYSVASAALSSDGRIFTGVNVYHFTGGPCAELVVLGTAAAAAAGNLTCIVAIGNENRGILSPCGRCRQVLLDLHPGIKAIVKDSDGQPTAVGIRELLPSGYVWEG

SEQ ID NO: 14415 - protein, 357 aa, Artificial Sequence
  Synthetic Polypeptide
MDWIWRILFLVGAATGAHSGPMDPDLEIRAAFLRQRNTALRTEVAELEQEVQRLENEVSQYETRYGPLGGGKGSGGGGSGGGGSGGGGSFEQVQLQQPGAELVKPGASVKMSCKASGYAFSSYWINWMKQKPGQGLEWIGQIYPGDGTENRFSVNFQKAAKSFSLKISDSQLGDAAMYFCAYRSAVNARLMFGDGTQLVVKPNTREQKLISEEDGSGIQNPDPAVYQLRDSKSSDKSVCLFTDFDSQTNVSQSKDSDVYITDKCVLDMRSMDFKSNSAVAWSNKSDFACANAFNNSIIPEDTFFPSPESSCDVKLVEKSFETDTNLNFQNLSVIGFRILLLKVAGFNLLMTLRLWSS

SEQ ID NO: 14416 - protein, 640 aa, Artificial Sequence; identical to SEQ ID NO: 14220
  Synthetic Polypeptide

SEQ ID NO: 14417 - protein, 646 aa, Artificial Sequence; identical to SEQ ID NO: 14221
  Synthetic Polypeptide

SEQ ID NO: 14418 - protein, 1059 aa, Artificial Sequence; identical to SEQ ID NO: 14222
  Synthetic Polypeptide

SEQ ID NO: 14419 - protein, 999 aa, Artificial Sequence; identical to SEQ ID NO: 14223
  Synthetic Polypeptide

SEQ ID NO: 14420 - protein, 998 aa, Artificial Sequence; identical to SEQ ID NO: 14224
  Synthetic Polypeptide

SEQ ID NO: 14421 - protein, 765 aa, Artificial Sequence; identical to SEQ ID NO: 14225
  Synthetic Polypeptide

SEQ ID NO: 14422 - protein, 990 aa, Artificial Sequence; identical to SEQ ID NO: 14226
  Synthetic Polypeptide

SEQ ID NO: 14423 - protein, 769 aa, Artificial Sequence; identical to SEQ ID NO: 14227
  Synthetic Polypeptide

SEQ ID NO: 14424 - protein, 991 aa, Artificial Sequence; identical to SEQ ID NO: 14228
  Synthetic Polypeptide

SEQ ID NO: 14425 - protein, 1043 aa, Artificial Sequence; identical to SEQ ID NO: 14229
  Synthetic Polypeptide

SEQ ID NO: 14426 - protein, 1044 aa, Artificial Sequence; identical to SEQ ID NO: 14230
  Synthetic Polypeptide

SEQ ID NO: 14427 - protein, 998 aa, Artificial Sequence; identical to SEQ ID NO: 14231
  Synthetic Polypeptide

SEQ ID NO: 14428 - protein, 1080 aa, Artificial Sequence; identical to SEQ ID NO: 14232
  Synthetic Polypeptide

SEQ ID NO: 14429 - protein, 1098 aa, Artificial Sequence; identical to SEQ ID NO: 14233
  Synthetic Polypeptide

SEQ ID NO: 14430 - protein, 1035 aa, Artificial Sequence; identical to SEQ ID NO: 14234
  Synthetic Polypeptide

SEQ ID NO: 14431 - protein, 773 aa, Artificial Sequence; identical to SEQ ID NO: 14235
  Synthetic Polypeptide

SEQ ID NO: 14432 - protein, 1050 aa, Artificial Sequence; identical to SEQ ID NO: 14236
  Synthetic Polypeptide

SEQ ID NO: 14433 - protein, 1175 aa, Artificial Sequence; identical to SEQ ID NO: 14237
  Synthetic Polypeptide

SEQ ID NO: 14434 - protein, 961 aa, Artificial Sequence; identical to SEQ ID NO: 14238
  Synthetic Polypeptide

SEQ ID NO: 14435 - protein, 961 aa, Artificial Sequence; identical to SEQ ID NO: 14239
  Synthetic Polypeptide

SEQ ID NO: 14436 - protein, 1032 aa, Artificial Sequence; identical to SEQ ID NO: 14240
  Synthetic Polypeptide

SEQ ID NO: 14437 - protein, 1073 aa, Artificial Sequence; identical to SEQ ID NO: 14241
  Synthetic Polypeptide

SEQ ID NO: 14438 - protein, 1034 aa, Artificial Sequence; identical to SEQ ID NO: 14242
  Synthetic Polypeptide

SEQ ID NO: 14439 - protein, 1076 aa, Artificial Sequence; identical to SEQ ID NO: 14243
  Synthetic Polypeptide

SEQ ID NO: 14440 - protein, 966 aa, Artificial Sequence; identical to SEQ ID NO: 14244
  Synthetic Polypeptide

SEQ ID NO: 14441 - protein, 791 aa, Artificial Sequence; identical to SEQ ID NO: 14245
  Synthetic Polypeptide

SEQ ID NO: 14442 - protein, 769 aa, Artificial Sequence; identical to SEQ ID NO: 14246
  Synthetic Polypeptide

SEQ ID NO: 14443 - protein, 769 aa, Artificial Sequence; identical to SEQ ID NO: 14247
  Synthetic Polypeptide

SEQ ID NO: 14444 - protein, 595 aa, Artificial Sequence; identical to SEQ ID NO: 14248
  Synthetic Polypeptide

SEQ ID NO: 14445 - protein, 560 aa, Artificial Sequence; identical to SEQ ID NO: 14249
  Synthetic Polypeptide

SEQ ID NO: 14446 - protein, 570 aa, Artificial Sequence; identical to SEQ ID NO: 14250
  Synthetic Polypeptide

SEQ ID NO: 14447 - protein, 553 aa, Artificial Sequence; identical to SEQ ID NO: 14251
  Synthetic Polypeptide

SEQ ID NO: 14448 - protein, 786 aa, Artificial Sequence; identical to SEQ ID NO: 14252
  Synthetic Polypeptide

SEQ ID NO: 14449 - protein, 818 aa, Artificial Sequence; identical to SEQ ID NO: 14253
  Synthetic Polypeptide

SEQ ID NO: 14450 - protein, 868 aa, Artificial Sequence; identical to SEQ ID NO: 14254
  Synthetic Polypeptide

SEQ ID NO: 14451 - protein, 691 aa, Artificial Sequence; identical to SEQ ID NO: 14255
  Synthetic Polypeptide

SEQ ID NO: 14452 - protein, 461 aa, Artificial Sequence; identical to SEQ ID NO: 14256
  Synthetic Polypeptide

SEQ ID NO: 14453 - protein, 441 aa, Artificial Sequence; identical to SEQ ID NO: 14257
  Synthetic Polypeptide

SEQ ID NO: 14454 - protein, 275 aa, Artificial Sequence; identical to SEQ ID NO: 14258
  Synthetic Polypeptide

SEQ ID NO: 14455 - protein, 709 aa, Artificial Sequence; identical to SEQ ID NO: 14259
  Synthetic Polypeptide

SEQ ID NO: 14456 - protein, 479 aa, Artificial Sequence; identical to SEQ ID NO: 14260
  Synthetic Polypeptide

SEQ ID NO: 14457 - protein, 453 aa, Artificial Sequence; identical to SEQ ID NO: 14261
  Synthetic Polypeptide

SEQ ID NO: 14458 - protein, 287 aa, Artificial Sequence; identical to SEQ ID NO: 14262
  Synthetic Polypeptide

SEQ ID NO: 14459 - protein, 786 aa, Artificial Sequence; identical to SEQ ID NO: 14263
  Synthetic Polypeptide

SEQ ID NO: 14460 - protein, 818 aa, Artificial Sequence; identical to SEQ ID NO: 14264
  Synthetic Polypeptide

SEQ ID NO: 14461 - protein, 1069 aa, Artificial Sequence
  Synthetic Polypeptide
MALPVTALLLPLALLLHAARPACQVQLVESGGGLVQAGDSVTLSCTASGRTFSSYALAWFRQRPGKEREFVAGLRWGGPTNYADSVKDRFTISGDSAKHTMYLQMNSLKPEDTAVYYCGYNPGGWAVPSQYEYDSWGQGTQVTVSSGTGGGGSGGGGSGGGGSEFEADIYQTPRYLVIGTGKKITLECSQTMGHDKMYWYQQDPGMELHLIHYSYGVNSTEKGDLSSESTVSRIRTEHFPLTLESARPSHTSQYLCASSEARGLAEFTDTQYFGPGTRLTVLEIQNPDPAVYQLRDSKSSDKSVCLFTDFDSQTNVSQSKDSDVYITDKCVLDMRSMDFKSNSAVAWSNKSDFACANAFNNSIIPEDTFFPSSDVPCDVKLVEKSFETDTNLNFQNLSVIGFRILLLKVAGFNLLMTLRLWSSRAKRSGSGVKQTLNFDLLKLAGDVESNPGPTSMDWIWRILFLVGAATGAHSGPMDPDLEIRAAFLRQRNTALRTEVAELEQEVQRLENEVSQYETRYGPLGGGKGSGGGGSGGGGSGGGGSFEQVQLQQPGAELVKPGASVKMSCKASGYAFSSYWINWMKQKPGQGLEWIGQIYPGDGTENRFSVNFQKAAKSFSLKISDSQLGDAAMYFCAYRSAVNARLMFGDGTQLVVKPNTREDLKNVFPPEVAVFEPSKAEIAHTQKATLVCLATGFYPDHVELSWWVNGKEVHSGVCTDPQPLKEQPALNDSRYCLSSRLRVSATFWQNPRNHFRCQVQFYGLSENDEWTQDRAKPVTQIVSAEAWGRADCGITSASYHQGVLSATILYEILLGKATLYAVLVSALVLMAMVKRKDSRGRAKRSGSGATNFSLLKQAGDVEENPGPSRGHMTEYKPTVRLATRDDVPRAVRTLAAAFADYPATRHTVDPDRHIERVTELQELFLTRVGLDIGKVWVADDGAAVAVWTTPESVEAGAVFAEIGPRMAELSGSRLAAQQQMEGLLAPHRPKEPAWFLATVGVSPDHQGKGLGSAVVLPGVEAAERAGVPAFLETSAPRNLPFYERLGFTVTADVEVPEGPRTWCMTRKPGA

SEQ ID NO: 14462 - protein, 1068 aa, Artificial Sequence
  Synthetic Polypeptide
MALPVTALLLPLALLLHAARPACQVQLVESGGGLVQAGDSVTLSCTASGRTFSSYALAWFRQRPGKEREFVAGLRWGGPTNYADSVKDRFTISGDSAKHTMYLQMNSLKPEDTAVYYCGYNPGGWAVPSQYEYDSWGQGTQVTVSSGTGGGGSGGGGSGGGGSEFEADIYQTPRYLVIGTGKKITLECSQTMGHDKMYWYQQDPGMELHLIHYSYGVNSTEKGDLSSESTVSRIRTEHFPLTLESARPSHTSQYLCASSEARGLAEFTDTQYFGPGTRLTVLEDLKNVFPPEVAVFEPSKAEIAHTQKATLVCLATGFYPDHVELSWWVNGKEVHSGVCTDPQPLKEQPALNDSRYCLSSRLRVSATFWQNPRNHFRCQVQFYGLSENDEWTQDRAKPVTQIVSAEAWGRADCGITSASYHQGVLSATILYEILLGKATLYAVLVSALVLMAMVKRKDSRGRAKRSGSGATNFSLLKQAGDVEENPGPTSMDWIWRILFLVGAATGAHSGPMDPDLEIRAAFLRQRNTALRTEVAELEQEVQRLENEVSQYETRYGPLGGGKGSGGGGSGGGGSGGGGSFEQVQLQQPGAELVKPGASVKMSCKASGYAFSSYWINWMKQKPGQGLEWIGQIYPGDGTENRFSVNFQKAAKSFSLKISDSQLGDAAMYFCAYRSAVNARLMFGDGTQLVVKPNTRIQNPDPAVYQLRDSKSSDKSVCLFTDFDSQTNVSQSKDSDVYITDKCVLDMRSMDFKSNSAVAWSNKSDFACANAFNNSIIPEDTFFPSSDVPCDVKLVEKSFETDTNLNFQNLSVIGFRILLLKVAGFNLLMTLRLWSSRAKRSGSGVKQTLNFDLLKLAGDVESNPGPSRGHMTEYKPTVRLATRDDVPRAVRTLAAAFADYPATRHTVDPDRHIERVTELQELFLTRVGLDIGKVWVADDGAAVAVWTTPESVEAGAVFAEIGPRMAELSGSRLAAQQQMEGLLAPHRPKEPAWFLATVGVSPDHQGKGLGSAVVLPGVEAAERAGVPAFLETSAPRNLPFYERLGFTVTADVEVPEGPRTWCMTRKPGA

SEQ ID NO: 14463 - protein, 1068 aa, Artificial Sequence
  Synthetic Polypeptide
MALPVTALLLPLALLLHAARPACQVQLVESGGGLVQAGDSVTLSCTASGRTFSSYALAWFRQRPGKEREFVAGLRWGGPTNYADSVKDRFTISGDSAKHTMYLQMNSLKPEDTAVYYCGYNPGGWAVPSQYEYDSWGQGTQVTVSSGTGGGGSGGGGSGGGGSEFEADIYQTPRYLVIGTGKKITLECSQTMGHDKMYWYQQDPGMELHLIHYSYGVNSTEKGDLSSESTVSRIRTEHFPLTLESARPSHTSQYLCASSEARGLAEFTDTQYFGPGTRLTVLEDLKNVFPPEVAVFEPSEAEISHTQKATLVCLATGFYPDHVELSWWVNGKEVHSGVCTDPQPLKEQPALNDSRYCLSSRLRVSATFWQNPRNHFRCQVQFYGLSENDEWTQDRAKPVTQIVSAEAWGRADCGFTSESYQQGVLSATILYEILLGKATLYAVLVSALVLMAMVKRKDSRGRAKRSGSGATNFSLLKQAGDVEENPGPTSMDWIWRILFLVGAATGAHSGPMDPDLEIRAAFLRQRNTALRTEVAELEQEVQRLENEVSQYETRYGPLGGGKGSGGGGSGGGGSGGGGSFEQVQLQQPGAELVKPGASVKMSCKASGYAFSSYWINWMKQKPGQGLEWIGQIYPGDGTENRFSVNFQKAAKSFSLKISDSQLGDAAMYFCAYRSAVNARLMFGDGTQLVVKPNTRIQNPDPAVYQLRDSKSSDKSVCLFTDFDSQTNVSQSKDSDVYITDKCVLDMRSMDFKSNSAVAWSNKSDFACANAFNNSIIPEDTFFPSPESSCDVKLVEKSFETDTNLNFQNLSVIGFRILLLKVAGFNLLMTLRLWSSRAKRSGSGVKQTLNFDLLKLAGDVESNPGPSRGHMTEYKPTVRLATRDDVPRAVRTLAAAFADYPATRHTVDPDRHIERVTELQELFLTRVGLDIGKVWVADDGAAVAVWTTPESVEAGAVFAEIGPRMAELSGSRLAAQQQMEGLLAPHRPKEPAWFLATVGVSPDHQGKGLGSAVVLPGVEAAERAGVPAFLETSAPRNLPFYERLGFTVTADVEVPEGPRTWCMTRKPGA

SEQ ID NO: 14464 - protein, 835 aa, Artificial Sequence
  Synthetic Polypeptide
MALPVTALLLPLALLLHAARPACQVQLVESGGGLVQAGDSVTLSCTASGRTFSSYALAWFRQRPGKEREFVAGLRWGGPTNYADSVKDRFTISGDSAKHTMYLQMNSLKPEDTAVYYCGYNPGGWAVPSQYEYDSWGQGTQVTVSSGTGGGGSGGGGSGGGGSEFEADIYQTPRYLVIGTGKKITLECSQTMGHDKMYWYQQDPGMELHLIHYSYGVNSTEKGDLSSESTVSRIRTEHFPLTLESARPSHTSQYLCASSEARGLAEFTDTQYFGPGTRLTVLEDLKNVFPPEVAVFEPSEAEISHTQKATLVCLATGFYPDHVELSWWVNGKEVHSGVCTDPQPLKEQPALNDSRYCLSSRLRVSATFWQNPRNHFRCQVQFYGLSENDEWTQDRAKPVTQIVSAEAWGRADCGFTSESYQQGVLSATILYEILLGKATLYAVLVSALVLMAMVKRKDSRGRAKRSGSGATNFSLLKQAGDVEENPGPTSMDWIWRILFLVGAATGAHSGPMDPDLEIRAAFLRQRNTALRTEVAELEQEVQRLENEVSQYETRYGPLGGGKGSGGGGSGGGGSGGGGSFEQVQLQQPGAELVKPGASVKMSCKASGYAFSSYWINWMKQKPGQGLEWIGQIYPGDGTENRFSVNFQKAAKSFSLKISDSQLGDAAMYFCAYRSAVNARLMFGDGTQLVVKPNTRIQNPDPAVYQLRDSKSSDKSVCLFTDFDSQTNVSQSKDSDVYITDKCVLDMRSMDFKSNSAVAWSNKSDFACANAFNNSIIPEDTFFPSPESSCDVKLVEKSFETDTNLNFQNLSVIGFRILLLKVAGFNLLMTLRLWSS

SEQ ID NO: 14465 - protein, 1060 aa, Artificial Sequence
  Synthetic Polypeptide
MALPVTALLLPLALLLHAARPACQVQLVESGGGLVQAGDSVTLSCTASGRTFSSYALAWFRQRPGKEREFVAGLRWGGPTNYADSVKDRFTISGDSAKHTMYLQMNSLKPEDTAVYYCGYNPGGWAVPSQYEYDSWGQGTQVTVSSGTGGGGSGGGGSGGGGSEFEADIYQTPRYLVIGTGKKITLECSQTMGHDKMYWYQQDPGMELHLIHYSYGVNSTEKGDLSSESTVSRIRTEHFPLTLESARPSHTSQYLCASSEARGLAEFTDTQYFGPGTRLTVLEDLKNVFPPEVAVFEPSEAEISHTQKATLVCLATGFYPDHVELSWWVNGKEVHSGVCTDPQPLKEQPALNDSRYCLSSRLRVSATFWQNPRNHFRCQVQFYGLSENDEWTQDRAKPVTQIVSAEAWGRADCGFTSESYQQGVLSATILYEILLGKATLYAVLVSALVLMAMVKRKDSRGRAKRSGSGATNFSLLKQAGDVEENPGPTSMDWIWRILFLVGAATGAHSGPMDPDLEIRAAFLRQRNTALRTEVAELEQEVQRLENEVSQYETRYGPLGGGKGSGGGGSGGGGSGGGGSFEQVQLQQPGAELVKPGASVKMSCKASGYAFSSYWINWMKQKPGQGLEWIGQIYPGDGTENRFSVNFQKAAKSFSLKISDSQLGDAAMYFCAYRSAVNARLMFGDGTQLVVKPNTRIQNPDPAVYQLRDSKSSDKSVCLFTDFDSQTNVSQSKDSDVYITDKCVLDMRSMDFKSNSAVAWSNKSDFACANAFNNSIIPEDTFFPSPESSCDVKLVEKSFETDTNLNFQNLSVIGFRILLLKVAGFNLLMTLRLWSSRAKRSGSGVKQTLNFDLLKLAGDVESNPGPSRGGIHTMATYEVLCEVARKLGTDDREVVLFLLNVFIPQPTLAQLIGALRALKEEGRLTFPLLAECLFRAGRRDLLRDLLHLDPRFLERHLAGTMSYFSPYQLTVLHVDGELCARDIRSLIFLSKDTIGSRSTPQTFLHWVYCMENLDLLGPTDVDALMSMLRSLSRVDLQRQVQTLMGLHLSGPSHSQHYRHTP

SEQ ID NO: 14466 - protein, 839 aa, Artificial Sequence
  Synthetic Polypeptide
MALPVTALLLPLALLLHAARPACQVQLVESGGGLVQAGDSVTLSCTASGRTFSSYALAWFRQRPGKEREFVAGLRWGGPTNYADSVKDRFTISGDSAKHTMYLQMNSLKPEDTAVYYCGYNPGGWAVPSQYEYDSWGQGTQVTVSSGTGGGGSGGGGSGGGGSEFEADIYQTPRYLVIGTGKKITLECSQTMGHDKMYWYQQDPGMELHLIHYSYGVNSTEKGDLSSESTVSRIRTEHFPLTLESARPSHTSQYLCASSEARGLAEFTDTQYFGPGTRLTVLEIQNPDPAVYQLRDSKSSDKSVCLFTDFDSQTNVSQSKDSDVYITDKCVLDMRSMDFKSNSAVAWSNKSDFACANAFNNSIIPEDTFFPSPESSCDVKLVEKSFETDTNLNFQNLSVIGFRILLLKVAGFNLLMTLRLWSSRAKRSGSGVKQTLNFDLLKLAGDVESNPGPTSMDWIWRILFLVGAATGAHSGPMDPDLEIRAAFLRQRNTALRTEVAELEQEVQRLENEVSQYETRYGPLGGGKGSGGGGSGGGGSGGGGSFEQVQLQQPGAELVKPGASVKMSCKASGYAFSSYWINWMKQKPGQGLEWIGQIYPGDGTENRFSVNFQKAAKSFSLKISDSQLGDAAMYFCAYRSAVNARLMFGDGTQLVVKPNTREDLKNVFPPEVAVFEPSEAEISHTQKATLVCLATGFYPDHVELSWWVNGKEVHSGVCTDPQPLKEQPALNDSRYCLSSRLRVSATFWQNPRNHFRCQVQFYGLSENDEWTQDRAKPVTQIVSAEAWGRADCGFTSESYQQGVLSATILYEILLGKATLYAVLVSALVLMAMVKRKDSRG

SEQ ID NO: 14467 - protein, 1061 aa, Artificial Sequence
  Synthetic Polypeptide
MALPVTALLLPLALLLHAARPACQVQLVESGGGLVQAGDSVTLSCTASGRTFSSYALAWFRQRPGKEREFVAGLRWGGPTNYADSVKDRFTISGDSAKHTMYLQMNSLKPEDTAVYYCGYNPGGWAVPSQYEYDSWGQGTQVTVSSGTGGGGSGGGGSGGGGSEFEADIYQTPRYLVIGTGKKITLECSQTMGHDKMYWYQQDPGMELHLIHYSYGVNSTEKGDLSSESTVSRIRTEHFPLTLESARPSHTSQYLCASSEARGLAEFTDTQYFGPGTRLTVLEIQNPDPAVYQLRDSKSSDKSVCLFTDFDSQTNVSQSKDSDVYITDKCVLDMRSMDFKSNSAVAWSNKSDFACANAFNNSIIPEDTFFPSPESSCDVKLVEKSFETDTNLNFQNLSVIGFRILLLKVAGFNLLMTLRLWSSRAKRSGSGVKQTLNFDLLKLAGDVESNPGPTSMDWIWRILFLVGAATGAHSGPMDPDLEIRAAFLRQRNTALRTEVAELEQEVQRLENEVSQYETRYGPLGGGKGSGGGGSGGGGSGGGGSFEQVQLQQPGAELVKPGASVKMSCKASGYAFSSYWINWMKQKPGQGLEWIGQIYPGDGTENRFSVNFQKAAKSFSLKISDSQLGDAAMYFCAYRSAVNARLMFGDGTQLVVKPNTREDLKNVFPPEVAVFEPSEAEISHTQKATLVCLATGFYPDHVELSWWVNGKEVHSGVCTDPQPLKEQPALNDSRYCLSSRLRVSATFWQNPRNHFRCQVQFYGLSENDEWTQDRAKPVTQIVSAEAWGRADCGFTSESYQQGVLSATILYEILLGKATLYAVLVSALVLMAMVKRKDSRGRAKRSGSGATNFSLLKQAGDVEENPGPSRGGIHTMATYEVLCEVARKLGTDDREVVLFLLNVFIPQPTLAQLIGALRALKEEGRLTFPLLAECLFRAGRRDLLRDLLHLDPRFLERHLAGTMSYFSPYQLTVLHVDGELCARDIRSLIFLSKDTIGSRSTPQTFLHWVYCMENLDLLGPTDVDALMSMLRSLSRVDLQRQVQTLMGLHLSGPSHSQHYRHTP

SEQ ID NO: 14468 - protein, 1068 aa, Artificial Sequence
  Synthetic Polypeptide
MALPVTALLLPLALLLHAARPACQVQLVESGGGLVQAGDSVTLSCTASGRTFSSYALAWFRQRPGKEREFVAGLRWGGPTNYADSVKDRFTISGDSAKHTMYLQMNSLKPEDTAVYYCGYNPGGWAVPSQYEYDSWGQGTQVTVSSGTGGGGSGGGGSGGGGSEFEADIYQTPRYLVIGTGKKITLECSQTMGHDKMYWYQQDPGMELHLIHYSYGVNSTEKGDLSSESTVSRIRTEHFPLTLESARPSHTSQYLCASSEARGLAEFTDTQYFGPGTRLTVLEDLKNVFPPEVAVFEPSEAEISHTQKATLVCLATGFYPDHVELSWWVNGKEVHSGVSTDPQPLKEQPALNDSRYCLSSRLRVSATFWQNPRNHFRCQVQFYGLSENDEWTQDRAKPVTQIVSAEAWGRADCGFTSESYQQGVLSATILYEILLGKATLYAVLVSALVLMAMVKRKDSRGRAKRSGSGATNFSLLKQAGDVEENPGPTSMDWIWRILFLVGAATGAHSGPMDPDLEIRAAFLRQRNTALRTEVAELEQEVQRLENEVSQYETRYGPLGGGKGSGGGGSGGGGSGGGGSFEQVQLQQPGAELVKPGASVKMSCKASGYAFSSYWINWMKQKPGQGLEWIGQIYPGDGTENRFSVNFQKAAKSFSLKISDSQLGDAAMYFCAYRSAVNARLMFGDGTQLVVKPNTRIQNPDPAVYQLRDSKSSDKSVCLFTDFDSQTNVSQSKDSDVYITDKTVLDMRSMDFKSNSAVAWSNKSDFACANAFNNSIIPEDTFFPSPESSCDVKLVEKSFETDTNLNFQNLSVIGFRILLLKVAGFNLLMTLRLWSSRAKRSGSGVKQTLNFDLLKLAGDVESNPGPSRGHMTEYKPTVRLATRDDVPRAVRTLAAAFADYPATRHTVDPDRHIERVTELQELFLTRVGLDIGKVWVADDGAAVAVWTTPESVEAGAVFAEIGPRMAELSGSRLAAQQQMEGLLAPHRPKEPAWFLATVGVSPDHQGKGLGSAVVLPGVEAAERAGVPAFLETSAPRNLPFYERLGFTVTADVEVPEGPRTWCMTRKPGA

SEQ ID NO: 14469 - protein, 1150 aa, Artificial Sequence
  Synthetic Polypeptide
MALPVTALLLPLALLLHAARPACQVQLVESGGGLVQAGDSVTLSCTASGRTFSSYALAWFRQRPGKEREFVAGLRWGGPTNYADSVKDRFTISGDSAKHTMYLQMNSLKPEDTAVYYCGYNPGGWAVPSQYEYDSWGQGTQVTVSSGTGGGGSGGGGSGGGGSEFEADIYQTPRYLVIGTGKKITLECSQTMGHDKMYWYQQDPGMELHLIHYSYGVNSTEKGDLSSESTVSRIRTEHFPLTLESARPSHTSQYLCASSEARGLAEFTDTQYFGPGTRLTVLEDLKNVFPPEVAVFEPSEAEISHTQKATLVCLATGFYPDHVELSWWVNGKEVHSGVSTDPQPLKEQPALNDSRYCLSSRLRVSATFWQNPRNHFRCQVQFYGLSENDEWTQDRAKPVTQIVSAEAWGRADCGFTSESYQQGVLSATILYEILLGKATLYAVLVSALVLMAMVKRKDSRGRAKRSGSGATNFSLLKQAGDVEENPGPTSMDWIWRILFLVGAATGAHSGPMDPDLEIRAAFLRQRNTALRTEVAELEQEVQRLENEVSQYETRYGPLGGGKGSGGGGSGGGGSGGGGSFEQVQLQQPGAELVKPGASVKMSCKASGYAFSSYWINWMKQKPGQGLEWIGQIYPGDGTENRFSVNFQKAAKSFSLKISDSQLGDAAMYFCAYRSAVNARLMFGDGTQLVVKPNTREQKLISEEDGSGTPFPSLAPPIMLLVDGKQQMVVVCLVLDVAPPGLDSPIWFSAGNGSALDAFTYGPSPATDGTWTNLAHLSLPSEELASWEPLVCHTGPGAEGHSRSTQPMHLSGEASTARTCPQEPLRGTPGGALWLGVLRLLLFKLLLFDLLLTCSCLCDPAGPLPSPATTTRLRALGSHRLHPATETGGREATSSPRPQPRDRRWGDTPPGRKPGSPVRAKRSGSGVKQTLNFDLLKLAGDVESNPGPSRGHMTEYKPTVRLATRDDVPRAVRTLAAAFADYPATRHTVDPDRHIERVTELQELFLTRVGLDIGKVWVADDGAAVAVWTTPESVEAGAVFAEIGPRMAELSGSRLAAQQQMEGLLAPHRPKEPAWFLATVGVSPDHQGKGLGSAVVLPGVEAAERAGVPAFLETSAPRNLPFYERLGFTVTADVEVPEGPRTWCMTRKPGA

SEQ ID NO: 14470 - protein, 1105 aa, Artificial Sequence
  Synthetic Polypeptide
MALPVTALLLPLALLLHAARPACQVQLVESGGGLVQAGDSVTLSCTASGRTFSSYALAWFRQRPGKEREFVAGLRWGGPTNYADSVKDRFTISGDSAKHTMYLQMNSLKPEDTAVYYCGYNPGGWAVPSQYEYDSWGQGTQVTVSSGTGGGGSGGGGSGGGGSEFEADIYQTPRYLVIGTGKKITLECSQTMGHDKMYWYQQDPGMELHLIHYSYGVNSTEKGDLSSESTVSRIRTEHFPLTLESARPSHTSQYLCASSEARGLAEFTDTQYFGPGTRLTVLEGKPIPNPLLGLDSTGSGDKQLDADVSPKPTIFLPSIAETKLQKAGTYLCLLEKFFPDVIKIHWQEKKSNTILGSQEGNTMKTNDTYMKFSWLTVPEKSLDKEHRCIVRHENNKNGVDQEIIFPPIKTDVITMDPKDNCSKDANDTLLLQLTNTSAYYMYLLLLLKSVVYFAIITCCLLRRTAFCCNGEKSRAKRSGSGATNFSLLKQAGDVEENPGPTSMDWIWRILFLVGAATGAHSGPMDPDLEIRAAFLRQRNTALRTEVAELEQEVQRLENEVSQYETRYGPLGGGKGSGGGGSGGGGSGGGGSFEQVQLQQPGAELVKPGASVKMSCKASGYAFSSYWINWMKQKPGQGLEWIGQIYPGDGTENRFSVNFQKAAKSFSLKISDSQLGDAAMYFCAYRSAVNARLMFGDGTQLVVKPNTREQKLISEEDGSGSQPHTKPSVFVMKNGTNVACLVKEFYPKDIRINLVSSKKITEFDPAIVISPSGKYNAVKLGKYEDSNSVTCSVQHDNKTVHSTDFEVKTDSTDHVKPKETENTKQPSKSCHKPKAIVHTEKVNMMSLTVLGLRMLFAKTVAVNFLLTAKLFFLRAKRSGSGVKQTLNFDLLKLAGDVESNPGPSRGHMTEYKPTVRLATRDDVPRAVRTLAAAFADYPATRHTVDPDRHIERVTELQELFLTRVGLDIGKVWVADDGAAVAVWTTPESVEAGAVFAEIGPRMAELSGSRLAAQQQMEGLLAPHRPKEPAWFLATVGVSPDHQGKGLGSAVVLPGVEAAERAGVPAFLETSAPRNLPFYERLGFTVTADVEVPEGPRTWCMTRKPGA

SEQ ID NO: 14471 - protein, 843 aa, Artificial Sequence
  Synthetic Polypeptide
MALPVTALLLPLALLLHAARPACQVQLVESGGGLVQAGDSVTLSCTASGRTFSSYALAWFRQRPGKEREFVAGLRWGGPTNYADSVKDRFTISGDSAKHTMYLQMNSLKPEDTAVYYCGYNPGGWAVPSQYEYDSWGQGTQVTVSSGTGGGGSGGGGSGGGGSEFEADIYQTPRYLVIGTGKKITLECSQTMGHDKMYWYQQDPGMELHLIHYSYGVNSTEKGDLSSESTVSRIRTEHFPLTLESARPSHTSQYLCASSEARGLAEFTDTQYFGPGTRLTVLESQPHTKPSVFVMKNGTNVACLVKEFYPKDIRINLVSSKKITEFDPAIVISPSGKYNAVKLGKYEDSNSVTCSVQHDNKTVHSTDFEVKTDSTDHVKPKETENTKQPSKSCHKPKAIVHTEKVNMMSLTVLGLRMLFAKTVAVNFLLTAKLFFLRAKRSGSGATNFSLLKQAGDVEENPGPTSMDWIWRILFLVGAATGAHSGPMDPDLEIRAAFLRQRNTALRTEVAELEQEVQRLENEVSQYETRYGPLGGGKGSGGGGSGGGGSGGGGSFEQVQLQQPGAELVKPGASVKMSCKASGYAFSSYWINWMKQKPGQGLEWIGQIYPGDGTENRFSVNFQKAAKSFSLKISDSQLGDAAMYFCAYRSAVNARLMFGDGTQLVVKPNTRDKQLDADVSPKPTIFLPSIAETKLQKAGTYLCLLEKFFPDVIKIHWQEKKSNTILGSQEGNTMKTNDTYMKFSWLTVPEKSLDKEHRCIVRHENNKNGVDQEIIFPPIKTDVITMDPKDNCSKDANDTLLLQLTNTSAYYMYLLLLLKSVVYFAIITCCLLRRTAFCCNGEKS

SEQ ID NO: 14472 - protein, 1245 aa, Artificial Sequence
  Synthetic Polypeptide
MALPVTALLLPLALLLHAARPACQVQLVESGGGLVQAGDSVTLSCTASGRTFSSYALAWFRQRPGKEREFVAGLRWGGPTNYADSVKDRFTISGDSAKHTMYLQMNSLKPEDTAVYYCGYNPGGWAVPSQYEYDSWGQGTQVTVSSGTGGGGSGGGGSGGGGSEFEADIYQTPRYLVIGTGKKITLECSQTMGHDKMYWYQQDPGMELHLIHYSYGVNSTEKGDLSSESTVSRIRTEHFPLTLESARPSHTSQYLCASSEARGLAEFTDTQYFGPGTRLTVGQPKANPTVTLFPPSSEELQANKATLVCLISDFYPGAVTVAWKADGSPVKAGVETTKPSKQSNNKYAASSYLSLTPEQWKSHRSYSCQVTHEGSTVEKTVAPTECSGSQSFGLLDPKLCYLLDGILFIYGVILTALFLRVKFSRSADAPAYQQGQNQLYNELNLGRREEYDVLDKRRGRDPEMGGKPQRRKNPQEGLYNELQKDKMAEAYSEIGMKGERRRGKGHDGLYQGLSTATKDTYDALHMQALPPRRAKRSGSGATNFSLLKQAGDVEENPGPTSMDWIWRILFLVGAATGAHSGPMDPDLEIRAAFLRQRNTALRTEVAELEQEVQRLENEVSQYETRYGPLGGGKGSGGGGSGGGGSGGGGSFEQVQLQQPGAELVKPGASVKMSCKASGYAFSSYWINWMKQKPGQGLEWIGQIYPGDGTENRFSVNFQKAAKSFSLKISDSQLGDAAMYFCAYRSAVNARLMFGDGTQLVVKPNASTKGPSVFPLAPSSKSTSGGTAALGCLVKDYFPEPVTVSWNSGALTSGVHTFPAVLQSSGLYSLSSVVTVPSSSLGTQTYICNVNHKPSNTKVDKRVEPKSCGTQSFGLLDPKLCYLLDGILFIYGVILTALFLRVKFSRSADAPAYQQGQNQLYNELNLGRREEYDVLDKRRGRDPEMGGKPQRRKNPQEGLYNELQKDKMAEAYSEIGMKGERRRGKGHDGLYQGLSTATKDTYDALHMQALPPRRAKRSGSGVKQTLNFDLLKLAGDVESNPGPSRGHMTEYKPTVRLATRDDVPRAVRTLAAAFADYPATRHTVDPDRHIERVTELQELFLTRVGLDIGKVWVADDGAAVAVWTTPESVEAGAVFAEIGPRMAELSGSRLAAQQQMEGLLAPHRPKEPAWFLATVGVSPDHQGKGLGSAVVLPGVEAAERAGVPAFLETSAPRNLPFYERLGFTVTADVEVPEGPRTWCMTRKPGA

SEQ ID NO: 14473 - protein, 1031 aa, Artificial Sequence
  Synthetic Polypeptide
MALPVTALLLPLALLLHAARPACQVQLVESGGGLVQAGDSVTLSCTASGRTFSSYALAWFRQRPGKEREFVAGLRWGGPTNYADSVKDRFTISGDSAKHTMYLQMNSLKPEDTAVYYCGYNPGGWAVPSQYEYDSWGQGTQVTVSSGTGGGGSGGGGSGGGGSEFEADIYQTPRYLVIGTGKKITLECSQTMGHDKMYWYQQDPGMELHLIHYSYGVNSTEKGDLSSESTVSRIRTEHFPLTLESARPSHTSQYLCASSEARGLAEFTDTQYFGPGTRLTVLEDLKNVFPPEVAVFEPSEAEISHTQKATLVCLATGFYPDHVELSWWVNGKEVHSGVSTDPQPLKEQPALNDSRYCLSSRLRVSATFWQNPRNHFRCQVQFYGLSENDEWTQDRAKPVTQIVSAEAWGRADCGSQSFGLLDPKLCYLLDGILFIYGVILTALFLRVKFSRSADAPAYQQGQNQLYNELNLGRREEYDVLDKRRGRDPEMGGKPQRRKNPQEGLYNELQKDKMAEAYSEIGMKGERRRGKGHDGLYQGLSTATKDTYDALHMQALPPRRAKRSGSGATNFSLLKQAGDVEENPGPTSMDWIWRILFLVGAATGAHSGPMDPDLEIRAAFLRQRNTALRTEVAELEQEVQRLENEVSQYETRYGPLGGGKGSGGGGSGGGGSGGGGSFEQVQLQQPGAELVKPGASVKMSCKASGYAFSSYWINWMKQKPGQGLEWIGQIYPGDGTENRFSVNFQKAAKSFSLKISDSQLGDAAMYFCAYRSAVNARLMFGDGTQLVVKPNTRIQNPDPAVYQLRDSKSSDKSVCLFTDFDSQTNVSQSKDSDVYITDKTVLDMRSMDFKSNSAVAWSNKSDFACANAFNNSIIPEDTFFPSPESSCGTQSFGLLDPKLCYLLDGILFIYGVILTALFLRVKFSRSADAPAYQQGQNQLYNELNLGRREEYDVLDKRRGRDPEMGGKPQRRKNPQEGLYNELQKDKMAEAYSEIGMKGERRRGKGHDGLYQGLSTATKDTYDALHMQALPPR

SEQ ID NO: 14474 - protein, 1031 aa, Artificial Sequence
  Synthetic Polypeptide
MALPVTALLLPLALLLHAARPACQVQLVESGGGLVQAGDSVTLSCTASGRTFSSYALAWFRQRPGKEREFVAGLRWGGPTNYADSVKDRFTISGDSAKHTMYLQMNSLKPEDTAVYYCGYNPGGWAVPSQYEYDSWGQGTQVTVSSGTGGGGSGGGGSGGGGSEFEADIYQTPRYLVIGTGKKITLECSQTMGHDKMYWYQQDPGMELHLIHYSYGVNSTEKGDLSSESTVSRIRTEHFPLTLESARPSHTSQYLCASSEARGLAEFTDTQYFGPGTRLTVLEDLKNVFPPEVAVFEPSKAEIAHTQKATLVCLATGFYPDHVELSWWVNGKEVHSGVCTDPQPLKEQPALNDSRYCLSSRLRVSATFWQNPRNHFRCQVQFYGLSENDEWTQDRAKPVTQIVSAEAWGRADCGSQSFGLLDPKLCYLLDGILFIYGVILTALFLRVKFSRSADAPAYQQGQNQLYNELNLGRREEYDVLDKRRGRDPEMGGKPQRRKNPQEGLYNELQKDKMAEAYSEIGMKGERRRGKGHDGLYQGLSTATKDTYDALHMQALPPRRAKRSGSGATNFSLLKQAGDVEENPGPTSMDWIWRILFLVGAATGAHSGPMDPDLEIRAAFLRQRNTALRTEVAELEQEVQRLENEVSQYETRYGPLGGGKGSGGGGSGGGGSGGGGSFEQVQLQQPGAELVKPGASVKMSCKASGYAFSSYWINWMKQKPGQGLEWIGQIYPGDGTENRFSVNFQKAAKSFSLKISDSQLGDAAMYFCAYRSAVNARLMFGDGTQLVVKPNTRIQNPDPAVYQLRDSKSSDKSVCLFTDFDSQTNVSQSKDSDVYITDKCVLDMRSMDFKSNSAVAWSNKSDFACANAFNNSIIPEDTFFPSSDVPCGTQSFGLLDPKLCYLLDGILFIYGVILTALFLRVKFSRSADAPAYQQGQNQLYNELNLGRREEYDVLDKRRGRDPEMGGKPQRRKNPQEGLYNELQKDKMAEAYSEIGMKGERRRGKGHDGLYQGLSTATKDTYDALHMQALPPR

SEQ ID NO: 14475 - protein, 1102 aa, Artificial Sequence
  Synthetic Polypeptide
MALPVTALLLPLALLLHAARPACQVQLVESGGGLVQAGDSVTLSCTASGRTFSSYALAWFRQRPGKEREFVAGLRWGGPTNYADSVKDRFTISGDSAKHTMYLQMNSLKPEDTAVYYCGYNPGGWAVPSQYEYDSWGQGTQVTVSSGTGGGGSGGGGSGGGGSEFEADIYQTPRYLVIGTGKKITLECSQTMGHDKMYWYQQDPGMELHLIHYSYGVNSTEKGDLSSESTVSRIRTEHFPLTLESARPSHTSQYLCASSEARGLAEFTDTQYFGPGTRLTVLEGKPIPNPLLGLDSTGSGEDLKNVFPPEVAVFEPSEAEISHTQKATLVCLATGFYPDHVELSWWVNGKEVHSGVSTDPQPLKEQPALNDSRYCLSSRLRVSATFWQNPRNHFRCQVQFYGLSENDEWTQDRAKPVTQIVSAEAWGRADCGSQSFGLLDPKLCYLLDGILFIYGVILTALFLRVKFSRSADAPAYQQGQNQLYNELNLGRREEYDVLDKRRGRDPEMGGKPQRRKNPQEGLYNELQKDKMAEAYSEIGMKGERRRGKGHDGLYQGLSTATKDTYDALHMQALPPRRAKRSGSGATNFSLLKQAGDVEENPGPTSMDWIWRILFLVGAATGAHSGPMDPDLEIRAAFLRQRNTALRTEVAELEQEVQRLENEVSQYETRYGPLGGGKGSGGGGSGGGGSGGGGSFEQVQLQQPGAELVKPGASVKMSCKASGYAFSSYWINWMKQKPGQGLEWIGQIYPGDGTENRFSVNFQKAAKSFSLKISDSQLGDAAMYFCAYRSAVNARLMFGDGTQLVVKPNTREQKLISEEDGSGIQNPDPAVYQLRDSKSSDKSVCLFTDFDSQTNVSQSKDSDVYITDKTVLDMRSMDFKSNSAVAWSNKSDFACANAFNNSIIPEDTFFPSPESSCGTQSFGLLDPKLCYLLDGILFIYGVILTALFLRSKRSRLLHSDYMNMTPRRPGPTRKHYQPYAPPRDFAAYRSRVKFSRSADAPAYQQGQNQLYNELNLGRREEYDVLDKRRGRDPEMGGKPQRRKNPQEGLYNELQKDKMAEAYSEIGMKGERRRGKGHDGLYQGLSTATKDTYDALHMQALPPR

SEQ ID NO: 14476 - protein, 1143 aa, Artificial Sequence
  Synthetic Polypeptide
MALPVTALLLPLALLLHAARPACQVQLVESGGGLVQAGDSVTLSCTASGRTFSSYALAWFRQRPGKEREFVAGLRWGGPTNYADSVKDRFTISGDSAKHTMYLQMNSLKPEDTAVYYCGYNPGGWAVPSQYEYDSWGQGTQVTVSSGTGGGGSGGGGSGGGGSEFEADIYQTPRYLVIGTGKKITLECSQTMGHDKMYWYQQDPGMELHLIHYSYGVNSTEKGDLSSESTVSRIRTEHFPLTLESARPSHTSQYLCASSEARGLAEFTDTQYFGPGTRLTVLEGKPIPNPLLGLDSTGSGEDLKNVFPPEVAVFEPSEAEISHTQKATLVCLATGFYPDHVELSWWVNGKEVHSGVSTDPQPLKEQPALNDSRYCLSSRLRVSATFWQNPRNHFRCQVQFYGLSENDEWTQDRAKPVTQIVSAEAWGRADCGSQSFGLLDPKLCYLLDGILFIYGVILTALFLRSKRSRLLHSDYMNMTPRRPGPTRKHYQPYAPPRDFAAYRSRVKFSRSADAPAYQQGQNQLYNELNLGRREEYDVLDKRRGRDPEMGGKPQRRKNPQEGLYNELQKDKMAEAYSEIGMKGERRRGKGHDGLYQGLSTATKDTYDALHMQALPPRRAKRSGSGATNFSLLKQAGDVEENPGPTSMDWIWRILFLVGAATGAHSGPMDPDLEIRAAFLRQRNTALRTEVAELEQEVQRLENEVSQYETRYGPLGGGKGSGGGGSGGGGSGGGGSFEQVQLQQPGAELVKPGASVKMSCKASGYAFSSYWINWMKQKPGQGLEWIGQIYPGDGTENRFSVNFQKAAKSFSLKISDSQLGDAAMYFCAYRSAVNARLMFGDGTQLVVKPNTREQKLISEEDGSGIQNPDPAVYQLRDSKSSDKSVCLFTDFDSQTNVSQSKDSDVYITDKTVLDMRSMDFKSNSAVAWSNKSDFACANAFNNSIIPEDTFFPSPESSCGTQSFGLLDPKLCYLLDGILFIYGVILTALFLRSKRSRLLHSDYMNMTPRRPGPTRKHYQPYAPPRDFAAYRSRVKFSRSADAPAYQQGQNQLYNELNLGRREEYDVLDKRRGRDPEMGGKPQRRKNPQEGLYNELQKDKMAEAYSEIGMKGERRRGKGHDGLYQGLSTATKDTYDALHMQALPPR

SEQ ID NO: 14477 - protein, 1104 aa, Artificial Sequence
  Synthetic Polypeptide
MALPVTALLLPLALLLHAARPACQVQLVESGGGLVQAGDSVTLSCTASGRTFSSYALAWFRQRPGKEREFVAGLRWGGPTNYADSVKDRFTISGDSAKHTMYLQMNSLKPEDTAVYYCGYNPGGWAVPSQYEYDSWGQGTQVTVSSGTGGGGSGGGGSGGGGSEFEADIYQTPRYLVIGTGKKITLECSQTMGHDKMYWYQQDPGMELHLIHYSYGVNSTEKGDLSSESTVSRIRTEHFPLTLESARPSHTSQYLCASSEARGLAEFTDTQYFGPGTRLTVLEGKPIPNPLLGLDSTGSGEDLKNVFPPEVAVFEPSEAEISHTQKATLVCLATGFYPDHVELSWWVNGKEVHSGVSTDPQPLKEQPALNDSRYCLSSRLRVSATFWQNPRNHFRCQVQFYGLSENDEWTQDRAKPVTQIVSAEAWGRADCGSQSFGLLDPKLCYLLDGILFIYGVILTALFLRVKFSRSADAPAYQQGQNQLYNELNLGRREEYDVLDKRRGRDPEMGGKPQRRKNPQEGLYNELQKDKMAEAYSEIGMKGERRRGKGHDGLYQGLSTATKDTYDALHMQALPPRRAKRSGSGATNFSLLKQAGDVEENPGPTSMDWIWRILFLVGAATGAHSGPMDPDLEIRAAFLRQRNTALRTEVAELEQEVQRLENEVSQYETRYGPLGGGKGSGGGGSGGGGSGGGGSFEQVQLQQPGAELVKPGASVKMSCKASGYAFSSYWINWMKQKPGQGLEWIGQIYPGDGTENRFSVNFQKAAKSFSLKISDSQLGDAAMYFCAYRSAVNARLMFGDGTQLVVKPNTREQKLISEEDLGSGIQNPDPAVYQLRDSKSSDKSVCLFTDFDSQTNVSQSKDSDVYITDKTVLDMRSMDFKSNSAVAWSNKSDFACANAFNNSIIPEDTFFPSPESSCGTQSFGLLDPKLCYLLDGILFIYGVILTALFLKRGRKKLLYIFKQPFMRPVQTTQEEDGCSCRFPEEEEGGCELRVKFSRSADAPAYQQGQNQLYNELNLGRREEYDVLDKRRGRDPEMGGKPQRRKNPQEGLYNELQKDKMAEAYSEIGMKGERRRGKGHDGLYQGLSTATKDTYDALHMQALPPR

SEQ ID NO: 14478 - protein, 1146 aa, Artificial Sequence
  Synthetic Polypeptide
MALPVTALLLPLALLLHAARPACQVQLVESGGGLVQAGDSVTLSCTASGRTFSSYALAWFRQRPGKEREFVAGLRWGGPTNYADSVKDRFTISGDSAKHTMYLQMNSLKPEDTAVYYCGYNPGGWAVPSQYEYDSWGQGTQVTVSSGTGGGGSGGGGSGGGGSEFEADIYQTPRYLVIGTGKKITLECSQTMGHDKMYWYQQDPGMELHLIHYSYGVNSTEKGDLSSESTVSRIRTEHFPLTLESARPSHTSQYLCASSEARGLAEFTDTQYFGPGTRLTVLEGKPIPNPLLGLDSTGSGEDLKNVFPPEVAVFEPSEAEISHTQKATLVCLATGFYPDHVELSWWVNGKEVHSGVSTDPQPLKEQPALNDSRYCLSSRLRVSATFWQNPRNHFRCQVQFYGLSENDEWTQDRAKPVTQIVSAEAWGRADCGSQSFGLLDPKLCYLLDGILFIYGVILTALFLKRGRKKLLYIFKQPFMRPVQTTQEEDGCSCRFPEEEEGGCELRVKFSRSADAPAYQQGQNQLYNELNLGRREEYDVLDKRRGRDPEMGGKPQRRKNPQEGLYNELQKDKMAEAYSEIGMKGERRRGKGHDGLYQGLSTATKDTYDALHMQALPPRRAKRSGSGATNFSLLKQAGDVEENPGPTSMDWIWRILFLVGAATGAHSGPMDPDLEIRAAFLRQRNTALRTEVAELEQEVQRLENEVSQYETRYGPLGGGKGSGGGGSGGGGSGGGGSFEQVQLQQPGAELVKPGASVKMSCKASGYAFSSYWINWMKQKPGQGLEWIGQIYPGDGTENRFSVNFQKAAKSFSLKISDSQLGDAAMYFCAYRSAVNARLMFGDGTQLVVKPNTREQKLISEEDLGSGIQNPDPAVYQLRDSKSSDKSVCLFTDFDSQTNVSQSKDSDVYITDKTVLDMRSMDFKSNSAVAWSNKSDFACANAFNNSIIPEDTFFPSPESSCGTQSFGLLDPKLCYLLDGILFIYGVILTALFLKRGRKKLLYIFKQPFMRPVQTTQEEDGCSCRFPEEEEGGCELRVKFSRSADAPAYQQGQNQLYNELNLGRREEYDVLDKRRGRDPEMGGKPQRRKNPQEGLYNELQKDKMAEAYSEIGMKGERRRGKGHDGLYQGLSTATKDTYDALHMQALPPR

SEQ ID NO: 14479 - protein, 1036 aa, Artificial Sequence
  Synthetic Polypeptide
MALPVTALLLPLALLLHAARPACQVQLVESGGGLVQAGDSVTLSCTASGRTFSSYALAWFRQRPGKEREFVAGLRWGGPTNYADSVKDRFTISGDSAKHTMYLQMNSLKPEDTAVYYCGYNPGGWAVPSQYEYDSWGQGTQVTVSSGTGGGGSGGGGSGGGGSEFEADIYQTPRYLVIGTGKKITLECSQTMGHDKMYWYQQDPGMELHLIHYSYGVNSTEKGDLSSESTVSRIRTEHFPLTLESARPSHTSQYLCASSEARGLAEFTDTQYFGPGTRLTVLEQSFGLLDPKLCYLLDGILFIYGVILTALFLRVKFSRSADAPAYQQGQNQLYNELNLGRREEYDVLDKRRGRDPEMGGKPQRRKNPQEGLYNELQKDKMAEAYSEIGMKGERRRGKGHDGLYQGLSTATKDTYDALHMQALPPRRAKRSGSGATNFSLLKQAGDVEENPGPTSMDWIWRILFLVGAATGAHSGPMDPDLEIRAAFLRQRNTALRTEVAELEQEVQRLENEVSQYETRYGPLGGGKGSGGGGSGGGGSGGGGSFEQVQLQQPGAELVKPGASVKMSCKASGYAFSSYWINWMKQKPGQGLEWIGQIYPGDGTENRFSVNFQKAAKSFSLKISDSQLGDAAMYFCAYRSAVNARLMFGDGTQLVVKPNTRQSFGLLDPKLCYLLDGILFIYGVILTALFLRVKFSRSADAPAYQQGQNQLYNELNLGRREEYDVLDKRRGRDPEMGGKPQRRKNPQEGLYNELQKDKMAEAYSEIGMKGERRRGKGHDGLYQGLSTATKDTYDALHMQALPPRRAKRSGSGVKQTLNFDLLKLAGDVESNPGPSRGHMTEYKPTVRLATRDDVPRAVRTLAAAFADYPATRHTVDPDRHIERVTELQELFLTRVGLDIGKVWVADDGAAVAVWTTPESVEAGAVFAEIGPRMAELSGSRLAAQQQMEGLLAPHRPKEPAWFLATVGVSPDHQGKGLGSAVVLPGVEAAERAGVPAFLETSAPRNLPFYERLGFTVTADVEVPEGPRTWCMTRKPGA

SEQ ID NO: 14480 - protein, 861 aa, Artificial Sequence
  Synthetic Polypeptide
MALPVTALLLPLALLLHAARPACQVQLVESGGGLVQAGDSVTLSCTASGRTFSSYALAWFRQRPGKEREFVAGLRWGGPTNYADSVKDRFTISGDSAKHTMYLQMNSLKPEDTAVYYCGYNPGGWAVPSQYEYDSWGQGTQVTVSSGTGGGGSGGGGSGGGGSEFEADIYQTPRYLVIGTGKKITLECSQTMGHDKMYWYQQDPGMELHLIHYSYGVNSTEKGDLSSESTVSRIRTEHFPLTLESARPSHTSQYLCASSEARGLAEFTDTQYFGPGTRLTVLEGQPKANPTVTLFPPSSEELQANKATLVCLISDFYPGAVTVAWKADGSPVKAGVETTKPSKQSNNKYAASSYLSLTPEQWKSHRSYSCQVTHEGSTVEKTVAPTECSPIKTDVITMDPKDNCSKDANDTLLLQLTNTSAYYMYLLLLLKSVVYFAIITCCLLRRTAFCCNGEKSRAKRSGSGATNFSLLKQAGDVEENPGPTSMDWIWRILFLVGAATGAHSGPMDPDLEIRAAFLRQRNTALRTEVAELEQEVQRLENEVSQYETRYGPLGGGKGSGGGGSGGGGSGGGGSFEQVQLQQPGAELVKPGASVKMSCKASGYAFSSYWINWMKQKPGQGLEWIGQIYPGDGTENRFSVNFQKAAKSFSLKISDSQLGDAAMYFCAYRSAVNARLMFGDGTQLVVKPNTRASTKGPSVFPLAPSSKSTSGGTAALGCLVKDYFPEPVTVSWNSGALTSGVHTFPAVLQSSGLYSLSSVVTVPSSSLGTQTYICNVNHKPSNTKVDKRVEPKSCEVKTDSTDHVKPKETENTKQPSKSCHKPKAIVHTEKVNMMSLTVLGLRMLFAKTVAVNFLLTAKLFFL

SEQ ID NO: 14481 - protein, 839 aa, Artificial Sequence
  Synthetic Polypeptide
MALPVTALLLPLALLLHAARPACQVQLVESGGGLVQAGDSVTLSCTASGRTFSSYALAWFRQRPGKEREFVAGLRWGGPTNYADSVKDRFTISGDSAKHTMYLQMNSLKPEDTAVYYCGYNPGGWAVPSQYEYDSWGQGTQVTVSSGTGGGGSGGGGSGGGGSEFEADIYQTPRYLVIGTGKKITLECSQTMGHDKMYWYQQDPGMELHLIHYSYGVNSTEKGDLSSESTVSRIRTEHFPLTLESARPSHTSQYLCASSEARGLAEFTDTQYFGPGTRLTVLEGQPKANPTVTLFPPSSEELQANKATLVCLISDFYPGAVTVAWKADGSPVKAGVETTKPSKQSNNKYAASSYLSLTPEQWKSHRSYSCQVTHEGSTVEKTVAPTECSGRADCGITSASYHQGVLSATILYEILLGKATLYAVLVSALVLMAMVKRKDSRGRAKRSGSGATNFSLLKQAGDVEENPGPTSMDWIWRILFLVGAATGAHSGPMDPDLEIRAAFLRQRNTALRTEVAELEQEVQRLENEVSQYETRYGPLGGGKGSGGGGSGGGGSGGGGSFEQVQLQQPGAELVKPGASVKMSCKASGYAFSSYWINWMKQKPGQGLEWIGQIYPGDGTENRFSVNFQKAAKSFSLKISDSQLGDAAMYFCAYRSAVNARLMFGDGTQLVVKPNTRASTKGPSVFPLAPSSKSTSGGTAALGCLVKDYFPEPVTVSWNSGALTSGVHTFPAVLQSSGLYSLSSVVTVPSSSLGTQTYICNVNHKPSNTKVDKRVEPKSCIPEDTFFPSSDVPCDVKLVEKSFETDTNLNFQNLSVIGFRILLLKVAGFNLLMTLRLWSS

SEQ ID NO: 14482 - protein, 839 aa, Artificial Sequence
  Synthetic Polypeptide
MALPVTALLLPLALLLHAARPACQVQLVESGGGLVQAGDSVTLSCTASGRTFSSYALAWFRQRPGKEREFVAGLRWGGPTNYADSVKDRFTISGDSAKHTMYLQMNSLKPEDTAVYYCGYNPGGWAVPSQYEYDSWGQGTQVTVSSGTGGGGSGGGGSGGGGSEFEADIYQTPRYLVIGTGKKITLECSQTMGHDKMYWYQQDPGMELHLIHYSYGVNSTEKGDLSSESTVSRIRTEHFPLTLESARPSHTSQYLCASSEARGLAEFTDTQYFGPGTRLTVLEGQPKANPTVTLFPPSSEELQANKATLVCLISDFYPGAVTVAWKADGSPVKAGVETTKPSKQSNNKYAASSYLSLTPEQWKSHRSYSCQVTHEGSTVEKTVAPTECSGRADCGFTSESYQQGVLSATILYEILLGKATLYAVLVSALVLMAMVKRKDSRGRAKRSGSGATNFSLLKQAGDVEENPGPTSMDWIWRILFLVGAATGAHSGPMDPDLEIRAAFLRQRNTALRTEVAELEQEVQRLENEVSQYETRYGPLGGGKGSGGGGSGGGGSGGGGSFEQVQLQQPGAELVKPGASVKMSCKASGYAFSSYWINWMKQKPGQGLEWIGQIYPGDGTENRFSVNFQKAAKSFSLKISDSQLGDAAMYFCAYRSAVNARLMFGDGTQLVVKPNTRASTKGPSVFPLAPSSKSTSGGTAALGCLVKDYFPEPVTVSWNSGALTSGVHTFPAVLQSSGLYSLSSVVTVPSSSLGTQTYICNVNHKPSNTKVDKRVEPKSCIPEDTFFPSPESSCDVKLVEKSFETDTNLNFQNLSVIGFRILLLKVAGFNLLMTLRLWSS

SEQ ID NO: 14483 - protein, 639 aa, Artificial Sequence; identical to SEQ ID NO: 14189
  Synthetic Polypeptide

SEQ ID NO: 14484 - protein, 992 aa, Artificial Sequence; identical to SEQ ID NO: 14190
  Synthetic Polypeptide

SEQ ID NO: 14485 - protein, 991 aa, Artificial Sequence; identical to SEQ ID NO: 14191
  Synthetic Polypeptide

SEQ ID NO: 14486 - protein, 991 aa, Artificial Sequence; identical to SEQ ID NO: 14192
  Synthetic Polypeptide

SEQ ID NO: 14487 - protein, 758 aa, Artificial Sequence; identical to SEQ ID NO: 14193
  Synthetic Polypeptide

SEQ ID NO: 14488 - protein, 983 aa, Artificial Sequence; identical to SEQ ID NO: 14194
  Synthetic Polypeptide

SEQ ID NO: 14489 - protein, 762 aa, Artificial Sequence; identical to SEQ ID NO: 14195
  Synthetic Polypeptide

SEQ ID NO: 14490 - protein, 984 aa, Artificial Sequence; identical to SEQ ID NO: 14196
  Synthetic Polypeptide

SEQ ID NO: 14491 - protein, 991 aa, Artificial Sequence; identical to SEQ ID NO: 14197
  Synthetic Polypeptide

SEQ ID NO: 14492 - protein, 1073 aa, Artificial Sequence; identical to SEQ ID NO: 14198
  Synthetic Polypeptide

SEQ ID NO: 14493 - protein, 1028 aa, Artificial Sequence; identical to SEQ ID NO: 14199
  Synthetic Polypeptide

SEQ ID NO: 14494 - protein, 766 aa, Artificial Sequence; identical to SEQ ID NO: 14200
  Synthetic Polypeptide

SEQ ID NO: 14495 - protein, 1168 aa, Artificial Sequence; identical to SEQ ID NO: 14201
  Synthetic Polypeptide

SEQ ID NO: 14496 - protein, 954 aa, Artificial Sequence; identical to SEQ ID NO: 14202
  Synthetic Polypeptide

SEQ ID NO: 14497 - protein, 954 aa, Artificial Sequence; identical to SEQ ID NO: 14203
  Synthetic Polypeptide

SEQ ID NO: 14498 - protein, 1025 aa, Artificial Sequence; identical to SEQ ID NO: 14204
  Synthetic Polypeptide

SEQ ID NO: 14499 - protein, 1066 aa, Artificial Sequence; identical to SEQ ID NO: 14205
  Synthetic Polypeptide

SEQ ID NO: 14500 - protein, 1027 aa, Artificial Sequence; identical to SEQ ID NO: 14206
  Synthetic Polypeptide

SEQ ID NO: 14501 - protein, 1069 aa, Artificial Sequence; identical to SEQ ID NO: 14207
  Synthetic Polypeptide

SEQ ID NO: 14502 - protein, 959 aa, Artificial Sequence; identical to SEQ ID NO: 14208
  Synthetic Polypeptide

SEQ ID NO: 14503 - protein, 784 aa, Artificial Sequence; identical to SEQ ID NO: 14209
  Synthetic Polypeptide

SEQ ID NO: 14504 - protein, 762 aa, Artificial Sequence; identical to SEQ ID NO: 14210
  Synthetic Polypeptide

SEQ ID NO: 14505 - protein, 762 aa, Artificial Sequence; identical to SEQ ID NO: 14211
  Synthetic Polypeptide

SEQ ID NO: 14506 - protein, 592 aa, Artificial Sequence; identical to SEQ ID NO: 14212
  Synthetic Polypeptide

SEQ ID NO: 14507 - protein, 557 aa, Artificial Sequence; identical to SEQ ID NO: 14213
  Synthetic Polypeptide

SEQ ID NO: 14508 - protein, 567 aa, Artificial Sequence; identical to SEQ ID NO: 14214
  Synthetic Polypeptide

SEQ ID NO: 14509 - protein, 550 aa, Artificial Sequence; identical to SEQ ID NO: 14215
  Synthetic Polypeptide

SEQ ID NO: 14510 - protein, 578 aa, Artificial Sequence; identical to SEQ ID NO: 14216
  Synthetic Polypeptide

SEQ ID NO: 14511 - protein, 412 aa, Artificial Sequence; identical to SEQ ID NO: 14217
  Synthetic Polypeptide

SEQ ID NO: 14512 - protein, 590 aa, Artificial Sequence; identical to SEQ ID NO: 14218
  Synthetic Polypeptide

SEQ ID NO: 14513 - protein, 424 aa, Artificial Sequence; identical to SEQ ID NO: 14219
  Synthetic Polypeptide

SEQ ID NO: 14514 - protein, 707 aa, Artificial Sequence
  Synthetic Polypeptide
MALPVTALLLPLALLLHAARPGMRTEDLPKAVVFLEPQWYRVLEKDSVTLKCQGAYSPEDNSTQWFHNESLISSQASSYFIDAATVDDSGEYRCQTNLSTLSDPVQLEVHIGWLLLQAPRWVFKEEDPIHLRCHSWKNTALHKVTYLQNGKGRKYFHHNSDFYIPKATLKDSGSYFCRGLVGSKNVSSETVNITITQGLAVSTISSFFPPGYQGTGGGGSGGGGSGGGGSEFEADIYQTPRYLVIGTGKKITLECSQTMGHDKMYWYQQDPGMELHLIHYSYGVNSTEKGDLSSESTVSRIRTEHFPLTLESARPSHTSQYLCASSEARGLAEFTDTQYFGPGTRLTVGGGGSGGGGSGGGGSQVQLQQPGAELVKPGASVKMSCKASGYAFSSYWINWMKQKPGQGLEWIGQIYPGDGTENRFSVNFQKAAKSFSLKISDSQLGDAAMYFCAYRSAVNARLMFGDGTQLVVKPNTREQKLISEEDLKIEVMYPPPYLDNEKSNGTIIHVKGKHLCPSPLFPGPSKPFWVLVVVGGVLACYSLLVTVAFIIFWVRSKRSRLLHSDYMNMTPRRPGPTRKHYQPYAPPRDFAAYRSRVKFSRSADAPAYQQGQNQLYNELNLGRREEYDVLDKRRGRDPEMGGKPRRKNPQEGLYNELQKDKMAEAYSEIGMKGERRRGKGHDGLYQGLSTATKDTYDALHMQALPPR

SEQ ID NO: 14515 - protein, 713 aa, Artificial Sequence
  Synthetic Polypeptide
MALPVTALLLPLALLLHAARPGMRTEDLPKAVVFLEPQWYRVLEKDSVTLKCQGAYSPEDNSTQWFHNESLISSQASSYFIDAATVDDSGEYRCQTNLSTLSDPVQLEVHIGWLLLQAPRWVFKEEDPIHLRCHSWKNTALHKVTYLQNGKGRKYFHHNSDFYIPKATLKDSGSYFCRGLVGSKNVSSETVNITITQGLAVSTISSFFPPGYQGTGGGGSGGGGSGGGGSEFEADIYQTPRYLVIGTGKKITLECSQTMGHDKMYWYQQDPGMELHLIHYSYGVNSTEKGDLSSESTVSRIRTEHFPLTLESARPSHTSQYLCASSEARGLAEFTDTQYFGPGTRLTVGGGGSGGGGSGGGGSQVQLQQPGAELVKPGASVKMSCKASGYAFSSYWINWMKQKPGQGLEWIGQIYPGDGTENRFSVNFQKAAKSFSLKISDSQLGDAAMYFCAYRSAVNARLMFGDGTQLVVKPNTREQKLISEEDLAKPTTTPAPRPPTPAPTIASQPLSLRPEACRPAAGGAVHTRGLDFACDIYIWAPLAGTCGVLLLSLVITLYCKRGRKKLLYIFKQPFMRPVQTTQEEDGCSCRFPEEEEGGCELRVKFSRSADAPAYQQGQNQLYNELNLGRREEYDVLDKRRGRDPEMGGKPRRKNPQEGLYNELQKDKMAEAYSEIGMKGERRRGKGHDGLYQGLSTATKDTYDALHMQALPPR

SEQ ID NO: 14516 - protein, 1126 aa, Artificial Sequence
  Synthetic Polypeptide
MALPVTALLLPLALLLHAARPGMRTEDLPKAVVFLEPQWYRVLEKDSVTLKCQGAYSPEDNSTQWFHNESLISSQASSYFIDAATVDDSGEYRCQTNLSTLSDPVQLEVHIGWLLLQAPRWVFKEEDPIHLRCHSWKNTALHKVTYLQNGKGRKYFHHNSDFYIPKATLKDSGSYFCRGLVGSKNVSSETVNITITQGLAVSTISSFFPPGYQGTGGGGSGGGGSGGGGSEFEADIYQTPRYLVIGTGKKITLECSQTMGHDKMYWYQQDPGMELHLIHYSYGVNSTEKGDLSSESTVSRIRTEHFPLTLESARPSHTSQYLCASSEARGLAEFTDTQYFGPGTRLTVGGGGSGGGGSGGGGSQVQLQQPGAELVKPGASVKMSCKASGYAFSSYWINWMKQKPGQGLEWIGQIYPGDGTENRFSVNFQKAAKSFSLKISDSQLGDAAMYFCAYRSAVNARLMFGDGTQLVVKPNTREQKLISEEDLAKPTTTPAPRPPTPAPTIASQPLSLRPEACRPAAGGAVHTRGLDFACDIYIWAPLAGTCGVLLLSLVITLYCGRARVKFSRSADAPAYQQGQNQLYNELNLGRREEYDVLDKRRGRDPEMGGKPRRKNPQEGLYNELQKDKMAEAYSEIGMKGERRRGKGHDGLYQGLSTATKDTYDALHMQALPPRSRGSGATNFSLLKQAGDVEENPGPGIHMATYEVLCEVARKLGTDDREVVLFLLNVFIPQPTLAQLIGALRALKEEGRLTFPLLAECLFRAGRRDLLRDLLHLDPRFLERHLAGTMSYFSPYQLTVLHVDGELCARDIRSLIFLSKDTIGSRSTPQTFLHWVYCMENLDLLGPTDVDALMSMLRSLSRVDLQRQVQTLMGLHLSGPSHSQHYRHTPLETDFYDYKDDDDKTSGSGEGRGSLLTCGDVEENPGPHMTEYKPTVRLATRDDVPRAVRTLAAAFADYPATRHTVDPDRHIERVTELQELFLTRVGLDIGKVWVADDGAAVAVWTTPESVEAGAVFAEIGPRMAELSGSRLAAQQQMEGLLAPHRPKEPAWFLATVGVSPDHQGKGLGSAVVLPGVEAAERAGVPAFLETSAPRNLPFYERLGFTVTADVEVPEGPRTWCMTRKPGA

SEQ ID NO: 14517 - protein, 1066 aa, Artificial Sequence
  Synthetic Polypeptide
MALPVTALLLPLALLLHAARPGMRTEDLPKAVVFLEPQWYRVLEKDSVTLKCQGAYSPEDNSTQWFHNESLISSQASSYFIDAATVDDSGEYRCQTNLSTLSDPVQLEVHIGWLLLQAPRWVFKEEDPIHLRCHSWKNTALHKVTYLQNGKGRKYFHHNSDFYIPKATLKDSGSYFCRGLVGSKNVSSETVNITITQGLAVSTISSFFPPGYQGTGGGGSGGGGSGGGGSEFEADIYQTPRYLVIGTGKKITLECSQTMGHDKMYWYQQDPGMELHLIHYSYGVNSTEKGDLSSESTVSRIRTEHFPLTLESARPSHTSQYLCASSEARGLAEFTDTQYFGPGTRLTVLEIQNPDPAVYQLRDSKSSDKSVCLFTDFDSQTNVSQSKDSDVYITDKCVLDMRSMDFKSNSAVAWSNKSDFACANAFNNSIIPEDTFFPSSDVPCDVKLVEKSFETDTNLNFQNLSVIGFRILLLKVAGFNLLMTLRLWSSRAKRSGSGVKQTLNFDLLKLAGDVESNPGPTSMDWIWRILFLVGAATGAHSFEQVQLQQPGAELVKPGASVKMSCKASGYAFSSYWINWMKQKPGQGLEWIGQIYPGDGTENRFSVNFQKAAKSFSLKISDSQLGDAAMYFCAYRSAVNARLMFGDGTQLVVKPNTREDLKNVFPPEVAVFEPSKAEIAHTQKATLVCLATGFYPDHVELSWWVNGKEVHSGVCTDPQPLKEQPALNDSRYCLSSRLRVSATFWQNPRNHFRCQVQFYGLSENDEWTQDRAKPVTQIVSAEAWGRADCGITSASYHQGVLSATILYEILLGKATLYAVLVSALVLMAMVKRKDSRGRAKRSGSGATNFSLLKQAGDVEENPGPSRGHMTEYKPTVRLATRDDVPRAVRTLAAAFADYPATRHTVDPDRHIERVTELQELFLTRVGLDIGKVWVADDGAAVAVWTTPESVEAGAVFAEIGPRMAELSGSRLAAQQQMEGLLAPHRPKEPAWFLATVGVSPDHQGKGLGSAVVLPGVEAAERAGVPAFLETSAPRNLPFYERLGFTVTADVEVPEGPRTWCMTRKPGA

SEQ ID NO: 14518 - protein, 1065 aa, Artificial Sequence
  Synthetic Polypeptide
MALPVTALLLPLALLLHAARPGMRTEDLPKAVVFLEPQWYRVLEKDSVTLKCQGAYSPEDNSTQWFHNESLISSQASSYFIDAATVDDSGEYRCQTNLSTLSDPVQLEVHIGWLLLQAPRWVFKEEDPIHLRCHSWKNTALHKVTYLQNGKGRKYFHHNSDFYIPKATLKDSGSYFCRGLVGSKNVSSETVNITITQGLAVSTISSFFPPGYQGTGGGGSGGGGSGGGGSEFEADIYQTPRYLVIGTGKKITLECSQTMGHDKMYWYQQDPGMELHLIHYSYGVNSTEKGDLSSESTVSRIRTEHFPLTLESARPSHTSQYLCASSEARGLAEFTDTQYFGPGTRLTVLEDLKNVFPPEVAVFEPSKAEIAHTQKATLVCLATGFYPDHVELSWWVNGKEVHSGVCTDPQPLKEQPALNDSRYCLSSRLRVSATFWQNPRNHFRCQVQFYGLSENDEWTQDRAKPVTQIVSAEAWGRADCGITSASYHQGVLSATILYEILLGKATLYAVLVSALVLMAMVKRKDSRGRAKRSGSGATNFSLLKQAGDVEENPGPTSMDWIWRILFLVGAATGAHSFEQVQLQQPGAELVKPGASVKMSCKASGYAFSSYWINWMKQKPGQGLEWIGQIYPGDGTENRFSVNFQKAAKSFSLKISDSQLGDAAMYFCAYRSAVNARLMFGDGTQLVVKPNTRIQNPDPAVYQLRDSKSSDKSVCLFTDFDSQTNVSQSKDSDVYITDKCVLDMRSMDFKSNSAVAWSNKSDFACANAFNNSIIPEDTFFPSSDVPCDVKLVEKSFETDTNLNFQNLSVIGFRILLLKVAGFNLLMTLRLWSSRAKRSGSGVKQTLNFDLLKLAGDVESNPGPSRGHMTEYKPTVRLATRDDVPRAVRTLAAAFADYPATRHTVDPDRHIERVTELQELFLTRVGLDIGKVWVADDGAAVAVWTTPESVEAGAVFAEIGPRMAELSGSRLAAQQQMEGLLAPHRPKEPAWFLATVGVSPDHQGKGLGSAVVLPGVEAAERAGVPAFLETSAPRNLPFYERLGFTVTADVEVPEGPRTWCMTRKPGA

SEQ ID NO: 14519 - protein, 832 aa, Artificial Sequence
  Synthetic Polypeptide
MALPVTALLLPLALLLHAARPGMRTEDLPKAVVFLEPQWYRVLEKDSVTLKCQGAYSPEDNSTQWFHNESLISSQASSYFIDAATVDDSGEYRCQTNLSTLSDPVQLEVHIGWLLLQAPRWVFKEEDPIHLRCHSWKNTALHKVTYLQNGKGRKYFHHNSDFYIPKATLKDSGSYFCRGLVGSKNVSSETVNITITQGLAVSTISSFFPPGYQGTGGGGSGGGGSGGGGSEFEADIYQTPRYLVIGTGKKITLECSQTMGHDKMYWYQQDPGMELHLIHYSYGVNSTEKGDLSSESTVSRIRTEHFPLTLESARPSHTSQYLCASSEARGLAEFTDTQYFGPGTRLTVLEDLKNVFPPEVAVFEPSEAEISHTQKATLVCLATGFYPDHVELSWWVNGKEVHSGVCTDPQPLKEQPALNDSRYCLSSRLRVSATFWQNPRNHFRCQVQFYGLSENDEWTQDRAKPVTQIVSAEAWGRADCGFTSESYQQGVLSATILYEILLGKATLYAVLVSALVLMAMVKRKDSRGRAKRSGSGATNFSLLKQAGDVEENPGPTSMDWIWRILFLVGAATGAHSFEQVQLQQPGAELVKPGASVKMSCKASGYAFSSYWINWMKQKPGQGLEWIGQIYPGDGTENRFSVNFQKAAKSFSLKISDSQLGDAAMYFCAYRSAVNARLMFGDGTQLVVKPNTRIQNPDPAVYQLRDSKSSDKSVCLFTDFDSQTNVSQSKDSDVYITDKCVLDMRSMDFKSNSAVAWSNKSDFACANAFNNSIIPEDTFFPSPESSCDVKLVEKSFETDTNLNFQNLSVIGFRILLLKVAGFNLLMTLRLWSS

SEQ ID NO: 14520 - protein, 1057 aa, Artificial Sequence
  Synthetic Polypeptide
MALPVTALLLPLALLLHAARPGMRTEDLPKAVVFLEPQWYRVLEKDSVTLKCQGAYSPEDNSTQWFHNESLISSQASSYFIDAATVDDSGEYRCQTNLSTLSDPVQLEVHIGWLLLQAPRWVFKEEDPIHLRCHSWKNTALHKVTYLQNGKGRKYFHHNSDFYIPKATLKDSGSYFCRGLVGSKNVSSETVNITITQGLAVSTISSFFPPGYQGTGGGGSGGGGSGGGGSEFEADIYQTPRYLVIGTGKKITLECSQTMGHDKMYWYQQDPGMELHLIHYSYGVNSTEKGDLSSESTVSRIRTEHFPLTLESARPSHTSQYLCASSEARGLAEFTDTQYFGPGTRLTVLEDLKNVFPPEVAVFEPSEAEISHTQKATLVCLATGFYPDHVELSWWVNGKEVHSGVCTDPQPLKEQPALNDSRYCLSSRLRVSATFWQNPRNHFRCQVQFYGLSENDEWTQDRAKPVTQIVSAEAWGRADCGFTSESYQQGVLSATILYEILLGKATLYAVLVSALVLMAMVKRKDSRGRAKRSGSGATNFSLLKQAGDVEENPGPTSMDWIWRILFLVGAATGAHSFEQVQLQQPGAELVKPGASVKMSCKASGYAFSSYWINWMKQKPGQGLEWIGQIYPGDGTENRFSVNFQKAAKSFSLKISDSQLGDAAMYFCAYRSAVNARLMFGDGTQLVVKPNTRIQNPDPAVYQLRDSKSSDKSVCLFTDFDSQTNVSQSKDSDVYITDKCVLDMRSMDFKSNSAVAWSNKSDFACANAFNNSIIPEDTFFPSPESSCDVKLVEKSFETDTNLNFQNLSVIGFRILLLKVAGFNLLMTLRLWSSRAKRSGSGVKQTLNFDLLKLAGDVESNPGPSRGGIHTMATYEVLCEVARKLGTDDREVVLFLLNVFIPQPTLAQLIGALRALKEEGRLTFPLLAECLFRAGRRDLLRDLLHLDPRFLERHLAGTMSYFSPYQLTVLHVDGELCARDIRSLIFLSKDTIGSRSTPQTFLHWVYCMENLDLLGPTDVDALMSMLRSLSRVDLQRQVQTLMGLHLSGPSHSQHYRHTP

SEQ ID NO: 14521 - protein, 836 aa, Artificial Sequence
  Synthetic Polypeptide
MALPVTALLLPLALLLHAARPGMRTEDLPKAVVFLEPQWYRVLEKDSVTLKCQGAYSPEDNSTQWFHNESLISSQASSYFIDAATVDDSGEYRCQTNLSTLSDPVQLEVHIGWLLLQAPRWVFKEEDPIHLRCHSWKNTALHKVTYLQNGKGRKYFHHNSDFYIPKATLKDSGSYFCRGLVGSKNVSSETVNITITQGLAVSTISSFFPPGYQGTGGGGSGGGGSGGGGSEFEADIYQTPRYLVIGTGKKITLECSQTMGHDKMYWYQQDPGMELHLIHYSYGVNSTEKGDLSSESTVSRIRTEHFPLTLESARPSHTSQYLCASSEARGLAEFTDTQYFGPGTRLTVLEIQNPDPAVYQLRDSKSSDKSVCLFTDFDSQTNVSQSKDSDVYITDKCVLDMRSMDFKSNSAVAWSNKSDFACANAFNNSIIPEDTFFPSPESSCDVKLVEKSFETDTNLNFQNLSVIGFRILLLKVAGFNLLMTLRLWSSRAKRSGSGVKQTLNFDLLKLAGDVESNPGPTSMDWIWRILFLVGAATGAHSFEQVQLQQPGAELVKPGASVKMSCKASGYAFSSYWINWMKQKPGQGLEWIGQIYPGDGTENRFSVNFQKAAKSFSLKISDSQLGDAAMYFCAYRSAVNARLMFGDGTQLVVKPNTREDLKNVFPPEVAVFEPSEAEISHTQKATLVCLATGFYPDHVELSWWVNGKEVHSGVCTDPQPLKEQPALNDSRYCLSSRLRVSATFWQNPRNHFRCQVQFYGLSENDEWTQDRAKPVTQIVSAEAWGRADCGFTSESYQQGVLSATILYEILLGKATLYAVLVSALVLMAMVKRKDSRG

SEQ ID NO: 14522 - protein, 1058 aa, Artificial Sequence
  Synthetic Polypeptide
MALPVTALLLPLALLLHAARPGMRTEDLPKAVVFLEPQWYRVLEKDSVTLKCQGAYSPEDNSTQWFHNESLISSQASSYFIDAATVDDSGEYRCQTNLSTLSDPVQLEVHIGWLLLQAPRWVFKEEDPIHLRCHSWKNTALHKVTYLQNGKGRKYFHHNSDFYIPKATLKDSGSYFCRGLVGSKNVSSETVNITITQGLAVSTISSFFPPGYQGTGGGGSGGGGSGGGGSEFEADIYQTPRYLVIGTGKKITLECSQTMGHDKMYWYQQDPGMELHLIHYSYGVNSTEKGDLSSESTVSRIRTEHFPLTLESARPSHTSQYLCASSEARGLAEFTDTQYFGPGTRLTVLEIQNPDPAVYQLRDSKSSDKSVCLFTDFDSQTNVSQSKDSDVYITDKCVLDMRSMDFKSNSAVAWSNKSDFACANAFNNSIIPEDTFFPSPESSCDVKLVEKSFETDTNLNFQNLSVIGFRILLLKVAGFNLLMTLRLWSSRAKRSGSGVKQTLNFDLLKLAGDVESNPGPTSMDWIWRILFLVGAATGAHSFEQVQLQQPGAELVKPGASVKMSCKASGYAFSSYWINWMKQKPGQGLEWIGQIYPGDGTENRFSVNFQKAAKSFSLKISDSQLGDAAMYFCAYRSAVNARLMFGDGTQLVVKPNTREDLKNVFPPEVAVFEPSEAEISHTQKATLVCLATGFYPDHVELSWWVNGKEVHSGVCTDPQPLKEQPALNDSRYCLSSRLRVSATFWQNPRNHFRCQVQFYGLSENDEWTQDRAKPVTQIVSAEAWGRADCGFTSESYQQGVLSATILYEILLGKATLYAVLVSALVLMAMVKRKDSRGRAKRSGSGATNFSLLKQAGDVEENPGPSRGGIHTMATYEVLCEVARKLGTDDREVVLFLLNVFIPQPTLAQLIGALRALKEEGRLTFPLLAECLFRAGRRDLLRDLLHLDPRFLERHLAGTMSYFSPYQLTVLHVDGELCARDIRSLIFLSKDTIGSRSTPQTFLHWVYCMENLDLLGPTDVDALMSMLRSLSRVDLQRQVQTLMGLHLSGPSHSQHYRHTP

SEQ ID NO: 14523 - protein, 1110 aa, Artificial Sequence
  Synthetic Polypeptide
MALPVTALLLPLALLLHAARPLEGKPIPNPLLGLDSTGSGEDLKNVFPPEVAVFEPSKAEIAHTQKATLVCLATGFYPDHVELSWWVNGKEVHSGVCTDPQPLKEQPALNDSRYCLSSRLRVSATFWQNPRNHFRCQVQFYGLSENDEWTQDRAKPVTQIVSAEAWGRADCGITSASYHQGVLSATILYEILLGKATLYAVLVSALVLMAMVKRKDSRGRAKRSGSGATNFSLLKQAGDVEENPGPTSMALPVTALLLPLALLLHAARPGMRTEDLPKAVVFLEPQWYRVLEKDSVTLKCQGAYSPEDNSTQWFHNESLISSQASSYFIDAATVDDSGEYRCQTNLSTLSDPVQLEVHIGWLLLQAPRWVFKEEDPIHLRCHSWKNTALHKVTYLQNGKGRKYFHHNSDFYIPKATLKDSGSYFCRGLVGSKNVSSETVNITITQGLAVSTISSFFPPGYQGTGGGGSGGGGSGGGGSEFEADIYQTPRYLVIGTGKKITLECSQTMGHDKMYWYQQDPGMELHLIHYSYGVNSTEKGDLSSESTVSRIRTEHFPLTLESARPSHTSQYLCASSEARGLAEFTDTQYFGPGTRLTVGGGGSGGGGSGGGGSQVQLQQPGAELVKPGASVKMSCKASGYAFSSYWINWMKQKPGQGLEWIGQIYPGDGTENRFSVNFQKAAKSFSLKISDSQLGDAAMYFCAYRSAVNARLMFGDGTQLVVKPNTREQKLISEEDGSGIQNPDPAVYQLRDSKSSDKSVCLFTDFDSQTNVSQSKDSDVYITDKCVLDMRSMDFKSNSAVAWSNKSDFACANAFNNSIIPEDTFFPSSDVPCDVKLVEKSFETDTNLNFQNLSVIGFRILLLKVAGFNLLMTLRLWSSRAKRSGSGVKQTLNFDLLKLAGDVESNPGPSRGHMTEYKPTVRLATRDDVPRAVRTLAAAFADYPATRHTVDPDRHIERVTELQELFLTRVGLDIGKVWVADDGAAVAVWTTPESVEAGAVFAEIGPRMAELSGSRLAAQQQMEGLLAPHRPKEPAWFLATVGVSPDHQGKGLGSAVVLPGVEAAERAGVPAFLETSAPRNLPFYERLGFTVTADVEVPEGPRTWCMTRKPGA

SEQ ID NO: 14524 - protein, 1111 aa, Artificial Sequence
  Synthetic Polypeptide
MALPVTALLLPLALLLHAARPLEQKLISEEDLGSGDRPDPAVYQLRDSKSSDKSVCLFTDFDSQTNVSQSKDSDVYITDKCVLDMRSMDFKSNSAVAWSNKSDFACANAFNNSIIPEDTFFPSPESSCDVKLVEKSFETDTNLNFQNLSVIGFRILLLKVAGFNLLMTLRLWSSSSRAKRSGSGVKQTLNFDLLKLAGDVESNPGPTSMALPVTALLLPLALLLHAARPGMRTEDLPKAVVFLEPQWYRVLEKDSVTLKCQGAYSPEDNSTQWFHNESLISSQASSYFIDAATVDDSGEYRCQTNLSTLSDPVQLEVHIGWLLLQAPRWVFKEEDPIHLRCHSWKNTALHKVTYLQNGKGRKYFHHNSDFYIPKATLKDSGSYFCRGLVGSKNVSSETVNITITQGLAVSTISSFFPPGYQGTGGGGSGGGGSGGGGSEFEADIYQTPRYLVIGTGKKITLECSQTMGHDKMYWYQQDPGMELHLIHYSYGVNSTEKGDLSSESTVSRIRTEHFPLTLESARPSHTSQYLCASSEARGLAEFTDTQYFGPGTRLTVGGGGSGGGGSGGGGSQVQLQQPGAELVKPGASVKMSCKASGYAFSSYWINWMKQKPGQGLEWIGQIYPGDGTENRFSVNFQKAAKSFSLKISDSQLGDAAMYFCAYRSAVNARLMFGDGTQLVVKPNTRGKPIPNPLLGLDSTGSGEDLKNVFPPEVAVFEPSEAEISHTQKATLVCLATGFYPDHVELSWWVNGKEVHSGVCTDPQPLKEQPALNDSRYCLSSRLRVSATFWQNPRNHFRCQVQFYGLSENDEWTQDRAKPVTQIVSAEAWGRADCGFTSESYQQGVLSATILYEILLGKATLYAVLVSALVLMAMVKRKDSRGRAKRSGSGATNFSLLKQAGDVEENPGPSRGHMTEYKPTVRLATRDDVPRAVRTLAAAFADYPATRHTVDPDRHIERVTELQELFLTRVGLDIGKVWVADDGAAVAVWTTPESVEAGAVFAEIGPRMAELSGSRLAAQQQMEGLLAPHRPKEPAWFLATVGVSPDHQGKGLGSAVVLPGVEAAERAGVPAFLETSAPRNLPFYERLGFTVTADVEVPEGPRTWCMTRKPGA

SEQ ID NO: 14525 - protein, 1065 aa, Artificial Sequence
  Synthetic Polypeptide
MALPVTALLLPLALLLHAARPGMRTEDLPKAVVFLEPQWYRVLEKDSVTLKCQGAYSPEDNSTQWFHNESLISSQASSYFIDAATVDDSGEYRCQTNLSTLSDPVQLEVHIGWLLLQAPRWVFKEEDPIHLRCHSWKNTALHKVTYLQNGKGRKYFHHNSDFYIPKATLKDSGSYFCRGLVGSKNVSSETVNITITQGLAVSTISSFFPPGYQGTGGGGSGGGGSGGGGSEFEADIYQTPRYLVIGTGKKITLECSQTMGHDKMYWYQQDPGMELHLIHYSYGVNSTEKGDLSSESTVSRIRTEHFPLTLESARPSHTSQYLCASSEARGLAEFTDTQYFGPGTRLTVLEDLKNVFPPEVAVFEPSEAEISHTQKATLVCLATGFYPDHVELSWWVNGKEVHSGVSTDPQPLKEQPALNDSRYCLSSRLRVSATFWQNPRNHFRCQVQFYGLSENDEWTQDRAKPVTQIVSAEAWGRADCGFTSESYQQGVLSATILYEILLGKATLYAVLVSALVLMAMVKRKDSRGRAKRSGSGATNFSLLKQAGDVEENPGPTSMDWIWRILFLVGAATGAHSFEQVQLQQPGAELVKPGASVKMSCKASGYAFSSYWINWMKQKPGQGLEWIGQIYPGDGTENRFSVNFQKAAKSFSLKISDSQLGDAAMYFCAYRSAVNARLMFGDGTQLVVKPNTRIQNPDPAVYQLRDSKSSDKSVCLFTDFDSQTNVSQSKDSDVYITDKTVLDMRSMDFKSNSAVAWSNKSDFACANAFNNSIIPEDTFFPSPESSCDVKLVEKSFETDTNLNFQNLSVIGFRILLLKVAGFNLLMTLRLWSSRAKRSGSGVKQTLNFDLLKLAGDVESNPGPSRGHMTEYKPTVRLATRDDVPRAVRTLAAAFADYPATRHTVDPDRHIERVTELQELFLTRVGLDIGKVWVADDGAAVAVWTTPESVEAGAVFAEIGPRMAELSGSRLAAQQQMEGLLAPHRPKEPAWFLATVGVSPDHQGKGLGSAVVLPGVEAAERAGVPAFLETSAPRNLPFYERLGFTVTADVEVPEGPRTWCMTRKPGA

SEQ ID NO: 14526 - protein, 1147 aa, Artificial Sequence
  Synthetic Polypeptide
MALPVTALLLPLALLLHAARPGMRTEDLPKAVVFLEPQWYRVLEKDSVTLKCQGAYSPEDNSTQWFHNESLISSQASSYFIDAATVDDSGEYRCQTNLSTLSDPVQLEVHIGWLLLQAPRWVFKEEDPIHLRCHSWKNTALHKVTYLQNGKGRKYFHHNSDFYIPKATLKDSGSYFCRGLVGSKNVSSETVNITITQGLAVSTISSFFPPGYQGTGGGGSGGGGSGGGGSEFEADIYQTPRYLVIGTGKKITLECSQTMGHDKMYWYQQDPGMELHLIHYSYGVNSTEKGDLSSESTVSRIRTEHFPLTLESARPSHTSQYLCASSEARGLAEFTDTQYFGPGTRLTVLEDLKNVFPPEVAVFEPSEAEISHTQKATLVCLATGFYPDHVELSWWVNGKEVHSGVSTDPQPLKEQPALNDSRYCLSSRLRVSATFWQNPRNHFRCQVQFYGLSENDEWTQDRAKPVTQIVSAEAWGRADCGFTSESYQQGVLSATILYEILLGKATLYAVLVSALVLMAMVKRKDSRGRAKRSGSGATNFSLLKQAGDVEENPGPTSMDWIWRILFLVGAATGAHSFEQVQLQQPGAELVKPGASVKMSCKASGYAFSSYWINWMKQKPGQGLEWIGQIYPGDGTENRFSVNFQKAAKSFSLKISDSQLGDAAMYFCAYRSAVNARLMFGDGTQLVVKPNTREQKLISEEDGSGTPFPSLAPPIMLLVDGKQQMVVVCLVLDVAPPGLDSPIWFSAGNGSALDAFTYGPSPATDGTWTNLAHLSLPSEELASWEPLVCHTGPGAEGHSRSTQPMHLSGEASTARTCPQEPLRGTPGGALWLGVLRLLLFKLLLFDLLLTCSCLCDPAGPLPSPATTTRLRALGSHRLHPATETGGREATSSPRPQPRDRRWGDTPPGRKPGSPVRAKRSGSGVKQTLNFDLLKLAGDVESNPGPSRGHMTEYKPTVRLATRDDVPRAVRTLAAAFADYPATRHTVDPDRHIERVTELQELFLTRVGLDIGKVWVADDGAAVAVWTTPESVEAGAVFAEIGPRMAELSGSRLAAQQQMEGLLAPHRPKEPAWFLATVGVSPDHQGKGLGSAVVLPGVEAAERAGVPAFLETSAPRNLPFYERLGFTVTADVEVPEGPRTWCMTRKPGA

SEQ ID NO: 14527 - protein, 1165 aa, Artificial Sequence
  Synthetic Polypeptide
MALPVTALLLPLALLLHAARPLEDLKNVFPPEVAVFEPSEAEISHTQKATLVCLATGFYPDHVELSWWVNGKEVHSGVSTDPQPLKEQPALNDSRYCLSSRLRVSATFWQNPRNHFRCQVQFYGLSENDEWTQDRAKPVTQIVSAEAWGRADCGFTSESYQQGVLSATILYEILLGKATLYAVLVSALVLMAMVKRKDSRGRAKRSGSGATNFSLLKQAGDVEENPGPTSMALPVTALLLPLALLLHAARPGMRTEDLPKAVVFLEPQWYRVLEKDSVTLKCQGAYSPEDNSTQWFHNESLISSQASSYFIDAATVDDSGEYRCQTNLSTLSDPVQLEVHIGWLLLQAPRWVFKEEDPIHLRCHSWKNTALHKVTYLQNGKGRKYFHHNSDFYIPKATLKDSGSYFCRGLVGSKNVSSETVNITITQGLAVSTISSFFPPGYQGTGGGGSGGGGSGGGGSEFEADIYQTPRYLVIGTGKKITLECSQTMGHDKMYWYQQDPGMELHLIHYSYGVNSTEKGDLSSESTVSRIRTEHFPLTLESARPSHTSQYLCASSEARGLAEFTDTQYFGPGTRLTVGGGGSGGGGSGGGGSQVQLQQPGAELVKPGASVKMSCKASGYAFSSYWINWMKQKPGQGLEWIGQIYPGDGTENRFSVNFQKAAKSFSLKISDSQLGDAAMYFCAYRSAVNARLMFGDGTQLVVKPNTREQKLISEEDLGSGTPFPSLAPPIMLLVDGKQQMVVVCLVLDVAPPGLDSPIWFSAGNGSALDAFTYGPSPATDGTWTNLAHLSLPSEELASWEPLVCHTGPGAEGHSRSTQPMHLSGEASTARTCPQEPLRGTPGGALWLGVLRLLLFKLLLFDLLLTCSCLCDPAGPLPSPATTTRLRALGSHRLHPATETGGREATSSPRPQPRDRRWGDTPPGRKPGSPVRAKRSGSGVKQTLNFDLLKLAGDVESNPGPSRSRGHMTEYKPTVRLATRDDVPRAVRTLAAAFADYPATRHTVDPDRHIERVTELQELFLTRVGLDIGKVWVADDGAAVAVWTTPESVEAGAVFAEIGPRMAELSGSRLAAQQQMEGLLAPHRPKEPAWFLATVGVSPDHQGKGLGSAVVLPGVEAAERAGVPAFLETSAPRNLPFYERLGFTVTADVEVPEGPRTWCMTRKPGA

SEQ ID NO: 14528 - protein, 1102 aa, Artificial Sequence
  Synthetic Polypeptide
MALPVTALLLPLALLLHAARPGMRTEDLPKAVVFLEPQWYRVLEKDSVTLKCQGAYSPEDNSTQWFHNESLISSQASSYFIDAATVDDSGEYRCQTNLSTLSDPVQLEVHIGWLLLQAPRWVFKEEDPIHLRCHSWKNTALHKVTYLQNGKGRKYFHHNSDFYIPKATLKDSGSYFCRGLVGSKNVSSETVNITITQGLAVSTISSFFPPGYQGTGGGGSGGGGSGGGGSEFEADIYQTPRYLVIGTGKKITLECSQTMGHDKMYWYQQDPGMELHLIHYSYGVNSTEKGDLSSESTVSRIRTEHFPLTLESARPSHTSQYLCASSEARGLAEFTDTQYFGPGTRLTVLEGKPIPNPLLGLDSTGSGDKQLDADVSPKPTIFLPSIAETKLQKAGTYLCLLEKFFPDVIKIHWQEKKSNTILGSQEGNTMKTNDTYMKFSWLTVPEKSLDKEHRCIVRHENNKNGVDQEIIFPPIKTDVITMDPKDNCSKDANDTLLLQLTNTSAYYMYLLLLLKSVVYFAIITCCLLRRTAFCCNGEKSRAKRSGSGATNFSLLKQAGDVEENPGPTSMDWIWRILFLVGAATGAHSFEQVQLQQPGAELVKPGASVKMSCKASGYAFSSYWINWMKQKPGQGLEWIGQIYPGDGTENRFSVNFQKAAKSFSLKISDSQLGDAAMYFCAYRSAVNARLMFGDGTQLVVKPNTREQKLISEEDGSGSQPHTKPSVFVMKNGTNVACLVKEFYPKDIRINLVSSKKITEFDPAIVISPSGKYNAVKLGKYEDSNSVTCSVQHDNKTVHSTDFEVKTDSTDHVKPKETENTKQPSKSCHKPKAIVHTEKVNMMSLTVLGLRMLFAKTVAVNFLLTAKLFFLRAKRSGSGVKQTLNFDLLKLAGDVESNPGPSRGHMTEYKPTVRLATRDDVPRAVRTLAAAFADYPATRHTVDPDRHIERVTELQELFLTRVGLDIGKVWVADDGAAVAVWTTPESVEAGAVFAEIGPRMAELSGSRLAAQQQMEGLLAPHRPKEPAWFLATVGVSPDHQGKGLGSAVVLPGVEAAERAGVPAFLETSAPRNLPFYERLGFTVTADVEVPEGPRTWCMTRKPGA

SEQ ID NO: 14529 - protein, 840 aa, Artificial Sequence
  Synthetic Polypeptide
MALPVTALLLPLALLLHAARPGMRTEDLPKAVVFLEPQWYRVLEKDSVTLKCQGAYSPEDNSTQWFHNESLISSQASSYFIDAATVDDSGEYRCQTNLSTLSDPVQLEVHIGWLLLQAPRWVFKEEDPIHLRCHSWKNTALHKVTYLQNGKGRKYFHHNSDFYIPKATLKDSGSYFCRGLVGSKNVSSETVNITITQGLAVSTISSFFPPGYQGTGGGGSGGGGSGGGGSEFEADIYQTPRYLVIGTGKKITLECSQTMGHDKMYWYQQDPGMELHLIHYSYGVNSTEKGDLSSESTVSRIRTEHFPLTLESARPSHTSQYLCASSEARGLAEFTDTQYFGPGTRLTVLESQPHTKPSVFVMKNGTNVACLVKEFYPKDIRINLVSSKKITEFDPAIVISPSGKYNAVKLGKYEDSNSVTCSVQHDNKTVHSTDFEVKTDSTDHVKPKETENTKQPSKSCHKPKAIVHTEKVNMMSLTVLGLRMLFAKTVAVNFLLTAKLFFLRAKRSGSGATNFSLLKQAGDVEENPGPTSMDWIWRILFLVGAATGAHSFEQVQLQQPGAELVKPGASVKMSCKASGYAFSSYWINWMKQKPGQGLEWIGQIYPGDGTENRFSVNFQKAAKSFSLKISDSQLGDAAMYFCAYRSAVNARLMFGDGTQLVVKPNTRDKQLDADVSPKPTIFLPSIAETKLQKAGTYLCLLEKFFPDVIKIHWQEKKSNTILGSQEGNTMKTNDTYMKFSWLTVPEKSLDKEHRCIVRHENNKNGVDQEIIFPPIKTDVITMDPKDNCSKDANDTLLLQLTNTSAYYMYLLLLLKSVVYFAIITCCLLRRTAFCCNGEKS

SEQ ID NO: 14530 - protein, 1117 aa, Artificial Sequence
  Synthetic Polypeptide
MALPVTALLLPLALLLHAARPLEGKPIPNPLLGLDSTGSGDKQLDADVSPKPTIFLPSIAETKLQKAGTYLCLLEKFFPDVIKIHWQEKKSNTILGSQEGNTMKTNDTYMKFSWLTVPEKSLDKEHRCIVRHENNKNGVDQEIIFPPIKTDVITMDPKDNCSKDANDTLLLQLTNTSAYYMYLLLLLKSVVYFAIITCCLLRRTAFCCNGEKSRAKRSGSGATNFSLLKQAGDVEENPGPTSMALPVTALLLPLALLLHAARPGMRTEDLPKAVVFLEPQWYRVLEKDSVTLKCQGAYSPEDNSTQWFHNESLISSQASSYFIDAATVDDSGEYRCQTNLSTLSDPVQLEVHIGWLLLQAPRWVFKEEDPIHLRCHSWKNTALHKVTYLQNGKGRKYFHHNSDFYIPKATLKDSGSYFCRGLVGSKNVSSETVNITITQGLAVSTISSFFPPGYQGTGGGGSGGGGSGGGGSEFEADIYQTPRYLVIGTGKKITLECSQTMGHDKMYWYQQDPGMELHLIHYSYGVNSTEKGDLSSESTVSRIRTEHFPLTLESARPSHTSQYLCASSEARGLAEFTDTQYFGPGTRLTVGGGGSGGGGSGGGGSQVQLQQPGAELVKPGASVKMSCKASGYAFSSYWINWMKQKPGQGLEWIGQIYPGDGTENRFSVNFQKAAKSFSLKISDSQLGDAAMYFCAYRSAVNARLMFGDGTQLVVKPNTREQKLISEEDGSGSQPHTKPSVFVMKNGTNVACLVKEFYPKDIRINLVSSKKITEFDPAIVISPSGKYNAVKLGKYEDSNSVTCSVQHDNKTVHSTDFEVKTDSTDHVKPKETENTKQPSKSCHKPKAIVHTEKVNMMSLTVLGLRMLFAKTVAVNFLLTAKLFFLRAKRSGSGVKQTLNFDLLKLAGDVESNPGPSRGHMTEYKPTVRLATRDDVPRAVRTLAAAFADYPATRHTVDPDRHIERVTELQELFLTRVGLDIGKVWVADDGAAVAVWTTPESVEAGAVFAEIGPRMAELSGSRLAAQQQMEGLLAPHRPKEPAWFLATVGVSPDHQGKGLGSAVVLPGVEAAERAGVPAFLETSAPRNLPFYERLGFTVTADVEVPEGPRTWCMTRKPGA

SEQ ID NO: 14531 - protein, 1242 aa, Artificial Sequence
  Synthetic Polypeptide
MALPVTALLLPLALLLHAARPGMRTEDLPKAVVFLEPQWYRVLEKDSVTLKCQGAYSPEDNSTQWFHNESLISSQASSYFIDAATVDDSGEYRCQTNLSTLSDPVQLEVHIGWLLLQAPRWVFKEEDPIHLRCHSWKNTALHKVTYLQNGKGRKYFHHNSDFYIPKATLKDSGSYFCRGLVGSKNVSSETVNITITQGLAVSTISSFFPPGYQGTGGGGSGGGGSGGGGSEFEADIYQTPRYLVIGTGKKITLECSQTMGHDKMYWYQQDPGMELHLIHYSYGVNSTEKGDLSSESTVSRIRTEHFPLTLESARPSHTSQYLCASSEARGLAEFTDTQYFGPGTRLTVGQPKANPTVTLFPPSSEELQANKATLVCLISDFYPGAVTVAWKADGSPVKAGVETTKPSKQSNNKYAASSYLSLTPEQWKSHRSYSCQVTHEGSTVEKTVAPTECSGSQSFGLLDPKLCYLLDGILFIYGVILTALFLRVKFSRSADAPAYQQGQNQLYNELNLGRREEYDVLDKRRGRDPEMGGKPQRRKNPQEGLYNELQKDKMAEAYSEIGMKGERRRGKGHDGLYQGLSTATKDTYDALHMQALPPRRAKRSGSGATNFSLLKQAGDVEENPGPTSMDWIWRILFLVGAATGAHSFEQVQLQQPGAELVKPGASVKMSCKASGYAFSSYWINWMKQKPGQGLEWIGQIYPGDGTENRFSVNFQKAAKSFSLKISDSQLGDAAMYFCAYRSAVNARLMFGDGTQLVVKPNASTKGPSVFPLAPSSKSTSGGTAALGCLVKDYFPEPVTVSWNSGALTSGVHTFPAVLQSSGLYSLSSVVTVPSSSLGTQTYICNVNHKPSNTKVDKRVEPKSCGTQSFGLLDPKLCYLLDGILFIYGVILTALFLRVKFSRSADAPAYQQGQNQLYNELNLGRREEYDVLDKRRGRDPEMGGKPQRRKNPQEGLYNELQKDKMAEAYSEIGMKGERRRGKGHDGLYQGLSTATKDTYDALHMQALPPRRAKRSGSGVKQTLNFDLLKLAGDVESNPGPSRGHMTEYKPTVRLATRDDVPRAVRTLAAAFADYPATRHTVDPDRHIERVTELQELFLTRVGLDIGKVWVADDGAAVAVWTTPESVEAGAVFAEIGPRMAELSGSRLAAQQQMEGLLAPHRPKEPAWFLATVGVSPDHQGKGLGSAVVLPGVEAAERAGVPAFLETSAPRNLPFYERLGFTVTADVEVPEGPRTWCMTRKPGA

SEQ ID NO: 14532 - protein, 1028 aa, Artificial Sequence
  Synthetic Polypeptide
MALPVTALLLPLALLLHAARPGMRTEDLPKAVVFLEPQWYRVLEKDSVTLKCQGAYSPEDNSTQWFHNESLISSQASSYFIDAATVDDSGEYRCQTNLSTLSDPVQLEVHIGWLLLQAPRWVFKEEDPIHLRCHSWKNTALHKVTYLQNGKGRKYFHHNSDFYIPKATLKDSGSYFCRGLVGSKNVSSETVNITITQGLAVSTISSFFPPGYQGTGGGGSGGGGSGGGGSEFEADIYQTPRYLVIGTGKKITLECSQTMGHDKMYWYQQDPGMELHLIHYSYGVNSTEKGDLSSESTVSRIRTEHFPLTLESARPSHTSQYLCASSEARGLAEFTDTQYFGPGTRLTVLEDLKNVFPPEVAVFEPSEAEISHTQKATLVCLATGFYPDHVELSWWVNGKEVHSGVSTDPQPLKEQPALNDSRYCLSSRLRVSATFWQNPRNHFRCQVQFYGLSENDEWTQDRAKPVTQIVSAEAWGRADCGSQSFGLLDPKLCYLLDGILFIYGVILTALFLRVKFSRSADAPAYQQGQNQLYNELNLGRREEYDVLDKRRGRDPEMGGKPQRRKNPQEGLYNELQKDKMAEAYSEIGMKGERRRGKGHDGLYQGLSTATKDTYDALHMQALPPRRAKRSGSGATNFSLLKQAGDVEENPGPTSMDWIWRILFLVGAATGAHSFEQVQLQQPGAELVKPGASVKMSCKASGYAFSSYWINWMKQKPGQGLEWIGQIYPGDGTENRFSVNFQKAAKSFSLKISDSQLGDAAMYFCAYRSAVNARLMFGDGTQLVVKPNTRIQNPDPAVYQLRDSKSSDKSVCLFTDFDSQTNVSQSKDSDVYITDKTVLDMRSMDFKSNSAVAWSNKSDFACANAFNNSIIPEDTFFPSPESSCGTQSFGLLDPKLCYLLDGILFIYGVILTALFLRVKFSRSADAPAYQQGQNQLYNELNLGRREEYDVLDKRRGRDPEMGGKPQRRKNPQEGLYNELQKDKMAEAYSEIGMKGERRRGKGHDGLYQGLSTATKDTYDALHMQALPPR

SEQ ID NO: 14533 - protein, 1028 aa, Artificial Sequence
  Synthetic Polypeptide
MALPVTALLLPLALLLHAARPGMRTEDLPKAVVFLEPQWYRVLEKDSVTLKCQGAYSPEDNSTQWFHNESLISSQASSYFIDAATVDDSGEYRCQTNLSTLSDPVQLEVHIGWLLLQAPRWVFKEEDPIHLRCHSWKNTALHKVTYLQNGKGRKYFHHNSDFYIPKATLKDSGSYFCRGLVGSKNVSSETVNITITQGLAVSTISSFFPPGYQGTGGGGSGGGGSGGGGSEFEADIYQTPRYLVIGTGKKITLECSQTMGHDKMYWYQQDPGMELHLIHYSYGVNSTEKGDLSSESTVSRIRTEHFPLTLESARPSHTSQYLCASSEARGLAEFTDTQYFGPGTRLTVLEDLKNVFPPEVAVFEPSKAEIAHTQKATLVCLATGFYPDHVELSWWVNGKEVHSGVCTDPQPLKEQPALNDSRYCLSSRLRVSATFWQNPRNHFRCQVQFYGLSENDEWTQDRAKPVTQIVSAEAWGRADCGSQSFGLLDPKLCYLLDGILFIYGVILTALFLRVKFSRSADAPAYQQGQNQLYNELNLGRREEYDVLDKRRGRDPEMGGKPQRRKNPQEGLYNELQKDKMAEAYSEIGMKGERRRGKGHDGLYQGLSTATKDTYDALHMQALPPRRAKRSGSGATNFSLLKQAGDVEENPGPTSMDWIWRILFLVGAATGAHSFEQVQLQQPGAELVKPGASVKMSCKASGYAFSSYWINWMKQKPGQGLEWIGQIYPGDGTENRFSVNFQKAAKSFSLKISDSQLGDAAMYFCAYRSAVNARLMFGDGTQLVVKPNTRIQNPDPAVYQLRDSKSSDKSVCLFTDFDSQTNVSQSKDSDVYITDKCVLDMRSMDFKSNSAVAWSNKSDFACANAFNNSIIPEDTFFPSSDVPCGTQSFGLLDPKLCYLLDGILFIYGVILTALFLRVKFSRSADAPAYQQGQNQLYNELNLGRREEYDVLDKRRGRDPEMGGKPQRRKNPQEGLYNELQKDKMAEAYSEIGMKGERRRGKGHDGLYQGLSTATKDTYDALHMQALPPR

SEQ ID NO: 14534 - protein, 1099 aa, Artificial Sequence
  Synthetic Polypeptide
MALPVTALLLPLALLLHAARPGMRTEDLPKAVVFLEPQWYRVLEKDSVTLKCQGAYSPEDNSTQWFHNESLISSQASSYFIDAATVDDSGEYRCQTNLSTLSDPVQLEVHIGWLLLQAPRWVFKEEDPIHLRCHSWKNTALHKVTYLQNGKGRKYFHHNSDFYIPKATLKDSGSYFCRGLVGSKNVSSETVNITITQGLAVSTISSFFPPGYQGTGGGGSGGGGSGGGGSEFEADIYQTPRYLVIGTGKKITLECSQTMGHDKMYWYQQDPGMELHLIHYSYGVNSTEKGDLSSESTVSRIRTEHFPLTLESARPSHTSQYLCASSEARGLAEFTDTQYFGPGTRLTVLEGKPIPNPLLGLDSTGSGEDLKNVFPPEVAVFEPSEAEISHTQKATLVCLATGFYPDHVELSWWVNGKEVHSGVSTDPQPLKEQPALNDSRYCLSSRLRVSATFWQNPRNHFRCQVQFYGLSENDEWTQDRAKPVTQIVSAEAWGRADCGSQSFGLLDPKLCYLLDGILFIYGVILTALFLRVKFSRSADAPAYQQGQNQLYNELNLGRREEYDVLDKRRGRDPEMGGKPQRRKNPQEGLYNELQKDKMAEAYSEIGMKGERRRGKGHDGLYQGLSTATKDTYDALHMQALPPRRAKRSGSGATNFSLLKQAGDVEENPGPTSMDWIWRILFLVGAATGAHSFEQVQLQQPGAELVKPGASVKMSCKASGYAFSSYWINWMKQKPGQGLEWIGQIYPGDGTENRFSVNFQKAAKSFSLKISDSQLGDAAMYFCAYRSAVNARLMFGDGTQLVVKPNTREQKLISEEDGSGIQNPDPAVYQLRDSKSSDKSVCLFTDFDSQTNVSQSKDSDVYITDKTVLDMRSMDFKSNSAVAWSNKSDFACANAFNNSIIPEDTFFPSPESSCGTQSFGLLDPKLCYLLDGILFIYGVILTALFLRSKRSRLLHSDYMNMTPRRPGPTRKHYQPYAPPRDFAAYRSRVKFSRSADAPAYQQGQNQLYNELNLGRREEYDVLDKRRGRDPEMGGKPQRRKNPQEGLYNELQKDKMAEAYSEIGMKGERRRGKGHDGLYQGLSTATKDTYDALHMQALPPR

SEQ ID NO: 14535 - protein, 1140 aa, Artificial Sequence
  Synthetic Polypeptide
MALPVTALLLPLALLLHAARPGMRTEDLPKAVVFLEPQWYRVLEKDSVTLKCQGAYSPEDNSTQWFHNESLISSQASSYFIDAATVDDSGEYRCQTNLSTLSDPVQLEVHIGWLLLQAPRWVFKEEDPIHLRCHSWKNTALHKVTYLQNGKGRKYFHHNSDFYIPKATLKDSGSYFCRGLVGSKNVSSETVNITITQGLAVSTISSFFPPGYQGTGGGGSGGGGSGGGGSEFEADIYQTPRYLVIGTGKKITLECSQTMGHDKMYWYQQDPGMELHLIHYSYGVNSTEKGDLSSESTVSRIRTEHFPLTLESARPSHTSQYLCASSEARGLAEFTDTQYFGPGTRLTVLEGKPIPNPLLGLDSTGSGEDLKNVFPPEVAVFEPSEAEISHTQKATLVCLATGFYPDHVELSWWVNGKEVHSGVSTDPQPLKEQPALNDSRYCLSSRLRVSATFWQNPRNHFRCQVQFYGLSENDEWTQDRAKPVTQIVSAEAWGRADCGSQSFGLLDPKLCYLLDGILFIYGVILTALFLRSKRSRLLHSDYMNMTPRRPGPTRKHYQPYAPPRDFAAYRSRVKFSRSADAPAYQQGQNQLYNELNLGRREEYDVLDKRRGRDPEMGGKPQRRKNPQEGLYNELQKDKMAEAYSEIGMKGERRRGKGHDGLYQGLSTATKDTYDALHMQALPPRRAKRSGSGATNFSLLKQAGDVEENPGPTSMDWIWRILFLVGAATGAHSFEQVQLQQPGAELVKPGASVKMSCKASGYAFSSYWINWMKQKPGQGLEWIGQIYPGDGTENRFSVNFQKAAKSFSLKISDSQLGDAAMYFCAYRSAVNARLMFGDGTQLVVKPNTREQKLISEEDGSGIQNPDPAVYQLRDSKSSDKSVCLFTDFDSQTNVSQSKDSDVYITDKTVLDMRSMDFKSNSAVAWSNKSDFACANAFNNSIIPEDTFFPSPESSCGTQSFGLLDPKLCYLLDGILFIYGVILTALFLRSKRSRLLHSDYMNMTPRRPGPTRKHYQPYAPPRDFAAYRSRVKFSRSADAPAYQQGQNQLYNELNLGRREEYDVLDKRRGRDPEMGGKPQRRKNPQEGLYNELQKDKMAEAYSEIGMKGERRRGKGHDGLYQGLSTATKDTYDALHMQALPPR

SEQ ID NO: 14536 - protein, 1101 aa, Artificial Sequence
  Synthetic Polypeptide
MALPVTALLLPLALLLHAARPGMRTEDLPKAVVFLEPQWYRVLEKDSVTLKCQGAYSPEDNSTQWFHNESLISSQASSYFIDAATVDDSGEYRCQTNLSTLSDPVQLEVHIGWLLLQAPRWVFKEEDPIHLRCHSWKNTALHKVTYLQNGKGRKYFHHNSDFYIPKATLKDSGSYFCRGLVGSKNVSSETVNITITQGLAVSTISSFFPPGYQGTGGGGSGGGGSGGGGSEFEADIYQTPRYLVIGTGKKITLECSQTMGHDKMYWYQQDPGMELHLIHYSYGVNSTEKGDLSSESTVSRIRTEHFPLTLESARPSHTSQYLCASSEARGLAEFTDTQYFGPGTRLTVLEGKPIPNPLLGLDSTGSGEDLKNVFPPEVAVFEPSEAEISHTQKATLVCLATGFYPDHVELSWWVNGKEVHSGVSTDPQPLKEQPALNDSRYCLSSRLRVSATFWQNPRNHFRCQVQFYGLSENDEWTQDRAKPVTQIVSAEAWGRADCGSQSFGLLDPKLCYLLDGILFIYGVILTALFLRVKFSRSADAPAYQQGQNQLYNELNLGRREEYDVLDKRRGRDPEMGGKPQRRKNPQEGLYNELQKDKMAEAYSEIGMKGERRRGKGHDGLYQGLSTATKDTYDALHMQALPPRRAKRSGSGATNFSLLKQAGDVEENPGPTSMDWIWRILFLVGAATGAHSFEQVQLQQPGAELVKPGASVKMSCKASGYAFSSYWINWMKQKPGQGLEWIGQIYPGDGTENRFSVNFQKAAKSFSLKISDSQLGDAAMYFCAYRSAVNARLMFGDGTQLVVKPNTREQKLISEEDLGSGIQNPDPAVYQLRDSKSSDKSVCLFTDFDSQTNVSQSKDSDVYITDKTVLDMRSMDFKSNSAVAWSNKSDFACANAFNNSIIPEDTFFPSPESSCGTQSFGLLDPKLCYLLDGILFIYGVILTALFLKRGRKKLLYIFKQPFMRPVQTTQEEDGCSCRFPEEEEGGCELRVKFSRSADAPAYQQGQNQLYNELNLGRREEYDVLDKRRGRDPEMGGKPQRRKNPQEGLYNELQKDKMAEAYSEIGMKGERRRGKGHDGLYQGLSTATKDTYDALHMQALPPR

SEQ ID NO: 14537 - protein, 1143 aa, Artificial Sequence
  Synthetic Polypeptide
MALPVTALLLPLALLLHAARPGMRTEDLPKAVVFLEPQWYRVLEKDSVTLKCQGAYSPEDNSTQWFHNESLISSQASSYFIDAATVDDSGEYRCQTNLSTLSDPVQLEVHIGWLLLQAPRWVFKEEDPIHLRCHSWKNTALHKVTYLQNGKGRKYFHHNSDFYIPKATLKDSGSYFCRGLVGSKNVSSETVNITITQGLAVSTISSFFPPGYQGTGGGGSGGGGSGGGGSEFEADIYQTPRYLVIGTGKKITLECSQTMGHDKMYWYQQDPGMELHLIHYSYGVNSTEKGDLSSESTVSRIRTEHFPLTLESARPSHTSQYLCASSEARGLAEFTDTQYFGPGTRLTVLEGKPIPNPLLGLDSTGSGEDLKNVFPPEVAVFEPSEAEISHTQKATLVCLATGFYPDHVELSWWVNGKEVHSGVSTDPQPLKEQPALNDSRYCLSSRLRVSATFWQNPRNHFRCQVQFYGLSENDEWTQDRAKPVTQIVSAEAWGRADCGSQSFGLLDPKLCYLLDGILFIYGVILTALFLKRGRKKLLYIFKQPFMRPVQTTQEEDGCSCRFPEEEEGGCELRVKFSRSADAPAYQQGQNQLYNELNLGRREEYDVLDKRRGRDPEMGGKPQRRKNPQEGLYNELQKDKMAEAYSEIGMKGERRRGKGHDGLYQGLSTATKDTYDALHMQALPPRRAKRSGSGATNFSLLKQAGDVEENPGPTSMDWIWRILFLVGAATGAHSFEQVQLQQPGAELVKPGASVKMSCKASGYAFSSYWINWMKQKPGQGLEWIGQIYPGDGTENRFSVNFQKAAKSFSLKISDSQLGDAAMYFCAYRSAVNARLMFGDGTQLVVKPNTREQKLISEEDLGSGIQNPDPAVYQLRDSKSSDKSVCLFTDFDSQTNVSQSKDSDVYITDKTVLDMRSMDFKSNSAVAWSNKSDFACANAFNNSIIPEDTFFPSPESSCGTQSFGLLDPKLCYLLDGILFIYGVILTALFLKRGRKKLLYIFKQPFMRPVQTTQEEDGCSCRFPEEEEGGCELRVKFSRSADAPAYQQGQNQLYNELNLGRREEYDVLDKRRGRDPEMGGKPQRRKNPQEGLYNELQKDKMAEAYSEIGMKGERRRGKGHDGLYQGLSTATKDTYDALHMQALPPR

SEQ ID NO: 14538 - protein, 1033 aa, Artificial Sequence
  Synthetic Polypeptide
MALPVTALLLPLALLLHAARPGMRTEDLPKAVVFLEPQWYRVLEKDSVTLKCQGAYSPEDNSTQWFHNESLISSQASSYFIDAATVDDSGEYRCQTNLSTLSDPVQLEVHIGWLLLQAPRWVFKEEDPIHLRCHSWKNTALHKVTYLQNGKGRKYFHHNSDFYIPKATLKDSGSYFCRGLVGSKNVSSETVNITITQGLAVSTISSFFPPGYQGTGGGGSGGGGSGGGGSEFEADIYQTPRYLVIGTGKKITLECSQTMGHDKMYWYQQDPGMELHLIHYSYGVNSTEKGDLSSESTVSRIRTEHFPLTLESARPSHTSQYLCASSEARGLAEFTDTQYFGPGTRLTVLEQSFGLLDPKLCYLLDGILFIYGVILTALFLRVKFSRSADAPAYQQGQNQLYNELNLGRREEYDVLDKRRGRDPEMGGKPQRRKNPQEGLYNELQKDKMAEAYSEIGMKGERRRGKGHDGLYQGLSTATKDTYDALHMQALPPRRAKRSGSGATNFSLLKQAGDVEENPGPTSMDWIWRILFLVGAATGAHSFEQVQLQQPGAELVKPGASVKMSCKASGYAFSSYWINWMKQKPGQGLEWIGQIYPGDGTENRFSVNFQKAAKSFSLKISDSQLGDAAMYFCAYRSAVNARLMFGDGTQLVVKPNTRQSFGLLDPKLCYLLDGILFIYGVILTALFLRVKFSRSADAPAYQQGQNQLYNELNLGRREEYDVLDKRRGRDPEMGGKPQRRKNPQEGLYNELQKDKMAEAYSEIGMKGERRRGKGHDGLYQGLSTATKDTYDALHMQALPPRRAKRSGSGVKQTLNFDLLKLAGDVESNPGPSRGHMTEYKPTVRLATRDDVPRAVRTLAAAFADYPATRHTVDPDRHIERVTELQELFLTRVGLDIGKVWVADDGAAVAVWTTPESVEAGAVFAEIGPRMAELSGSRLAAQQQMEGLLAPHRPKEPAWFLATVGVSPDHQGKGLGSAVVLPGVEAAERAGVPAFLETSAPRNLPFYERLGFTVTADVEVPEGPRTWCMTRKPGA

SEQ ID NO: 14539 - protein, 858 aa, Artificial Sequence
  Synthetic Polypeptide
MALPVTALLLPLALLLHAARPGMRTEDLPKAVVFLEPQWYRVLEKDSVTLKCQGAYSPEDNSTQWFHNESLISSQASSYFIDAATVDDSGEYRCQTNLSTLSDPVQLEVHIGWLLLQAPRWVFKEEDPIHLRCHSWKNTALHKVTYLQNGKGRKYFHHNSDFYIPKATLKDSGSYFCRGLVGSKNVSSETVNITITQGLAVSTISSFFPPGYQGTGGGGSGGGGSGGGGSEFEADIYQTPRYLVIGTGKKITLECSQTMGHDKMYWYQQDPGMELHLIHYSYGVNSTEKGDLSSESTVSRIRTEHFPLTLESARPSHTSQYLCASSEARGLAEFTDTQYFGPGTRLTVLEGQPKANPTVTLFPPSSEELQANKATLVCLISDFYPGAVTVAWKADGSPVKAGVETTKPSKQSNNKYAASSYLSLTPEQWKSHRSYSCQVTHEGSTVEKTVAPTECSPIKTDVITMDPKDNCSKDANDTLLLQLTNTSAYYMYLLLLLKSVVYFAIITCCLLRRTAFCCNGEKSRAKRSGSGATNFSLLKQAGDVEENPGPTSMDWIWRILFLVGAATGAHSFEQVQLQQPGAELVKPGASVKMSCKASGYAFSSYWINWMKQKPGQGLEWIGQIYPGDGTENRFSVNFQKAAKSFSLKISDSQLGDAAMYFCAYRSAVNARLMFGDGTQLVVKPNTRASTKGPSVFPLAPSSKSTSGGTAALGCLVKDYFPEPVTVSWNSGALTSGVHTFPAVLQSSGLYSLSSVVTVPSSSLGTQTYICNVNHKPSNTKVDKRVEPKSCEVKTDSTDHVKPKETENTKQPSKSCHKPKAIVHTEKVNMMSLTVLGLRMLFAKTVAVNFLLTAKLFFL

SEQ ID NO: 14540 - protein, 836 aa, Artificial Sequence
  Synthetic Polypeptide
MALPVTALLLPLALLLHAARPGMRTEDLPKAVVFLEPQWYRVLEKDSVTLKCQGAYSPEDNSTQWFHNESLISSQASSYFIDAATVDDSGEYRCQTNLSTLSDPVQLEVHIGWLLLQAPRWVFKEEDPIHLRCHSWKNTALHKVTYLQNGKGRKYFHHNSDFYIPKATLKDSGSYFCRGLVGSKNVSSETVNITITQGLAVSTISSFFPPGYQGTGGGGSGGGGSGGGGSEFEADIYQTPRYLVIGTGKKITLECSQTMGHDKMYWYQQDPGMELHLIHYSYGVNSTEKGDLSSESTVSRIRTEHFPLTLESARPSHTSQYLCASSEARGLAEFTDTQYFGPGTRLTVLEGQPKANPTVTLFPPSSEELQANKATLVCLISDFYPGAVTVAWKADGSPVKAGVETTKPSKQSNNKYAASSYLSLTPEQWKSHRSYSCQVTHEGSTVEKTVAPTECSGRADCGITSASYHQGVLSATILYEILLGKATLYAVLVSALVLMAMVKRKDSRGRAKRSGSGATNFSLLKQAGDVEENPGPTSMDWIWRILFLVGAATGAHSFEQVQLQQPGAELVKPGASVKMSCKASGYAFSSYWINWMKQKPGQGLEWIGQIYPGDGTENRFSVNFQKAAKSFSLKISDSQLGDAAMYFCAYRSAVNARLMFGDGTQLVVKPNTRASTKGPSVFPLAPSSKSTSGGTAALGCLVKDYFPEPVTVSWNSGALTSGVHTFPAVLQSSGLYSLSSVVTVPSSSLGTQTYICNVNHKPSNTKVDKRVEPKSCIPEDTFFPSSDVPCDVKLVEKSFETDTNLNFQNLSVIGFRILLLKVAGFNLLMTLRLWSS

SEQ ID NO: 14541 - protein, 836 aa, Artificial Sequence
  Synthetic Polypeptide
MALPVTALLLPLALLLHAARPGMRTEDLPKAVVFLEPQWYRVLEKDSVTLKCQGAYSPEDNSTQWFHNESLISSQASSYFIDAATVDDSGEYRCQTNLSTLSDPVQLEVHIGWLLLQAPRWVFKEEDPIHLRCHSWKNTALHKVTYLQNGKGRKYFHHNSDFYIPKATLKDSGSYFCRGLVGSKNVSSETVNITITQGLAVSTISSFFPPGYQGTGGGGSGGGGSGGGGSEFEADIYQTPRYLVIGTGKKITLECSQTMGHDKMYWYQQDPGMELHLIHYSYGVNSTEKGDLSSESTVSRIRTEHFPLTLESARPSHTSQYLCASSEARGLAEFTDTQYFGPGTRLTVLEGQPKANPTVTLFPPSSEELQANKATLVCLISDFYPGAVTVAWKADGSPVKAGVETTKPSKQSNNKYAASSYLSLTPEQWKSHRSYSCQVTHEGSTVEKTVAPTECSGRADCGFTSESYQQGVLSATILYEILLGKATLYAVLVSALVLMAMVKRKDSRGRAKRSGSGATNFSLLKQAGDVEENPGPTSMDWIWRILFLVGAATGAHSFEQVQLQQPGAELVKPGASVKMSCKASGYAFSSYWINWMKQKPGQGLEWIGQIYPGDGTENRFSVNFQKAAKSFSLKISDSQLGDAAMYFCAYRSAVNARLMFGDGTQLVVKPNTRASTKGPSVFPLAPSSKSTSGGTAALGCLVKDYFPEPVTVSWNSGALTSGVHTFPAVLQSSGLYSLSSVVTVPSSSLGTQTYICNVNHKPSNTKVDKRVEPKSCIPEDTFFPSPESSCDVKLVEKSFETDTNLNFQNLSVIGFRILLLKVAGFNLLMTLRLWSS

SEQ ID NO: 14542 - protein, 662 aa, Artificial Sequence
  Synthetic Polypeptide
MALPVTALLLPLALLLHAARPGMRTEDLPKAVVFLEPQWYRVLEKDSVTLKCQGAYSPEDNSTQWFHNESLISSQASSYFIDAATVDDSGEYRCQTNLSTLSDPVQLEVHIGWLLLQAPRWVFKEEDPIHLRCHSWKNTALHKVTYLQNGKGRKYFHHNSDFYIPKATLKDSGSYFCRGLVGSKNVSSETVNITITQGLAVSTISSFFPPGYQGTGGGGSGGGGSGGGGSEFEADIYQTPRYLVIGTGKKITLECSQTMGHDKMYWYQQDPGMELHLIHYSYGVNSTEKGDLSSESTVSRIRTEHFPLTLESARPSHTSQYLCASSEARGLAEFTDTQYFGPGTRLTVGGGGSGGGGSGGGGSQVQLQQPGAELVKPGASVKMSCKASGYAFSSYWINWMKQKPGQGLEWIGQIYPGDGTENRFSVNFQKAAKSFSLKISDSQLGDAAMYFCAYRSAVNARLMFGDGTQLVVKPNTRDGNEEMGGITQTPYKVSISGTTVILTCPQYPGSEILWQHNDKNIGGDEDDKNIGSDEDHLSLKEFSELEQSGYYVCYPRGSKPEDANFYLYLRARVCENCMEMDVMSVATIVIVDICITGGLLLLVYYWSKNRKAKAKPVTRGAGAGGRQRGQNKERPPPVPNPDYEPIRKGQRDLYSGLNQRRI

SEQ ID NO: 14543 - protein, 627 aa, Artificial Sequence
  Synthetic Polypeptide
MALPVTALLLPLALLLHAARPGMRTEDLPKAVVFLEPQWYRVLEKDSVTLKCQGAYSPEDNSTQWFHNESLISSQASSYFIDAATVDDSGEYRCQTNLSTLSDPVQLEVHIGWLLLQAPRWVFKEEDPIHLRCHSWKNTALHKVTYLQNGKGRKYFHHNSDFYIPKATLKDSGSYFCRGLVGSKNVSSETVNITITQGLAVSTISSFFPPGYQGTGGGGSGGGGSGGGGSEFEADIYQTPRYLVIGTGKKITLECSQTMGHDKMYWYQQDPGMELHLIHYSYGVNSTEKGDLSSESTVSRIRTEHFPLTLESARPSHTSQYLCASSEARGLAEFTDTQYFGPGTRLTVGGGGSGGGGSGGGGSQVQLQQPGAELVKPGASVKMSCKASGYAFSSYWINWMKQKPGQGLEWIGQIYPGDGTENRFSVNFQKAAKSFSLKISDSQLGDAAMYFCAYRSAVNARLMFGDGTQLVVKPNTRFKIPIEELEDRVFVNCNTSITWVEGTVGTLLSDITRLDLGKRILDPRGIYRCNGTDIYKDKESTVQVHYRMCQSCVELDPATVAGIIVTDVIATLLLALGVFCFAGHETGRLSGAADTQALLRNDQVYQPLRDRDDAQYSHLGGNWARNK

SEQ ID NO: 14544 - protein, 637 aa, Artificial Sequence
  Synthetic Polypeptide
MALPVTALLLPLALLLHAARPGMRTEDLPKAVVFLEPQWYRVLEKDSVTLKCQGAYSPEDNSTQWFHNESLISSQASSYFIDAATVDDSGEYRCQTNLSTLSDPVQLEVHIGWLLLQAPRWVFKEEDPIHLRCHSWKNTALHKVTYLQNGKGRKYFHHNSDFYIPKATLKDSGSYFCRGLVGSKNVSSETVNITITQGLAVSTISSFFPPGYQGTGGGGSGGGGSGGGGSEFEADIYQTPRYLVIGTGKKITLECSQTMGHDKMYWYQQDPGMELHLIHYSYGVNSTEKGDLSSESTVSRIRTEHFPLTLESARPSHTSQYLCASSEARGLAEFTDTQYFGPGTRLTVGGGGSGGGGSGGGGSQVQLQQPGAELVKPGASVKMSCKASGYAFSSYWINWMKQKPGQGLEWIGQIYPGDGTENRFSVNFQKAAKSFSLKISDSQLGDAAMYFCAYRSAVNARLMFGDGTQLVVKPNTRQSIKGNHLVKVYDYQEDGSVLLTCDAEAKNITWFKDGKMIGFLTEDKKKWNLGSNAKDPRGMYQCKGSQNKSKPLQVYYRMCQNCIELNAATISGFLFAEIVSIFVLAVGVYFIAGQDGVRQSRASDKQTLLPNDQLYQPLKDREDDQYSHLQGNQLRRN

SEQ ID NO: 14545 - protein, 620 aa, Artificial Sequence
  Synthetic Polypeptide
MALPVTALLLPLALLLHAARPGMRTEDLPKAVVFLEPQWYRVLEKDSVTLKCQGAYSPEDNSTQWFHNESLISSQASSYFIDAATVDDSGEYRCQTNLSTLSDPVQLEVHIGWLLLQAPRWVFKEEDPIHLRCHSWKNTALHKVTYLQNGKGRKYFHHNSDFYIPKATLKDSGSYFCRGLVGSKNVSSETVNITITQGLAVSTISSFFPPGYQGTGGGGSGGGGSGGGGSEFEADIYQTPRYLVIGTGKKITLECSQTMGHDKMYWYQQDPGMELHLIHYSYGVNSTEKGDLSSESTVSRIRTEHFPLTLESARPSHTSQYLCASSEARGLAEFTDTQYFGPGTRLTVGGGGSGGGGSGGGGSQVQLQQPGAELVKPGASVKMSCKASGYAFSSYWINWMKQKPGQGLEWIGQIYPGDGTENRFSVNFQKAAKSFSLKISDSQLGDAAMYFCAYRSAVNARLMFGDGTQLVVKPNTRQSFGLLDPKLCYLLDGILFIYGVILTALFLRVKFSRSADAPAYQQGQNQLYNELNLGRREEYDVLDKRRGRDPEMGGKPQRRKNPQEGLYNELQKDKMAEAYSEIGMKGERRRGKGHDGLYQGLSTATKDTYDALHMQALPPR

SEQ ID NO: 14546 - protein, 853 aa, Artificial Sequence
  Synthetic Polypeptide
MALPVTALLLPLALLLHAARPGMRTEDLPKAVVFLEPQWYRVLEKDSVTLKCQGAYSPEDNSTQWFHNESLISSQASSYFIDAATVDDSGEYRCQTNLSTLSDPVQLEVHIGWLLLQAPRWVFKEEDPIHLRCHSWKNTALHKVTYLQNGKGRKYFHHNSDFYIPKATLKDSGSYFCRGLVGSKNVSSETVNITITQGLAVSTISSFFPPGYQGTGGGGSGGGGSGGGGSEFEADIYQTPRYLVIGTGKKITLECSQTMGHDKMYWYQQDPGMELHLIHYSYGVNSTEKGDLSSESTVSRIRTEHFPLTLESARPSHTSQYLCASSEARGLAEFTDTQYFGPGTRLTVGGGGSGGGGSGGGGSQVQLQQPGAELVKPGASVKMSCKASGYAFSSYWINWMKQKPGQGLEWIGQIYPGDGTENRFSVNFQKAAKSFSLKISDSQLGDAAMYFCAYRSAVNARLMFGDGTQLVVKPNTRGSGIQNPDPAVYQLRDSKSSDKSVCLFTDFDSQTNVSQSKDSDVYITDKTVLDMRSMDFKSNSAVAWSNKSDFACANAFNNSIIPEDTFFPSPESSCDVKLVEKSFETDTNLNFQNLSVIGFRILLLKVAGFNLLMTLRLWSSRAKRSGSGVKQTLNFDLLKLAGDVESNPGPSRGHMTEYKPTVRLATRDDVPRAVRTLAAAFADYPATRHTVDPDRHIERVTELQELFLTRVGLDIGKVWVADDGAAVAVWTTPESVEAGAVFAEIGPRMAELSGSRLAAQQQMEGLLAPHRPKEPAWFLATVGVSPDHQGKGLGSAVVLPGVEAAERAGVPAFLETSAPRNLPFYERLGFTVTADVEVPEGPRTWCMTRKPGA

SEQ ID NO: 14547 - protein, 885 aa, Artificial Sequence
  Synthetic Polypeptide
MALPVTALLLPLALLLHAARPGMRTEDLPKAVVFLEPQWYRVLEKDSVTLKCQGAYSPEDNSTQWFHNESLISSQASSYFIDAATVDDSGEYRCQTNLSTLSDPVQLEVHIGWLLLQAPRWVFKEEDPIHLRCHSWKNTALHKVTYLQNGKGRKYFHHNSDFYIPKATLKDSGSYFCRGLVGSKNVSSETVNITITQGLAVSTISSFFPPGYQGTGGGGSGGGGSGGGGSEFEADIYQTPRYLVIGTGKKITLECSQTMGHDKMYWYQQDPGMELHLIHYSYGVNSTEKGDLSSESTVSRIRTEHFPLTLESARPSHTSQYLCASSEARGLAEFTDTQYFGPGTRLTVGGGGSGGGGSGGGGSQVQLQQPGAELVKPGASVKMSCKASGYAFSSYWINWMKQKPGQGLEWIGQIYPGDGTENRFSVNFQKAAKSFSLKISDSQLGDAAMYFCAYRSAVNARLMFGDGTQLVVKPNLEDLKNVFPPEVAVFEPSEAEISHTQKATLVCLATGFYPDHVELSWWVNGKEVHSGVSTDPQPLKEQPALNDSRYCLSSRLRVSATFWQNPRNHFRCQVQFYGLSENDEWTQDRAKPVTQIVSAEAWGRADCGFTSESYQQGVLSATILYEILLGKATLYAVLVSALVLMAMVKRKDSRGRAKRSGSGATNFSLLKQAGDVEENPGPTRGHMTEYKPTVRLATRDDVPRAVRTLAAAFADYPATRHTVDPDRHIERVTELQELFLTRVGLDIGKVWVADDGAAVAVWTTPESVEAGAVFAEIGPRMAELSGSRLAAQQQMEGLLAPHRPKEPAWFLATVGVSPDHQGKGLGSAVVLPGVEAAERAGVPAFLETSAPRNLPFYERLGFTVTADVEVPEGPRTWCMTRKPGA

SEQ ID NO: 14548 - protein, 935 aa, Artificial Sequence
  Synthetic Polypeptide
MALPVTALLLPLALLLHAARPGMRTEDLPKAVVFLEPQWYRVLEKDSVTLKCQGAYSPEDNSTQWFHNESLISSQASSYFIDAATVDDSGEYRCQTNLSTLSDPVQLEVHIGWLLLQAPRWVFKEEDPIHLRCHSWKNTALHKVTYLQNGKGRKYFHHNSDFYIPKATLKDSGSYFCRGLVGSKNVSSETVNITITQGLAVSTISSFFPPGYQGTGGGGSGGGGSGGGGSEFEADIYQTPRYLVIGTGKKITLECSQTMGHDKMYWYQQDPGMELHLIHYSYGVNSTEKGDLSSESTVSRIRTEHFPLTLESARPSHTSQYLCASSEARGLAEFTDTQYFGPGTRLTVGGGGSGGGGSGGGGSQVQLQQPGAELVKPGASVKMSCKASGYAFSSYWINWMKQKPGQGLEWIGQIYPGDGTENRFSVNFQKAAKSFSLKISDSQLGDAAMYFCAYRSAVNARLMFGDGTQLVVKPNTREQKLISEEDLGSGTPFPSLAPPIMLLVDGKQQMVVVCLVLDVAPPGLDSPIWFSAGNGSALDAFTYGPSPATDGTWTNLAHLSLPSEELASWEPLVCHTGPGAEGHSRSTQPMHLSGEASTARTCPQEPLRGTPGGALWLGVLRLLLFKLLLFDLLLTCSCLCDPAGPLPSPATTTRLRALGSHRLHPATETGGREATSSPRPQPRDRRWGDTPPGRKPGSPVRAKRSGSGVKQTLNFDLLKLAGDVESNPGPSRSRGHMTEYKPTVRLATRDDVPRAVRTLAAAFADYPATRHTVDPDRHIERVTELQELFLTRVGLDIGKVWVADDGAAVAVWTTPESVEAGAVFAEIGPRMAELSGSRLAAQQQMEGLLAPHRPKEPAWFLATVGVSPDHQGKGLGSAVVLPGVEAAERAGVPAFLETSAPRNLPFYERLGFTVTADVEVPEGPRTWCMTRKPGA

SEQ ID NO: 14549 - protein, 758 aa, Artificial Sequence
  Synthetic Polypeptide
MALPVTALLLPLALLLHAARPGMRTEDLPKAVVFLEPQWYRVLEKDSVTLKCQGAYSPEDNSTQWFHNESLISSQASSYFIDAATVDDSGEYRCQTNLSTLSDPVQLEVHIGWLLLQAPRWVFKEEDPIHLRCHSWKNTALHKVTYLQNGKGRKYFHHNSDFYIPKATLKDSGSYFCRGLVGSKNVSSETVNITITQGLAVSTISSFFPPGYQGTGGGGSGGGGSGGGGSEFEADIYQTPRYLVIGTGKKITLECSQTMGHDKMYWYQQDPGMELHLIHYSYGVNSTEKGDLSSESTVSRIRTEHFPLTLESARPSHTSQYLCASSEARGLAEFTDTQYFGPGTRLTVLEDLKNVFPPEVAVFEPSEAEISHTQKATLVCLATGFYPDHVELSWWVNGKEVHSGVSTDPQPLKEQPALNDSRYCLSSRLRVSATFWQNPRNHFRCQVQFYGLSENDEWTQDRAKPVTQIVSAEAWGRADCGFTSESYQQGVLSATILYEILLGKATLYAVLVSALVLMAMVKRKDSRGRAKRSGSGATNFSLLKQAGDVEENPGPTRGHMTEYKPTVRLATRDDVPRAVRTLAAAFADYPATRHTVDPDRHIERVTELQELFLTRVGLDIGKVWVADDGAAVAVWTTPESVEAGAVFAEIGPRMAELSGSRLAAQQQMEGLLAPHRPKEPAWFLATVGVSPDHQGKGLGSAVVLPGVEAAERAGVPAFLETSAPRNLPFYERLGFTVTADVEVPEGPRTWCMTRKPGA

SEQ ID NO: 14550 - protein, 528 aa, Artificial Sequence
  Synthetic Polypeptide
MALPVTALLLPLALLLHAARPGMRTEDLPKAVVFLEPQWYRVLEKDSVTLKCQGAYSPEDNSTQWFHNESLISSQASSYFIDAATVDDSGEYRCQTNLSTLSDPVQLEVHIGWLLLQAPRWVFKEEDPIHLRCHSWKNTALHKVTYLQNGKGRKYFHHNSDFYIPKATLKDSGSYFCRGLVGSKNVSSETVNITITQGLAVSTISSFFPPGYQGTGGGGSGGGGSGGGGSEFEADIYQTPRYLVIGTGKKITLECSQTMGHDKMYWYQQDPGMELHLIHYSYGVNSTEKGDLSSESTVSRIRTEHFPLTLESARPSHTSQYLCASSEARGLAEFTDTQYFGPGTRLTVLEDLKNVFPPEVAVFEPSEAEISHTQKATLVCLATGFYPDHVELSWWVNGKEVHSGVSTDPQPLKEQPALNDSRYCLSSRLRVSATFWQNPRNHFRCQVQFYGLSENDEWTQDRAKPVTQIVSAEAWGRADCGFTSESYQQGVLSATILYEILLGKATLYAVLVSALVLMAMVKRKDSRG

SEQ ID NO: 14551 - protein, 441 aa, Artificial Sequence; identical to SEQ ID NO: 14257
  Synthetic Polypeptide

SEQ ID NO: 14552 - protein, 275 aa, Artificial Sequence; identical to SEQ ID NO: 14258
  Synthetic Polypeptide

SEQ ID NO: 14553 - protein, 776 aa, Artificial Sequence
  Synthetic Polypeptide
MALPVTALLLPLALLLHAARPGMRTEDLPKAVVFLEPQWYRVLEKDSVTLKCQGAYSPEDNSTQWFHNESLISSQASSYFIDAATVDDSGEYRCQTNLSTLSDPVQLEVHIGWLLLQAPRWVFKEEDPIHLRCHSWKNTALHKVTYLQNGKGRKYFHHNSDFYIPKATLKDSGSYFCRGLVGSKNVSSETVNITITQGLAVSTISSFFPPGYQGTGGGGSGGGGSGGGGSEFEADIYQTPRYLVIGTGKKITLECSQTMGHDKMYWYQQDPGMELHLIHYSYGVNSTEKGDLSSESTVSRIRTEHFPLTLESARPSHTSQYLCASSEARGLAEFTDTQYFGPGTRLTVLEGKPIPNPLLGLDSTGSGEDLKNVFPPEVAVFEPSEAEISHTQKATLVCLATGFYPDHVELSWWVNGKEVHSGVCTDPQPLKEQPALNDSRYCLSSRLRVSATFWQNPRNHFRCQVQFYGLSENDEWTQDRAKPVTQIVSAEAWGRADCGFTSESYQQGVLSATILYEILLGKATLYAVLVSALVLMAMVKRKDSRGRAKRSGSGATNFSLLKQAGDVEENPGPTRGHMTEYKPTVRLATRDDVPRAVRTLAAAFADYPATRHTVDPDRHIERVTELQELFLTRVGLDIGKVWVADDGAAVAVWTTPESVEAGAVFAEIGPRMAELSGSRLAAQQQMEGLLAPHRPKEPAWFLATVGVSPDHQGKGLGSAVVLPGVEAAERAGVPAFLETSAPRNLPFYERLGFTVTADVEVPEGPRTWCMTRKPGA

SEQ ID NO: 14554 - protein, 546 aa, Artificial Sequence
  Synthetic Polypeptide
MALPVTALLLPLALLLHAARPGMRTEDLPKAVVFLEPQWYRVLEKDSVTLKCQGAYSPEDNSTQWFHNESLISSQASSYFIDAATVDDSGEYRCQTNLSTLSDPVQLEVHIGWLLLQAPRWVFKEEDPIHLRCHSWKNTALHKVTYLQNGKGRKYFHHNSDFYIPKATLKDSGSYFCRGLVGSKNVSSETVNITITQGLAVSTISSFFPPGYQGTGGGGSGGGGSGGGGSEFEADIYQTPRYLVIGTGKKITLECSQTMGHDKMYWYQQDPGMELHLIHYSYGVNSTEKGDLSSESTVSRIRTEHFPLTLESARPSHTSQYLCASSEARGLAEFTDTQYFGPGTRLTVLEGKPIPNPLLGLDSTGSGEDLKNVFPPEVAVFEPSEAEISHTQKATLVCLATGFYPDHVELSWWVNGKEVHSGVCTDPQPLKEQPALNDSRYCLSSRLRVSATFWQNPRNHFRCQVQFYGLSENDEWTQDRAKPVTQIVSAEAWGRADCGFTSESYQQGVLSATILYEILLGKATLYAVLVSALVLMAMVKRKDSRG

SEQ ID NO: 14555 - protein, 453 aa, Artificial Sequence; identical to SEQ ID NO: 14261
  Synthetic Polypeptide

SEQ ID NO: 14556 - protein, 287 aa, Artificial Sequence; identical to SEQ ID NO: 14262
  Synthetic Polypeptide

SEQ ID NO: 14557 - protein, 853 aa, Artificial Sequence
  Synthetic Polypeptide
MALPVTALLLPLALLLHAARPGMRTEDLPKAVVFLEPQWYRVLEKDSVTLKCQGAYSPEDNSTQWFHNESLISSQASSYFIDAATVDDSGEYRCQTNLSTLSDPVQLEVHIGWLLLQAPRWVFKEEDPIHLRCHSWKNTALHKVTYLQNGKGRKYFHHNSDFYIPKATLKDSGSYFCRGLVGSKNVSSETVNITITQGLAVSTISSFFPPGYQGTGGGGSGGGGSGGGGSEFEADIYQTPRYLVIGTGKKITLECSQTMGHDKMYWYQQDPGMELHLIHYSYGVNSTEKGDLSSESTVSRIRTEHFPLTLESARPSHTSQYLCASSEARGLAEFTDTQYFGPGTRLTVGGGGSGGGGSGGGGSQVQLQQPGAELVKPGASVKMSCKASGYAFSSYWINWMKQKPGQGLEWIGQIYPGDGTENRFSVNFQKAAKSFSLKISDSQLGDAAMYFCAYRSAVNARLMFGDGTQLVVKPNTRGSGIQNPDPAVYQLRDSKSSDKSVCLFTDFDSQTNVSQSKDSDVYITDKTVLDMRSMDFKSNSAVAWSNKSDFACANAFNNSIIPEDTFFPSSDVPCDVKLVEKSFETDTNLNFQNLSVIGFRILLLKVAGFNLLMTLRLWSSRAKRSGSGVKQTLNFDLLKLAGDVESNPGPSRGHMTEYKPTVRLATRDDVPRAVRTLAAAFADYPATRHTVDPDRHIERVTELQELFLTRVGLDIGKVWVADDGAAVAVWTTPESVEAGAVFAEIGPRMAELSGSRLAAQQQMEGLLAPHRPKEPAWFLATVGVSPDHQGKGLGSAVVLPGVEAAERAGVPAFLETSAPRNLPFYERLGFTVTADVEVPEGPRTWCMTRKPGA

SEQ ID NO: 14558 - protein, 885 aa, Artificial Sequence
  Synthetic Polypeptide
MALPVTALLLPLALLLHAARPGMRTEDLPKAVVFLEPQWYRVLEKDSVTLKCQGAYSPEDNSTQWFHNESLISSQASSYFIDAATVDDSGEYRCQTNLSTLSDPVQLEVHIGWLLLQAPRWVFKEEDPIHLRCHSWKNTALHKVTYLQNGKGRKYFHHNSDFYIPKATLKDSGSYFCRGLVGSKNVSSETVNITITQGLAVSTISSFFPPGYQGTGGGGSGGGGSGGGGSEFEADIYQTPRYLVIGTGKKITLECSQTMGHDKMYWYQQDPGMELHLIHYSYGVNSTEKGDLSSESTVSRIRTEHFPLTLESARPSHTSQYLCASSEARGLAEFTDTQYFGPGTRLTVGGGGSGGGGSGGGGSQVQLQQPGAELVKPGASVKMSCKASGYAFSSYWINWMKQKPGQGLEWIGQIYPGDGTENRFSVNFQKAAKSFSLKISDSQLGDAAMYFCAYRSAVNARLMFGDGTQLVVKPNLEDLKNVFPPEVAVFEPSKAEIAHTQKATLVCLATGFYPDHVELSWWVNGKEVHSGVSTDPQPLKEQPALNDSRYCLSSRLRVSATFWQNPRNHFRCQVQFYGLSENDEWTQDRAKPVTQIVSAEAWGRADCGITSASYHQGVLSATILYEILLGKATLYAVLVSALVLMAMVKRKDSRGRAKRSGSGATNFSLLKQAGDVEENPGPTRGHMTEYKPTVRLATRDDVPRAVRTLAAAFADYPATRHTVDPDRHIERVTELQELFLTRVGLDIGKVWVADDGAAVAVWTTPESVEAGAVFAEIGPRMAELSGSRLAAQQQMEGLLAPHRPKEPAWFLATVGVSPDHQGKGLGSAVVLPGVEAAERAGVPAFLETSAPRNLPFYERLGFTVTADVEVPEGPRTWCMTRKPGA

SEQ ID NO: 14559 - protein, 1203 aa, Artificial Sequence
  Synthetic Polypeptide
MALPVTALLLPLALLLHAARPGMRTEDLPKAVVFLEPQWYRVLEKDSVTLKCQGAYSPEDNSTQWFHNESLISSQASSYFIDAATVDDSGEYRCQTNLSTLSDPVQLEVHIGWLLLQAPRWVFKEEDPIHLRCHSWKNTALHKVTYLQNGKGRKYFHHNSDFYIPKATLKDSGSYFCRGLVGSKNVSSETVNITITQGLAVSTISSFFPPGYQGTGGGGSGGGGSGGGGSEFEADIYQTPRYLVIGTGKKITLECSQTMGHDKMYWYQQDPGMELHLIHYSYGVNSTEKGDLSSESTVSRIRTEHFPLTLESARPSHTSQYLCASSEARGLAEFTDTQYFGPGTRLTVLEIQNPDPAVYQLRDSKSSDKSVCLFTDFDSQTNVSQSKDSDVYITDKCVLDMRSMDFKSNSAVAWSNKSDFACANAFNNSIIPEDTFFPSSDVPCDVKLVEKSFETDTNLNFQNLSVIGFRILLLKVAGFNLLMTLRLWSSRAKRSGSGVKQTLNFDLLKLAGDVESNPGPTSMDWIWRILFLVGAATGAHSGPQVQLQESGGGLAQAGGSLRLSCAASGRTFSMGWFRQAPGKEREFVAAITYSGGSPYYASSVRGRFTISRDNAKNTVYLQMNSLKPEDTAVYYCAANPTYGSDWNAENWGQGTQVTVSSGSGGGGSGGGGSGGGGSFEQVQLQQPGAELVKPGASVKMSCKASGYAFSSYWINWMKQKPGQGLEWIGQIYPGDGTENRFSVNFQKAAKSFSLKISDSQLGDAAMYFCAYRSAVNARLMFGDGTQLVVKPNTREDLKNVFPPEVAVFEPSKAEIAHTQKATLVCLATGFYPDHVELSWWVNGKEVHSGVCTDPQPLKEQPALNDSRYCLSSRLRVSATFWQNPRNHFRCQVQFYGLSENDEWTQDRAKPVTQIVSAEAWGRADCGITSASYHQGVLSATILYEILLGKATLYAVLVSALVLMAMVKRKDSRGRAKRSGSGATNFSLLKQAGDVEENPGPSRGHMTEYKPTVRLATRDDVPRAVRTLAAAFADYPATRHTVDPDRHIERVTELQELFLTRVGLDIGKVWVADDGAAVAVWTTPESVEAGAVFAEIGPRMAELSGSRLAAQQQMEGLLAPHRPKEPAWFLATVGVSPDHQGKGLGSAVVLPGVEAAERAGVPAFLETSAPRNLPFYERLGFTVTADVEVPEGPRTWCMTRKPGA

SEQ ID NO: 14560 - protein, 1202 aa, Artificial Sequence
  Synthetic Polypeptide
MALPVTALLLPLALLLHAARPGMRTEDLPKAVVFLEPQWYRVLEKDSVTLKCQGAYSPEDNSTQWFHNESLISSQASSYFIDAATVDDSGEYRCQTNLSTLSDPVQLEVHIGWLLLQAPRWVFKEEDPIHLRCHSWKNTALHKVTYLQNGKGRKYFHHNSDFYIPKATLKDSGSYFCRGLVGSKNVSSETVNITITQGLAVSTISSFFPPGYQGTGGGGSGGGGSGGGGSEFEADIYQTPRYLVIGTGKKITLECSQTMGHDKMYWYQQDPGMELHLIHYSYGVNSTEKGDLSSESTVSRIRTEHFPLTLESARPSHTSQYLCASSEARGLAEFTDTQYFGPGTRLTVLEDLKNVFPPEVAVFEPSKAEIAHTQKATLVCLATGFYPDHVELSWWVNGKEVHSGVCTDPQPLKEQPALNDSRYCLSSRLRVSATFWQNPRNHFRCQVQFYGLSENDEWTQDRAKPVTQIVSAEAWGRADCGITSASYHQGVLSATILYEILLGKATLYAVLVSALVLMAMVKRKDSRGRAKRSGSGATNFSLLKQAGDVEENPGPTSMDWIWRILFLVGAATGAHSGPQVQLQESGGGLAQAGGSLRLSCAASGRTFSMGWFRQAPGKEREFVAAITYSGGSPYYASSVRGRFTISRDNAKNTVYLQMNSLKPEDTAVYYCAANPTYGSDWNAENWGQGTQVTVSSGSGGGGSGGGGSGGGGSFEQVQLQQPGAELVKPGASVKMSCKASGYAFSSYWINWMKQKPGQGLEWIGQIYPGDGTENRFSVNFQKAAKSFSLKISDSQLGDAAMYFCAYRSAVNARLMFGDGTQLVVKPNTRIQNPDPAVYQLRDSKSSDKSVCLFTDFDSQTNVSQSKDSDVYITDKCVLDMRSMDFKSNSAVAWSNKSDFACANAFNNSIIPEDTFFPSSDVPCDVKLVEKSFETDTNLNFQNLSVIGFRILLLKVAGFNLLMTLRLWSSRAKRSGSGVKQTLNFDLLKLAGDVESNPGPSRGHMTEYKPTVRLATRDDVPRAVRTLAAAFADYPATRHTVDPDRHIERVTELQELFLTRVGLDIGKVWVADDGAAVAVWTTPESVEAGAVFAEIGPRMAELSGSRLAAQQQMEGLLAPHRPKEPAWFLATVGVSPDHQGKGLGSAVVLPGVEAAERAGVPAFLETSAPRNLPFYERLGFTVTADVEVPEGPRTWCMTRKPGA

SEQ ID NO: 14561 - protein, 1202 aa, Artificial Sequence
  Synthetic Polypeptide
MALPVTALLLPLALLLHAARPGMRTEDLPKAVVFLEPQWYRVLEKDSVTLKCQGAYSPEDNSTQWFHNESLISSQASSYFIDAATVDDSGEYRCQTNLSTLSDPVQLEVHIGWLLLQAPRWVFKEEDPIHLRCHSWKNTALHKVTYLQNGKGRKYFHHNSDFYIPKATLKDSGSYFCRGLVGSKNVSSETVNITITQGLAVSTISSFFPPGYQGTGGGGSGGGGSGGGGSEFEADIYQTPRYLVIGTGKKITLECSQTMGHDKMYWYQQDPGMELHLIHYSYGVNSTEKGDLSSESTVSRIRTEHFPLTLESARPSHTSQYLCASSEARGLAEFTDTQYFGPGTRLTVLEDLKNVFPPEVAVFEPSEAEISHTQKATLVCLATGFYPDHVELSWWVNGKEVHSGVCTDPQPLKEQPALNDSRYCLSSRLRVSATFWQNPRNHFRCQVQFYGLSENDEWTQDRAKPVTQIVSAEAWGRADCGFTSESYQQGVLSATILYEILLGKATLYAVLVSALVLMAMVKRKDSRGRAKRSGSGATNFSLLKQAGDVEENPGPTSMDWIWRILFLVGAATGAHSGPQVQLQESGGGLAQAGGSLRLSCAASGRTFSMGWFRQAPGKEREFVAAITYSGGSPYYASSVRGRFTISRDNAKNTVYLQMNSLKPEDTAVYYCAANPTYGSDWNAENWGQGTQVTVSSGSGGGGSGGGGSGGGGSFEQVQLQQPGAELVKPGASVKMSCKASGYAFSSYWINWMKQKPGQGLEWIGQIYPGDGTENRFSVNFQKAAKSFSLKISDSQLGDAAMYFCAYRSAVNARLMFGDGTQLVVKPNTRIQNPDPAVYQLRDSKSSDKSVCLFTDFDSQTNVSQSKDSDVYITDKCVLDMRSMDFKSNSAVAWSNKSDFACANAFNNSIIPEDTFFPSPESSCDVKLVEKSFETDTNLNFQNLSVIGFRILLLKVAGFNLLMTLRLWSSRAKRSGSGVKQTLNFDLLKLAGDVESNPGPSRGHMTEYKPTVRLATRDDVPRAVRTLAAAFADYPATRHTVDPDRHIERVTELQELFLTRVGLDIGKVWVADDGAAVAVWTTPESVEAGAVFAEIGPRMAELSGSRLAAQQQMEGLLAPHRPKEPAWFLATVGVSPDHQGKGLGSAVVLPGVEAAERAGVPAFLETSAPRNLPFYERLGFTVTADVEVPEGPRTWCMTRKPGA

SEQ ID NO: 14562 - protein, 969 aa, Artificial Sequence
  Synthetic Polypeptide
MALPVTALLLPLALLLHAARPGMRTEDLPKAVVFLEPQWYRVLEKDSVTLKCQGAYSPEDNSTQWFHNESLISSQASSYFIDAATVDDSGEYRCQTNLSTLSDPVQLEVHIGWLLLQAPRWVFKEEDPIHLRCHSWKNTALHKVTYLQNGKGRKYFHHNSDFYIPKATLKDSGSYFCRGLVGSKNVSSETVNITITQGLAVSTISSFFPPGYQGTGGGGSGGGGSGGGGSEFEADIYQTPRYLVIGTGKKITLECSQTMGHDKMYWYQQDPGMELHLIHYSYGVNSTEKGDLSSESTVSRIRTEHFPLTLESARPSHTSQYLCASSEARGLAEFTDTQYFGPGTRLTVLEDLKNVFPPEVAVFEPSEAEISHTQKATLVCLATGFYPDHVELSWWVNGKEVHSGVCTDPQPLKEQPALNDSRYCLSSRLRVSATFWQNPRNHFRCQVQFYGLSENDEWTQDRAKPVTQIVSAEAWGRADCGFTSESYQQGVLSATILYEILLGKATLYAVLVSALVLMAMVKRKDSRGRAKRSGSGATNFSLLKQAGDVEENPGPTSMDWIWRILFLVGAATGAHSGPQVQLQESGGGLAQAGGSLRLSCAASGRTFSMGWFRQAPGKEREFVAAITYSGGSPYYASSVRGRFTISRDNAKNTVYLQMNSLKPEDTAVYYCAANPTYGSDWNAENWGQGTQVTVSSGSGGGGSGGGGSGGGGSFEQVQLQQPGAELVKPGASVKMSCKASGYAFSSYWINWMKQKPGQGLEWIGQIYPGDGTENRFSVNFQKAAKSFSLKISDSQLGDAAMYFCAYRSAVNARLMFGDGTQLVVKPNTRIQNPDPAVYQLRDSKSSDKSVCLFTDFDSQTNVSQSKDSDVYITDKCVLDMRSMDFKSNSAVAWSNKSDFACANAFNNSIIPEDTFFPSPESSCDVKLVEKSFETDTNLNFQNLSVIGFRILLLKVAGFNLLMTLRLWSS

SEQ ID NO: 14563 - protein, 1194 aa, Artificial Sequence
  Synthetic Polypeptide
MALPVTALLLPLALLLHAARPGMRTEDLPKAVVFLEPQWYRVLEKDSVTLKCQGAYSPEDNSTQWFHNESLISSQASSYFIDAATVDDSGEYRCQTNLSTLSDPVQLEVHIGWLLLQAPRWVFKEEDPIHLRCHSWKNTALHKVTYLQNGKGRKYFHHNSDFYIPKATLKDSGSYFCRGLVGSKNVSSETVNITITQGLAVSTISSFFPPGYQGTGGGGSGGGGSGGGGSEFEADIYQTPRYLVIGTGKKITLECSQTMGHDKMYWYQQDPGMELHLIHYSYGVNSTEKGDLSSESTVSRIRTEHFPLTLESARPSHTSQYLCASSEARGLAEFTDTQYFGPGTRLTVLEDLKNVFPPEVAVFEPSEAEISHTQKATLVCLATGFYPDHVELSWWVNGKEVHSGVCTDPQPLKEQPALNDSRYCLSSRLRVSATFWQNPRNHFRCQVQFYGLSENDEWTQDRAKPVTQIVSAEAWGRADCGFTSESYQQGVLSATILYEILLGKATLYAVLVSALVLMAMVKRKDSRGRAKRSGSGATNFSLLKQAGDVEENPGPTSMDWIWRILFLVGAATGAHSGPQVQLQESGGGLAQAGGSLRLSCAASGRTFSMGWFRQAPGKEREFVAAITYSGGSPYYASSVRGRFTISRDNAKNTVYLQMNSLKPEDTAVYYCAANPTYGSDWNAENWGQGTQVTVSSGSGGGGSGGGGSGGGGSFEQVQLQQPGAELVKPGASVKMSCKASGYAFSSYWINWMKQKPGQGLEWIGQIYPGDGTENRFSVNFQKAAKSFSLKISDSQLGDAAMYFCAYRSAVNARLMFGDGTQLVVKPNTRIQNPDPAVYQLRDSKSSDKSVCLFTDFDSQTNVSQSKDSDVYITDKCVLDMRSMDFKSNSAVAWSNKSDFACANAFNNSIIPEDTFFPSPESSCDVKLVEKSFETDTNLNFQNLSVIGFRILLLKVAGFNLLMTLRLWSSRAKRSGSGVKQTLNFDLLKLAGDVESNPGPSRGGIHTMATYEVLCEVARKLGTDDREVVLFLLNVFIPQPTLAQLIGALRALKEEGRLTFPLLAECLFRAGRRDLLRDLLHLDPRFLERHLAGTMSYFSPYQLTVLHVDGELCARDIRSLIFLSKDTIGSRSTPQTFLHWVYCMENLDLLGPTDVDALMSMLRSLSRVDLQRQVQTLMGLHLSGPSHSQHYRHTP

SEQ ID NO: 14564 - protein, 973 aa, Artificial Sequence
  Synthetic Polypeptide
MALPVTALLLPLALLLHAARPGMRTEDLPKAVVFLEPQWYRVLEKDSVTLKCQGAYSPEDNSTQWFHNESLISSQASSYFIDAATVDDSGEYRCQTNLSTLSDPVQLEVHIGWLLLQAPRWVFKEEDPIHLRCHSWKNTALHKVTYLQNGKGRKYFHHNSDFYIPKATLKDSGSYFCRGLVGSKNVSSETVNITITQGLAVSTISSFFPPGYQGTGGGGSGGGGSGGGGSEFEADIYQTPRYLVIGTGKKITLECSQTMGHDKMYWYQQDPGMELHLIHYSYGVNSTEKGDLSSESTVSRIRTEHFPLTLESARPSHTSQYLCASSEARGLAEFTDTQYFGPGTRLTVLEIQNPDPAVYQLRDSKSSDKSVCLFTDFDSQTNVSQSKDSDVYITDKCVLDMRSMDFKSNSAVAWSNKSDFACANAFNNSIIPEDTFFPSPESSCDVKLVEKSFETDTNLNFQNLSVIGFRILLLKVAGFNLLMTLRLWSSRAKRSGSGVKQTLNFDLLKLAGDVESNPGPTSMDWIWRILFLVGAATGAHSGPQVQLQESGGGLAQAGGSLRLSCAASGRTFSMGWFRQAPGKEREFVAAITYSGGSPYYASSVRGRFTISRDNAKNTVYLQMNSLKPEDTAVYYCAANPTYGSDWNAENWGQGTQVTVSSGSGGGGSGGGGSGGGGSFEQVQLQQPGAELVKPGASVKMSCKASGYAFSSYWINWMKQKPGQGLEWIGQIYPGDGTENRFSVNFQKAAKSFSLKISDSQLGDAAMYFCAYRSAVNARLMFGDGTQLVVKPNTREDLKNVFPPEVAVFEPSEAEISHTQKATLVCLATGFYPDHVELSWWVNGKEVHSGVCTDPQPLKEQPALNDSRYCLSSRLRVSATFWQNPRNHFRCQVQFYGLSENDEWTQDRAKPVTQIVSAEAWGRADCGFTSESYQQGVLSATILYEILLGKATLYAVLVSALVLMAMVKRKDSRG

SEQ ID NO: 14565 - protein, 1195 aa, Artificial Sequence
  Synthetic Polypeptide
MALPVTALLLPLALLLHAARPGMRTEDLPKAVVFLEPQWYRVLEKDSVTLKCQGAYSPEDNSTQWFHNESLISSQASSYFIDAATVDDSGEYRCQTNLSTLSDPVQLEVHIGWLLLQAPRWVFKEEDPIHLRCHSWKNTALHKVTYLQNGKGRKYFHHNSDFYIPKATLKDSGSYFCRGLVGSKNVSSETVNITITQGLAVSTISSFFPPGYQGTGGGGSGGGGSGGGGSEFEADIYQTPRYLVIGTGKKITLECSQTMGHDKMYWYQQDPGMELHLIHYSYGVNSTEKGDLSSESTVSRIRTEHFPLTLESARPSHTSQYLCASSEARGLAEFTDTQYFGPGTRLTVLEIQNPDPAVYQLRDSKSSDKSVCLFTDFDSQTNVSQSKDSDVYITDKCVLDMRSMDFKSNSAVAWSNKSDFACANAFNNSIIPEDTFFPSPESSCDVKLVEKSFETDTNLNFQNLSVIGFRILLLKVAGFNLLMTLRLWSSRAKRSGSGVKQTLNFDLLKLAGDVESNPGPTSMDWIWRILFLVGAATGAHSGPQVQLQESGGGLAQAGGSLRLSCAASGRTFSMGWFRQAPGKEREFVAAITYSGGSPYYASSVRGRFTISRDNAKNTVYLQMNSLKPEDTAVYYCAANPTYGSDWNAENWGQGTQVTVSSGSGGGGSGGGGSGGGGSFEQVQLQQPGAELVKPGASVKMSCKASGYAFSSYWINWMKQKPGQGLEWIGQIYPGDGTENRFSVNFQKAAKSFSLKISDSQLGDAAMYFCAYRSAVNARLMFGDGTQLVVKPNTREDLKNVFPPEVAVFEPSEAEISHTQKATLVCLATGFYPDHVELSWWVNGKEVHSGVCTDPQPLKEQPALNDSRYCLSSRLRVSATFWQNPRNHFRCQVQFYGLSENDEWTQDRAKPVTQIVSAEAWGRADCGFTSESYQQGVLSATILYEILLGKATLYAVLVSALVLMAMVKRKDSRGRAKRSGSGATNFSLLKQAGDVEENPGPSRGGIHTMATYEVLCEVARKLGTDDREVVLFLLNVFIPQPTLAQLIGALRALKEEGRLTFPLLAECLFRAGRRDLLRDLLHLDPRFLERHLAGTMSYFSPYQLTVLHVDGELCARDIRSLIFLSKDTIGSRSTPQTFLHWVYCMENLDLLGPTDVDALMSMLRSLSRVDLQRQVQTLMGLHLSGPSHSQHYRHTP

SEQ ID NO: 14566 - protein, 1202 aa, Artificial Sequence
  Synthetic Polypeptide
MALPVTALLLPLALLLHAARPGMRTEDLPKAVVFLEPQWYRVLEKDSVTLKCQGAYSPEDNSTQWFHNESLISSQASSYFIDAATVDDSGEYRCQTNLSTLSDPVQLEVHIGWLLLQAPRWVFKEEDPIHLRCHSWKNTALHKVTYLQNGKGRKYFHHNSDFYIPKATLKDSGSYFCRGLVGSKNVSSETVNITITQGLAVSTISSFFPPGYQGTGGGGSGGGGSGGGGSEFEADIYQTPRYLVIGTGKKITLECSQTMGHDKMYWYQQDPGMELHLIHYSYGVNSTEKGDLSSESTVSRIRTEHFPLTLESARPSHTSQYLCASSEARGLAEFTDTQYFGPGTRLTVLEDLKNVFPPEVAVFEPSEAEISHTQKATLVCLATGFYPDHVELSWWVNGKEVHSGVSTDPQPLKEQPALNDSRYCLSSRLRVSATFWQNPRNHFRCQVQFYGLSENDEWTQDRAKPVTQIVSAEAWGRADCGFTSESYQQGVLSATILYEILLGKATLYAVLVSALVLMAMVKRKDSRGRAKRSGSGATNFSLLKQAGDVEENPGPTSMDWIWRILFLVGAATGAHSGPQVQLQESGGGLAQAGGSLRLSCAASGRTFSMGWFRQAPGKEREFVAAITYSGGSPYYASSVRGRFTISRDNAKNTVYLQMNSLKPEDTAVYYCAANPTYGSDWNAENWGQGTQVTVSSGSGGGGSGGGGSGGGGSFEQVQLQQPGAELVKPGASVKMSCKASGYAFSSYWINWMKQKPGQGLEWIGQIYPGDGTENRFSVNFQKAAKSFSLKISDSQLGDAAMYFCAYRSAVNARLMFGDGTQLVVKPNTRIQNPDPAVYQLRDSKSSDKSVCLFTDFDSQTNVSQSKDSDVYITDKTVLDMRSMDFKSNSAVAWSNKSDFACANAFNNSIIPEDTFFPSPESSCDVKLVEKSFETDTNLNFQNLSVIGFRILLLKVAGFNLLMTLRLWSSRAKRSGSGVKQTLNFDLLKLAGDVESNPGPSRGHMTEYKPTVRLATRDDVPRAVRTLAAAFADYPATRHTVDPDRHIERVTELQELFLTRVGLDIGKVWVADDGAAVAVWTTPESVEAGAVFAEIGPRMAELSGSRLAAQQQMEGLLAPHRPKEPAWFLATVGVSPDHQGKGLGSAVVLPGVEAAERAGVPAFLETSAPRNLPFYERLGFTVTADVEVPEGPRTWCMTRKPGA

SEQ ID NO: 14567 - protein, 1284 aa, Artificial Sequence
  Synthetic Polypeptide
MALPVTALLLPLALLLHAARPGMRTEDLPKAVVFLEPQWYRVLEKDSVTLKCQGAYSPEDNSTQWFHNESLISSQASSYFIDAATVDDSGEYRCQTNLSTLSDPVQLEVHIGWLLLQAPRWVFKEEDPIHLRCHSWKNTALHKVTYLQNGKGRKYFHHNSDFYIPKATLKDSGSYFCRGLVGSKNVSSETVNITITQGLAVSTISSFFPPGYQGTGGGGSGGGGSGGGGSEFEADIYQTPRYLVIGTGKKITLECSQTMGHDKMYWYQQDPGMELHLIHYSYGVNSTEKGDLSSESTVSRIRTEHFPLTLESARPSHTSQYLCASSEARGLAEFTDTQYFGPGTRLTVLEDLKNVFPPEVAVFEPSEAEISHTQKATLVCLATGFYPDHVELSWWVNGKEVHSGVSTDPQPLKEQPALNDSRYCLSSRLRVSATFWQNPRNHFRCQVQFYGLSENDEWTQDRAKPVTQIVSAEAWGRADCGFTSESYQQGVLSATILYEILLGKATLYAVLVSALVLMAMVKRKDSRGRAKRSGSGATNFSLLKQAGDVEENPGPTSMDWIWRILFLVGAATGAHSGPQVQLQESGGGLAQAGGSLRLSCAASGRTFSMGWFRQAPGKEREFVAAITYSGGSPYYASSVRGRFTISRDNAKNTVYLQMNSLKPEDTAVYYCAANPTYGSDWNAENWGQGTQVTVSSGSGGGGSGGGGSGGGGSFEQVQLQQPGAELVKPGASVKMSCKASGYAFSSYWINWMKQKPGQGLEWIGQIYPGDGTENRFSVNFQKAAKSFSLKISDSQLGDAAMYFCAYRSAVNARLMFGDGTQLVVKPNTREQKLISEEDGSGTPFPSLAPPIMLLVDGKQQMVVVCLVLDVAPPGLDSPIWFSAGNGSALDAFTYGPSPATDGTWTNLAHLSLPSEELASWEPLVCHTGPGAEGHSRSTQPMHLSGEASTARTCPQEPLRGTPGGALWLGVLRLLLFKLLLFDLLLTCSCLCDPAGPLPSPATTTRLRALGSHRLHPATETGGREATSSPRPQPRDRRWGDTPPGRKPGSPVRAKRSGSGVKQTLNFDLLKLAGDVESNPGPSRGHMTEYKPTVRLATRDDVPRAVRTLAAAFADYPATRHTVDPDRHIERVTELQELFLTRVGLDIGKVWVADDGAAVAVWTTPESVEAGAVFAEIGPRMAELSGSRLAAQQQMEGLLAPHRPKEPAWFLATVGVSPDHQGKGLGSAVVLPGVEAAERAGVPAFLETSAPRNLPFYERLGFTVTADVEVPEGPRTWCMTRKPGA

SEQ ID NO: 14568 - protein, 1239 aa, Artificial Sequence
  Synthetic Polypeptide
MALPVTALLLPLALLLHAARPGMRTEDLPKAVVFLEPQWYRVLEKDSVTLKCQGAYSPEDNSTQWFHNESLISSQASSYFIDAATVDDSGEYRCQTNLSTLSDPVQLEVHIGWLLLQAPRWVFKEEDPIHLRCHSWKNTALHKVTYLQNGKGRKYFHHNSDFYIPKATLKDSGSYFCRGLVGSKNVSSETVNITITQGLAVSTISSFFPPGYQGTGGGGSGGGGSGGGGSEFEADIYQTPRYLVIGTGKKITLECSQTMGHDKMYWYQQDPGMELHLIHYSYGVNSTEKGDLSSESTVSRIRTEHFPLTLESARPSHTSQYLCASSEARGLAEFTDTQYFGPGTRLTVLEGKPIPNPLLGLDSTGSGDKQLDADVSPKPTIFLPSIAETKLQKAGTYLCLLEKFFPDVIKIHWQEKKSNTILGSQEGNTMKTNDTYMKFSWLTVPEKSLDKEHRCIVRHENNKNGVDQEIIFPPIKTDVITMDPKDNCSKDANDTLLLQLTNTSAYYMYLLLLLKSVVYFAIITCCLLRRTAFCCNGEKSRAKRSGSGATNFSLLKQAGDVEENPGPTSMDWIWRILFLVGAATGAHSGPQVQLQESGGGLAQAGGSLRLSCAASGRTFSMGWFRQAPGKEREFVAAITYSGGSPYYASSVRGRFTISRDNAKNTVYLQMNSLKPEDTAVYYCAANPTYGSDWNAENWGQGTQVTVSSGSGGGGSGGGGSGGGGSFEQVQLQQPGAELVKPGASVKMSCKASGYAFSSYWINWMKQKPGQGLEWIGQIYPGDGTENRFSVNFQKAAKSFSLKISDSQLGDAAMYFCAYRSAVNARLMFGDGTQLVVKPNTREQKLISEEDGSGSQPHTKPSVFVMKNGTNVACLVKEFYPKDIRINLVSSKKITEFDPAIVISPSGKYNAVKLGKYEDSNSVTCSVQHDNKTVHSTDFEVKTDSTDHVKPKETENTKQPSKSCHKPKAIVHTEKVNMMSLTVLGLRMLFAKTVAVNFLLTAKLFFLRAKRSGSGVKQTLNFDLLKLAGDVESNPGPSRGHMTEYKPTVRLATRDDVPRAVRTLAAAFADYPATRHTVDPDRHIERVTELQELFLTRVGLDIGKVWVADDGAAVAVWTTPESVEAGAVFAEIGPRMAELSGSRLAAQQQMEGLLAPHRPKEPAWFLATVGVSPDHQGKGLGSAVVLPGVEAAERAGVPAFLETSAPRNLPFYERLGFTVTADVEVPEGPRTWCMTRKPGA

SEQ ID NO: 14569 - protein, 977 aa, Artificial Sequence
  Synthetic Polypeptide
MALPVTALLLPLALLLHAARPGMRTEDLPKAVVFLEPQWYRVLEKDSVTLKCQGAYSPEDNSTQWFHNESLISSQASSYFIDAATVDDSGEYRCQTNLSTLSDPVQLEVHIGWLLLQAPRWVFKEEDPIHLRCHSWKNTALHKVTYLQNGKGRKYFHHNSDFYIPKATLKDSGSYFCRGLVGSKNVSSETVNITITQGLAVSTISSFFPPGYQGTGGGGSGGGGSGGGGSEFEADIYQTPRYLVIGTGKKITLECSQTMGHDKMYWYQQDPGMELHLIHYSYGVNSTEKGDLSSESTVSRIRTEHFPLTLESARPSHTSQYLCASSEARGLAEFTDTQYFGPGTRLTVLESQPHTKPSVFVMKNGTNVACLVKEFYPKDIRINLVSSKKITEFDPAIVISPSGKYNAVKLGKYEDSNSVTCSVQHDNKTVHSTDFEVKTDSTDHVKPKETENTKQPSKSCHKPKAIVHTEKVNMMSLTVLGLRMLFAKTVAVNFLLTAKLFFLRAKRSGSGATNFSLLKQAGDVEENPGPTSMDWIWRILFLVGAATGAHSGPQVQLQESGGGLAQAGGSLRLSCAASGRTFSMGWFRQAPGKEREFVAAITYSGGSPYYASSVRGRFTISRDNAKNTVYLQMNSLKPEDTAVYYCAANPTYGSDWNAENWGQGTQVTVSSGSGGGGSGGGGSGGGGSFEQVQLQQPGAELVKPGASVKMSCKASGYAFSSYWINWMKQKPGQGLEWIGQIYPGDGTENRFSVNFQKAAKSFSLKISDSQLGDAAMYFCAYRSAVNARLMFGDGTQLVVKPNTRDKQLDADVSPKPTIFLPSIAETKLQKAGTYLCLLEKFFPDVIKIHWQEKKSNTILGSQEGNTMKTNDTYMKFSWLTVPEKSLDKEHRCIVRHENNKNGVDQEIIFPPIKTDVITMDPKDNCSKDANDTLLLQLTNTSAYYMYLLLLLKSVVYFAIITCCLLRRTAFCCNGEKS

SEQ ID NO: 14570 - protein, 1379 aa, Artificial Sequence
  Synthetic Polypeptide
MALPVTALLLPLALLLHAARPGMRTEDLPKAVVFLEPQWYRVLEKDSVTLKCQGAYSPEDNSTQWFHNESLISSQASSYFIDAATVDDSGEYRCQTNLSTLSDPVQLEVHIGWLLLQAPRWVFKEEDPIHLRCHSWKNTALHKVTYLQNGKGRKYFHHNSDFYIPKATLKDSGSYFCRGLVGSKNVSSETVNITITQGLAVSTISSFFPPGYQGTGGGGSGGGGSGGGGSEFEADIYQTPRYLVIGTGKKITLECSQTMGHDKMYWYQQDPGMELHLIHYSYGVNSTEKGDLSSESTVSRIRTEHFPLTLESARPSHTSQYLCASSEARGLAEFTDTQYFGPGTRLTVGQPKANPTVTLFPPSSEELQANKATLVCLISDFYPGAVTVAWKADGSPVKAGVETTKPSKQSNNKYAASSYLSLTPEQWKSHRSYSCQVTHEGSTVEKTVAPTECSGSQSFGLLDPKLCYLLDGILFIYGVILTALFLRVKFSRSADAPAYQQGQNQLYNELNLGRREEYDVLDKRRGRDPEMGGKPQRRKNPQEGLYNELQKDKMAEAYSEIGMKGERRRGKGHDGLYQGLSTATKDTYDALHMQALPPRRAKRSGSGATNFSLLKQAGDVEENPGPTSMDWIWRILFLVGAATGAHSGPQVQLQESGGGLAQAGGSLRLSCAASGRTFSMGWFRQAPGKEREFVAAITYSGGSPYYASSVRGRFTISRDNAKNTVYLQMNSLKPEDTAVYYCAANPTYGSDWNAENWGQGTQVTVSSGSGGGGSGGGGSGGGGSFEQVQLQQPGAELVKPGASVKMSCKASGYAFSSYWINWMKQKPGQGLEWIGQIYPGDGTENRFSVNFQKAAKSFSLKISDSQLGDAAMYFCAYRSAVNARLMFGDGTQLVVKPNASTKGPSVFPLAPSSKSTSGGTAALGCLVKDYFPEPVTVSWNSGALTSGVHTFPAVLQSSGLYSLSSVVTVPSSSLGTQTYICNVNHKPSNTKVDKRVEPKSCGTQSFGLLDPKLCYLLDGILFIYGVILTALFLRVKFSRSADAPAYQQGQNQLYNELNLGRREEYDVLDKRRGRDPEMGGKPQRRKNPQEGLYNELQKDKMAEAYSEIGMKGERRRGKGHDGLYQGLSTATKDTYDALHMQALPPRRAKRSGSGVKQTLNFDLLKLAGDVESNPGPSRGHMTEYKPTVRLATRDDVPRAVRTLAAAFADYPATRHTVDPDRHIERVTELQELFLTRVGLDIGKVWVADDGAAVAVWTTPESVEAGAVFAEIGPRMAELSGSRLAAQQQMEGLLAPHRPKEPAWFLATVGVSPDHQGKGLGSAVVLPGVEAAERAGVPAFLETSAPRNLPFYERLGFTVTADVEVPEGPRTWCMTRKPGA

SEQ ID NO: 14571 - protein, 1165 aa, Artificial Sequence
  Synthetic Polypeptide
MALPVTALLLPLALLLHAARPGMRTEDLPKAVVFLEPQWYRVLEKDSVTLKCQGAYSPEDNSTQWFHNESLISSQASSYFIDAATVDDSGEYRCQTNLSTLSDPVQLEVHIGWLLLQAPRWVFKEEDPIHLRCHSWKNTALHKVTYLQNGKGRKYFHHNSDFYIPKATLKDSGSYFCRGLVGSKNVSSETVNITITQGLAVSTISSFFPPGYQGTGGGGSGGGGSGGGGSEFEADIYQTPRYLVIGTGKKITLECSQTMGHDKMYWYQQDPGMELHLIHYSYGVNSTEKGDLSSESTVSRIRTEHFPLTLESARPSHTSQYLCASSEARGLAEFTDTQYFGPGTRLTVLEDLKNVFPPEVAVFEPSEAEISHTQKATLVCLATGFYPDHVELSWWVNGKEVHSGVSTDPQPLKEQPALNDSRYCLSSRLRVSATFWQNPRNHFRCQVQFYGLSENDEWTQDRAKPVTQIVSAEAWGRADCGSQSFGLLDPKLCYLLDGILFIYGVILTALFLRVKFSRSADAPAYQQGQNQLYNELNLGRREEYDVLDKRRGRDPEMGGKPQRRKNPQEGLYNELQKDKMAEAYSEIGMKGERRRGKGHDGLYQGLSTATKDTYDALHMQALPPRRAKRSGSGATNFSLLKQAGDVEENPGPTSMDWIWRILFLVGAATGAHSGPQVQLQESGGGLAQAGGSLRLSCAASGRTFSMGWFRQAPGKEREFVAAITYSGGSPYYASSVRGRFTISRDNAKNTVYLQMNSLKPEDTAVYYCAANPTYGSDWNAENWGQGTQVTVSSGSGGGGSGGGGSGGGGSFEQVQLQQPGAELVKPGASVKMSCKASGYAFSSYWINWMKQKPGQGLEWIGQIYPGDGTENRFSVNFQKAAKSFSLKISDSQLGDAAMYFCAYRSAVNARLMFGDGTQLVVKPNTRIQNPDPAVYQLRDSKSSDKSVCLFTDFDSQTNVSQSKDSDVYITDKTVLDMRSMDFKSNSAVAWSNKSDFACANAFNNSIIPEDTFFPSPESSCGTQSFGLLDPKLCYLLDGILFIYGVILTALFLRVKFSRSADAPAYQQGQNQLYNELNLGRREEYDVLDKRRGRDPEMGGKPQRRKNPQEGLYNELQKDKMAEAYSEIGMKGERRRGKGHDGLYQGLSTATKDTYDALHMQALPPR

SEQ ID NO: 14572 - protein, 1165 aa, Artificial Sequence
  Synthetic Polypeptide
MALPVTALLLPLALLLHAARPGMRTEDLPKAVVFLEPQWYRVLEKDSVTLKCQGAYSPEDNSTQWFHNESLISSQASSYFIDAATVDDSGEYRCQTNLSTLSDPVQLEVHIGWLLLQAPRWVFKEEDPIHLRCHSWKNTALHKVTYLQNGKGRKYFHHNSDFYIPKATLKDSGSYFCRGLVGSKNVSSETVNITITQGLAVSTISSFFPPGYQGTGGGGSGGGGSGGGGSEFEADIYQTPRYLVIGTGKKITLECSQTMGHDKMYWYQQDPGMELHLIHYSYGVNSTEKGDLSSESTVSRIRTEHFPLTLESARPSHTSQYLCASSEARGLAEFTDTQYFGPGTRLTVLEDLKNVFPPEVAVFEPSKAEIAHTQKATLVCLATGFYPDHVELSWWVNGKEVHSGVCTDPQPLKEQPALNDSRYCLSSRLRVSATFWQNPRNHFRCQVQFYGLSENDEWTQDRAKPVTQIVSAEAWGRADCGSQSFGLLDPKLCYLLDGILFIYGVILTALFLRVKFSRSADAPAYQQGQNQLYNELNLGRREEYDVLDKRRGRDPEMGGKPQRRKNPQEGLYNELQKDKMAEAYSEIGMKGERRRGKGHDGLYQGLSTATKDTYDALHMQALPPRRAKRSGSGATNFSLLKQAGDVEENPGPTSMDWIWRILFLVGAATGAHSGPQVQLQESGGGLAQAGGSLRLSCAASGRTFSMGWFRQAPGKEREFVAAITYSGGSPYYASSVRGRFTISRDNAKNTVYLQMNSLKPEDTAVYYCAANPTYGSDWNAENWGQGTQVTVSSGSGGGGSGGGGSGGGGSFEQVQLQQPGAELVKPGASVKMSCKASGYAFSSYWINWMKQKPGQGLEWIGQIYPGDGTENRFSVNFQKAAKSFSLKISDSQLGDAAMYFCAYRSAVNARLMFGDGTQLVVKPNTRIQNPDPAVYQLRDSKSSDKSVCLFTDFDSQTNVSQSKDSDVYITDKCVLDMRSMDFKSNSAVAWSNKSDFACANAFNNSIIPEDTFFPSSDVPCGTQSFGLLDPKLCYLLDGILFIYGVILTALFLRVKFSRSADAPAYQQGQNQLYNELNLGRREEYDVLDKRRGRDPEMGGKPQRRKNPQEGLYNELQKDKMAEAYSEIGMKGERRRGKGHDGLYQGLSTATKDTYDALHMQALPPR

SEQ ID NO: 14573 - protein, 1236 aa, Artificial Sequence
  Synthetic Polypeptide
MALPVTALLLPLALLLHAARPGMRTEDLPKAVVFLEPQWYRVLEKDSVTLKCQGAYSPEDNSTQWFHNESLISSQASSYFIDAATVDDSGEYRCQTNLSTLSDPVQLEVHIGWLLLQAPRWVFKEEDPIHLRCHSWKNTALHKVTYLQNGKGRKYFHHNSDFYIPKATLKDSGSYFCRGLVGSKNVSSETVNITITQGLAVSTISSFFPPGYQGTGGGGSGGGGSGGGGSEFEADIYQTPRYLVIGTGKKITLECSQTMGHDKMYWYQQDPGMELHLIHYSYGVNSTEKGDLSSESTVSRIRTEHFPLTLESARPSHTSQYLCASSEARGLAEFTDTQYFGPGTRLTVLEGKPIPNPLLGLDSTGSGEDLKNVFPPEVAVFEPSEAEISHTQKATLVCLATGFYPDHVELSWWVNGKEVHSGVSTDPQPLKEQPALNDSRYCLSSRLRVSATFWQNPRNHFRCQVQFYGLSENDEWTQDRAKPVTQIVSAEAWGRADCGSQSFGLLDPKLCYLLDGILFIYGVILTALFLRVKFSRSADAPAYQQGQNQLYNELNLGRREEYDVLDKRRGRDPEMGGKPQRRKNPQEGLYNELQKDKMAEAYSEIGMKGERRRGKGHDGLYQGLSTATKDTYDALHMQALPPRRAKRSGSGATNFSLLKQAGDVEENPGPTSMDWIWRILFLVGAATGAHSGPQVQLQESGGGLAQAGGSLRLSCAASGRTFSMGWFRQAPGKEREFVAAITYSGGSPYYASSVRGRFTISRDNAKNTVYLQMNSLKPEDTAVYYCAANPTYGSDWNAENWGQGTQVTVSSGSGGGGSGGGGSGGGGSFEQVQLQQPGAELVKPGASVKMSCKASGYAFSSYWINWMKQKPGQGLEWIGQIYPGDGTENRFSVNFQKAAKSFSLKISDSQLGDAAMYFCAYRSAVNARLMFGDGTQLVVKPNTREQKLISEEDGSGIQNPDPAVYQLRDSKSSDKSVCLFTDFDSQTNVSQSKDSDVYITDKTVLDMRSMDFKSNSAVAWSNKSDFACANAFNNSIIPEDTFFPSPESSCGTQSFGLLDPKLCYLLDGILFIYGVILTALFLRSKRSRLLHSDYMNMTPRRPGPTRKHYQPYAPPRDFAAYRSRVKFSRSADAPAYQQGQNQLYNELNLGRREEYDVLDKRRGRDPEMGGKPQRRKNPQEGLYNELQKDKMAEAYSEIGMKGERRRGKGHDGLYQGLSTATKDTYDALHMQALPPR

SEQ ID NO: 14574 - protein, 1277 aa, Artificial Sequence
  Synthetic Polypeptide
MALPVTALLLPLALLLHAARPGMRTEDLPKAVVFLEPQWYRVLEKDSVTLKCQGAYSPEDNSTQWFHNESLISSQASSYFIDAATVDDSGEYRCQTNLSTLSDPVQLEVHIGWLLLQAPRWVFKEEDPIHLRCHSWKNTALHKVTYLQNGKGRKYFHHNSDFYIPKATLKDSGSYFCRGLVGSKNVSSETVNITITQGLAVSTISSFFPPGYQGTGGGGSGGGGSGGGGSEFEADIYQTPRYLVIGTGKKITLECSQTMGHDKMYWYQQDPGMELHLIHYSYGVNSTEKGDLSSESTVSRIRTEHFPLTLESARPSHTSQYLCASSEARGLAEFTDTQYFGPGTRLTVLEGKPIPNPLLGLDSTGSGEDLKNVFPPEVAVFEPSEAEISHTQKATLVCLATGFYPDHVELSWWVNGKEVHSGVSTDPQPLKEQPALNDSRYCLSSRLRVSATFWQNPRNHFRCQVQFYGLSENDEWTQDRAKPVTQIVSAEAWGRADCGSQSFGLLDPKLCYLLDGILFIYGVILTALFLRSKRSRLLHSDYMNMTPRRPGPTRKHYQPYAPPRDFAAYRSRVKFSRSADAPAYQQGQNQLYNELNLGRREEYDVLDKRRGRDPEMGGKPQRRKNPQEGLYNELQKDKMAEAYSEIGMKGERRRGKGHDGLYQGLSTATKDTYDALHMQALPPRRAKRSGSGATNFSLLKQAGDVEENPGPTSMDWIWRILFLVGAATGAHSGPQVQLQESGGGLAQAGGSLRLSCAASGRTFSMGWFRQAPGKEREFVAAITYSGGSPYYASSVRGRFTISRDNAKNTVYLQMNSLKPEDTAVYYCAANPTYGSDWNAENWGQGTQVTVSSGSGGGGSGGGGSGGGGSFEQVQLQQPGAELVKPGASVKMSCKASGYAFSSYWINWMKQKPGQGLEWIGQIYPGDGTENRFSVNFQKAAKSFSLKISDSQLGDAAMYFCAYRSAVNARLMFGDGTQLVVKPNTREQKLISEEDGSGIQNPDPAVYQLRDSKSSDKSVCLFTDFDSQTNVSQSKDSDVYITDKTVLDMRSMDFKSNSAVAWSNKSDFACANAFNNSIIPEDTFFPSPESSCGTQSFGLLDPKLCYLLDGILFIYGVILTALFLRSKRSRLLHSDYMNMTPRRPGPTRKHYQPYAPPRDFAAYRSRVKFSRSADAPAYQQGQNQLYNELNLGRREEYDVLDKRRGRDPEMGGKPQRRKNPQEGLYNELQKDKMAEAYSEIGMKGERRRGKGHDGLYQGLSTATKDTYDALHMQALPPR

SEQ ID NO: 14575 - protein, 1238 aa, Artificial Sequence
  Synthetic Polypeptide
MALPVTALLLPLALLLHAARPGMRTEDLPKAVVFLEPQWYRVLEKDSVTLKCQGAYSPEDNSTQWFHNESLISSQASSYFIDAATVDDSGEYRCQTNLSTLSDPVQLEVHIGWLLLQAPRWVFKEEDPIHLRCHSWKNTALHKVTYLQNGKGRKYFHHNSDFYIPKATLKDSGSYFCRGLVGSKNVSSETVNITITQGLAVSTISSFFPPGYQGTGGGGSGGGGSGGGGSEFEADIYQTPRYLVIGTGKKITLECSQTMGHDKMYWYQQDPGMELHLIHYSYGVNSTEKGDLSSESTVSRIRTEHFPLTLESARPSHTSQYLCASSEARGLAEFTDTQYFGPGTRLTVLEGKPIPNPLLGLDSTGSGEDLKNVFPPEVAVFEPSEAEISHTQKATLVCLATGFYPDHVELSWWVNGKEVHSGVSTDPQPLKEQPALNDSRYCLSSRLRVSATFWQNPRNHFRCQVQFYGLSENDEWTQDRAKPVTQIVSAEAWGRADCGSQSFGLLDPKLCYLLDGILFIYGVILTALFLRVKFSRSADAPAYQQGQNQLYNELNLGRREEYDVLDKRRGRDPEMGGKPQRRKNPQEGLYNELQKDKMAEAYSEIGMKGERRRGKGHDGLYQGLSTATKDTYDALHMQALPPRRAKRSGSGATNFSLLKQAGDVEENPGPTSMDWIWRILFLVGAATGAHSGPQVQLQESGGGLAQAGGSLRLSCAASGRTFSMGWFRQAPGKEREFVAAITYSGGSPYYASSVRGRFTISRDNAKNTVYLQMNSLKPEDTAVYYCAANPTYGSDWNAENWGQGTQVTVSSGSGGGGSGGGGSGGGGSFEQVQLQQPGAELVKPGASVKMSCKASGYAFSSYWINWMKQKPGQGLEWIGQIYPGDGTENRFSVNFQKAAKSFSLKISDSQLGDAAMYFCAYRSAVNARLMFGDGTQLVVKPNTREQKLISEEDLGSGIQNPDPAVYQLRDSKSSDKSVCLFTDFDSQTNVSQSKDSDVYITDKTVLDMRSMDFKSNSAVAWSNKSDFACANAFNNSIIPEDTFFPSPESSCGTQSFGLLDPKLCYLLDGILFIYGVILTALFLKRGRKKLLYIFKQPFMRPVQTTQEEDGCSCRFPEEEEGGCELRVKFSRSADAPAYQQGQNQLYNELNLGRREEYDVLDKRRGRDPEMGGKPQRRKNPQEGLYNELQKDKMAEAYSEIGMKGERRRGKGHDGLYQGLSTATKDTYDALHMQALPPR

SEQ ID NO: 14576 - protein, 1280 aa, Artificial Sequence
  Synthetic Polypeptide
MALPVTALLLPLALLLHAARPGMRTEDLPKAVVFLEPQWYRVLEKDSVTLKCQGAYSPEDNSTQWFHNESLISSQASSYFIDAATVDDSGEYRCQTNLSTLSDPVQLEVHIGWLLLQAPRWVFKEEDPIHLRCHSWKNTALHKVTYLQNGKGRKYFHHNSDFYIPKATLKDSGSYFCRGLVGSKNVSSETVNITITQGLAVSTISSFFPPGYQGTGGGGSGGGGSGGGGSEFEADIYQTPRYLVIGTGKKITLECSQTMGHDKMYWYQQDPGMELHLIHYSYGVNSTEKGDLSSESTVSRIRTEHFPLTLESARPSHTSQYLCASSEARGLAEFTDTQYFGPGTRLTVLEGKPIPNPLLGLDSTGSGEDLKNVFPPEVAVFEPSEAEISHTQKATLVCLATGFYPDHVELSWWVNGKEVHSGVSTDPQPLKEQPALNDSRYCLSSRLRVSATFWQNPRNHFRCQVQFYGLSENDEWTQDRAKPVTQIVSAEAWGRADCGSQSFGLLDPKLCYLLDGILFIYGVILTALFLKRGRKKLLYIFKQPFMRPVQTTQEEDGCSCRFPEEEEGGCELRVKFSRSADAPAYQQGQNQLYNELNLGRREEYDVLDKRRGRDPEMGGKPQRRKNPQEGLYNELQKDKMAEAYSEIGMKGERRRGKGHDGLYQGLSTATKDTYDALHMQALPPRRAKRSGSGATNFSLLKQAGDVEENPGPTSMDWIWRILFLVGAATGAHSGPQVQLQESGGGLAQAGGSLRLSCAASGRTFSMGWFRQAPGKEREFVAAITYSGGSPYYASSVRGRFTISRDNAKNTVYLQMNSLKPEDTAVYYCAANPTYGSDWNAENWGQGTQVTVSSGSGGGGSGGGGSGGGGSFEQVQLQQPGAELVKPGASVKMSCKASGYAFSSYWINWMKQKPGQGLEWIGQIYPGDGTENRFSVNFQKAAKSFSLKISDSQLGDAAMYFCAYRSAVNARLMFGDGTQLVVKPNTREQKLISEEDLGSGIQNPDPAVYQLRDSKSSDKSVCLFTDFDSQTNVSQSKDSDVYITDKTVLDMRSMDFKSNSAVAWSNKSDFACANAFNNSIIPEDTFFPSPESSCGTQSFGLLDPKLCYLLDGILFIYGVILTALFLKRGRKKLLYIFKQPFMRPVQTTQEEDGCSCRFPEEEEGGCELRVKFSRSADAPAYQQGQNQLYNELNLGRREEYDVLDKRRGRDPEMGGKPQRRKNPQEGLYNELQKDKMAEAYSEIGMKGERRRGKGHDGLYQGLSTATKDTYDALHMQALPPR

SEQ ID NO: 14577 - protein, 1170 aa, Artificial Sequence
  Synthetic Polypeptide
MALPVTALLLPLALLLHAARPGMRTEDLPKAVVFLEPQWYRVLEKDSVTLKCQGAYSPEDNSTQWFHNESLISSQASSYFIDAATVDDSGEYRCQTNLSTLSDPVQLEVHIGWLLLQAPRWVFKEEDPIHLRCHSWKNTALHKVTYLQNGKGRKYFHHNSDFYIPKATLKDSGSYFCRGLVGSKNVSSETVNITITQGLAVSTISSFFPPGYQGTGGGGSGGGGSGGGGSEFEADIYQTPRYLVIGTGKKITLECSQTMGHDKMYWYQQDPGMELHLIHYSYGVNSTEKGDLSSESTVSRIRTEHFPLTLESARPSHTSQYLCASSEARGLAEFTDTQYFGPGTRLTVLEQSFGLLDPKLCYLLDGILFIYGVILTALFLRVKFSRSADAPAYQQGQNQLYNELNLGRREEYDVLDKRRGRDPEMGGKPQRRKNPQEGLYNELQKDKMAEAYSEIGMKGERRRGKGHDGLYQGLSTATKDTYDALHMQALPPRRAKRSGSGATNFSLLKQAGDVEENPGPTSMDWIWRILFLVGAATGAHSGPQVQLQESGGGLAQAGGSLRLSCAASGRTFSMGWFRQAPGKEREFVAAITYSGGSPYYASSVRGRFTISRDNAKNTVYLQMNSLKPEDTAVYYCAANPTYGSDWNAENWGQGTQVTVSSGSGGGGSGGGGSGGGGSFEQVQLQQPGAELVKPGASVKMSCKASGYAFSSYWINWMKQKPGQGLEWIGQIYPGDGTENRFSVNFQKAAKSFSLKISDSQLGDAAMYFCAYRSAVNARLMFGDGTQLVVKPNTRQSFGLLDPKLCYLLDGILFIYGVILTALFLRVKFSRSADAPAYQQGQNQLYNELNLGRREEYDVLDKRRGRDPEMGGKPQRRKNPQEGLYNELQKDKMAEAYSEIGMKGERRRGKGHDGLYQGLSTATKDTYDALHMQALPPRRAKRSGSGVKQTLNFDLLKLAGDVESNPGPSRGHMTEYKPTVRLATRDDVPRAVRTLAAAFADYPATRHTVDPDRHIERVTELQELFLTRVGLDIGKVWVADDGAAVAVWTTPESVEAGAVFAEIGPRMAELSGSRLAAQQQMEGLLAPHRPKEPAWFLATVGVSPDHQGKGLGSAVVLPGVEAAERAGVPAFLETSAPRNLPFYERLGFTVTADVEVPEGPRTWCMTRKPGA

SEQ ID NO: 14578 - protein, 995 aa, Artificial Sequence
  Synthetic Polypeptide
MALPVTALLLPLALLLHAARPGMRTEDLPKAVVFLEPQWYRVLEKDSVTLKCQGAYSPEDNSTQWFHNESLISSQASSYFIDAATVDDSGEYRCQTNLSTLSDPVQLEVHIGWLLLQAPRWVFKEEDPIHLRCHSWKNTALHKVTYLQNGKGRKYFHHNSDFYIPKATLKDSGSYFCRGLVGSKNVSSETVNITITQGLAVSTISSFFPPGYQGTGGGGSGGGGSGGGGSEFEADIYQTPRYLVIGTGKKITLECSQTMGHDKMYWYQQDPGMELHLIHYSYGVNSTEKGDLSSESTVSRIRTEHFPLTLESARPSHTSQYLCASSEARGLAEFTDTQYFGPGTRLTVLEGQPKANPTVTLFPPSSEELQANKATLVCLISDFYPGAVTVAWKADGSPVKAGVETTKPSKQSNNKYAASSYLSLTPEQWKSHRSYSCQVTHEGSTVEKTVAPTECSPIKTDVITMDPKDNCSKDANDTLLLQLTNTSAYYMYLLLLLKSVVYFAIITCCLLRRTAFCCNGEKSRAKRSGSGATNFSLLKQAGDVEENPGPTSMDWIWRILFLVGAATGAHSGPQVQLQESGGGLAQAGGSLRLSCAASGRTFSMGWFRQAPGKEREFVAAITYSGGSPYYASSVRGRFTISRDNAKNTVYLQMNSLKPEDTAVYYCAANPTYGSDWNAENWGQGTQVTVSSGSGGGGSGGGGSGGGGSFEQVQLQQPGAELVKPGASVKMSCKASGYAFSSYWINWMKQKPGQGLEWIGQIYPGDGTENRFSVNFQKAAKSFSLKISDSQLGDAAMYFCAYRSAVNARLMFGDGTQLVVKPNTRASTKGPSVFPLAPSSKSTSGGTAALGCLVKDYFPEPVTVSWNSGALTSGVHTFPAVLQSSGLYSLSSVVTVPSSSLGTQTYICNVNHKPSNTKVDKRVEPKSCEVKTDSTDHVKPKETENTKQPSKSCHKPKAIVHTEKVNMMSLTVLGLRMLFAKTVAVNFLLTAKLFFL

SEQ ID NO: 14579 - protein, 973 aa, Artificial Sequence
  Synthetic Polypeptide
MALPVTALLLPLALLLHAARPGMRTEDLPKAVVFLEPQWYRVLEKDSVTLKCQGAYSPEDNSTQWFHNESLISSQASSYFIDAATVDDSGEYRCQTNLSTLSDPVQLEVHIGWLLLQAPRWVFKEEDPIHLRCHSWKNTALHKVTYLQNGKGRKYFHHNSDFYIPKATLKDSGSYFCRGLVGSKNVSSETVNITITQGLAVSTISSFFPPGYQGTGGGGSGGGGSGGGGSEFEADIYQTPRYLVIGTGKKITLECSQTMGHDKMYWYQQDPGMELHLIHYSYGVNSTEKGDLSSESTVSRIRTEHFPLTLESARPSHTSQYLCASSEARGLAEFTDTQYFGPGTRLTVLEGQPKANPTVTLFPPSSEELQANKATLVCLISDFYPGAVTVAWKADGSPVKAGVETTKPSKQSNNKYAASSYLSLTPEQWKSHRSYSCQVTHEGSTVEKTVAPTECSGRADCGITSASYHQGVLSATILYEILLGKATLYAVLVSALVLMAMVKRKDSRGRAKRSGSGATNFSLLKQAGDVEENPGPTSMDWIWRILFLVGAATGAHSGPQVQLQESGGGLAQAGGSLRLSCAASGRTFSMGWFRQAPGKEREFVAAITYSGGSPYYASSVRGRFTISRDNAKNTVYLQMNSLKPEDTAVYYCAANPTYGSDWNAENWGQGTQVTVSSGSGGGGSGGGGSGGGGSFEQVQLQQPGAELVKPGASVKMSCKASGYAFSSYWINWMKQKPGQGLEWIGQIYPGDGTENRFSVNFQKAAKSFSLKISDSQLGDAAMYFCAYRSAVNARLMFGDGTQLVVKPNTRASTKGPSVFPLAPSSKSTSGGTAALGCLVKDYFPEPVTVSWNSGALTSGVHTFPAVLQSSGLYSLSSVVTVPSSSLGTQTYICNVNHKPSNTKVDKRVEPKSCIPEDTFFPSSDVPCDVKLVEKSFETDTNLNFQNLSVIGFRILLLKVAGFNLLMTLRLWSS

SEQ ID NO: 14580 - protein, 973 aa, Artificial Sequence
  Synthetic Polypeptide
MALPVTALLLPLALLLHAARPGMRTEDLPKAVVFLEPQWYRVLEKDSVTLKCQGAYSPEDNSTQWFHNESLISSQASSYFIDAATVDDSGEYRCQTNLSTLSDPVQLEVHIGWLLLQAPRWVFKEEDPIHLRCHSWKNTALHKVTYLQNGKGRKYFHHNSDFYIPKATLKDSGSYFCRGLVGSKNVSSETVNITITQGLAVSTISSFFPPGYQGTGGGGSGGGGSGGGGSEFEADIYQTPRYLVIGTGKKITLECSQTMGHDKMYWYQQDPGMELHLIHYSYGVNSTEKGDLSSESTVSRIRTEHFPLTLESARPSHTSQYLCASSEARGLAEFTDTQYFGPGTRLTVLEGQPKANPTVTLFPPSSEELQANKATLVCLISDFYPGAVTVAWKADGSPVKAGVETTKPSKQSNNKYAASSYLSLTPEQWKSHRSYSCQVTHEGSTVEKTVAPTECSGRADCGFTSESYQQGVLSATILYEILLGKATLYAVLVSALVLMAMVKRKDSRGRAKRSGSGATNFSLLKQAGDVEENPGPTSMDWIWRILFLVGAATGAHSGPQVQLQESGGGLAQAGGSLRLSCAASGRTFSMGWFRQAPGKEREFVAAITYSGGSPYYASSVRGRFTISRDNAKNTVYLQMNSLKPEDTAVYYCAANPTYGSDWNAENWGQGTQVTVSSGSGGGGSGGGGSGGGGSFEQVQLQQPGAELVKPGASVKMSCKASGYAFSSYWINWMKQKPGQGLEWIGQIYPGDGTENRFSVNFQKAAKSFSLKISDSQLGDAAMYFCAYRSAVNARLMFGDGTQLVVKPNTRASTKGPSVFPLAPSSKSTSGGTAALGCLVKDYFPEPVTVSWNSGALTSGVHTFPAVLQSSGLYSLSSVVTVPSSSLGTQTYICNVNHKPSNTKVDKRVEPKSCIPEDTFFPSPESSCDVKLVEKSFETDTNLNFQNLSVIGFRILLLKVAGFNLLMTLRLWSS

SEQ ID NO: 14581 - protein, 633 aa, Artificial Sequence
  Synthetic Polypeptide
MDWIWRILFLVGAATGAHSGPQVQLQESGGGLAQAGGSLRLSCAASGRTFSMGWFRQAPGKEREFVAAITYSGGSPYYASSVRGRFTISRDNAKNTVYLQMNSLKPEDTAVYYCAANPTYGSDWNAENWGQGTQVTVSSGSGGGGSGGGGSGGGGSFEILNVEQSPQSLHVQEGDSTNFTCSFPSSNFYALHWYRWETAKSPEALFVMTLNGDEKKKGRISATLNTKEGYSYLYIKGSQPEDSATYLCARNTGNQFYFGTGTSLTVIPNGGGGSGGGGSGGGGSGVTQTPKFQVLKTGQSMTLQCAQDMNHEYMSWYRQDPGMGLRLIHYSVGAGITDQGEVPNGYNVSRSTTEDFPLRLLSAAPSQTSVYFCASSFQTGASYGYTFGSGTRLTVTREQKLISEEDLAKPTTTPAPRPPTPAPTIASQPLSLRPEACRPAAGGAVHTRGLDFACDIYIWAPLAGTCGVLLLSLVITLYCKRGRKKLLYIFKQPFMRPVQTTQEEDGCSCRFPEEEEGGCELRVKFSRSADAPAYQQGQNQLYNELNLGRREEYDVLDKRRGRDPEMGGKPRRKNPQEGLYNELQKDKMAEAYSEIGMKGERRRGKGHDGLYQGLSTATKDTYDALHMQALPPR

SEQ ID NO: 14582 - protein, 982 aa, Artificial Sequence
  Synthetic Polypeptide
MTIRLLCYMGFYFLGAGLMGVTQTPKFQVLKTGQSMTLQCAQDMNHEYMSWYRQDPGMGLRLIHYSVGAGITDQGEVPNGYNVSRSTTEDFPLRLLSAAPSQTSVYFCASSFQTGASYGYTFGSGTRLTVLEIQNPDPAVYQLRDSKSSDKSVCLFTDFDSQTNVSQSKDSDVYITDKCVLDMRSMDFKSNSAVAWSNKSDFACANAFNNSIIPEDTFFPSSDVPCDVKLVEKSFETDTNLNFQNLSVIGFRILLLKVAGFNLLMTLRLWSSRAKRSGSGVKQTLNFDLLKLAGDVESNPGPTSMDWIWRILFLVGAATGAHSGPQVQLQESGGGLAQAGGSLRLSCAASGRTFSMGWFRQAPGKEREFVAAITYSGGSPYYASSVRGRFTISRDNAKNTVYLQMNSLKPEDTAVYYCAANPTYGSDWNAENWGQGTQVTVSSGSGGGGSGGGGSGGGGSFEILNVEQSPQSLHVQEGDSTNFTCSFPSSNFYALHWYRWETAKSPEALFVMTLNGDEKKKGRISATLNTKEGYSYLYIKGSQPEDSATYLCARNTGNQFYFGTGTSLTVIPNEDLKNVFPPEVAVFEPSKAEIAHTQKATLVCLATGFYPDHVELSWWVNGKEVHSGVCTDPQPLKEQPALNDSRYCLSSRLRVSATFWQNPRNHFRCQVQFYGLSENDEWTQDRAKPVTQIVSAEAWGRADCGITSASYHQGVLSATILYEILLGKATLYAVLVSALVLMAMVKRKDSRGRAKRSGSGATNFSLLKQAGDVEENPGPSRGHMTEYKPTVRLATRDDVPRAVRTLAAAFADYPATRHTVDPDRHIERVTELQELFLTRVGLDIGKVWVADDGAAVAVWTTPESVEAGAVFAEIGPRMAELSGSRLAAQQQMEGLLAPHRPKEPAWFLATVGVSPDHQGKGLGSAVVLPGVEAAERAGVPAFLETSAPRNLPFYERLGFTVTADVEVPEGPRTWCMTRKPGA

SEQ ID NO: 14583 - protein, 981 aa, Artificial Sequence
  Synthetic Polypeptide
MTIRLLCYMGFYFLGAGLMGVTQTPKFQVLKTGQSMTLQCAQDMNHEYMSWYRQDPGMGLRLIHYSVGAGITDQGEVPNGYNVSRSTTEDFPLRLLSAAPSQTSVYFCASSFQTGASYGYTFGSGTRLTVLEDLKNVFPPEVAVFEPSKAEIAHTQKATLVCLATGFYPDHVELSWWVNGKEVHSGVCTDPQPLKEQPALNDSRYCLSSRLRVSATFWQNPRNHFRCQVQFYGLSENDEWTQDRAKPVTQIVSAEAWGRADCGITSASYHQGVLSATILYEILLGKATLYAVLVSALVLMAMVKRKDSRGRAKRSGSGATNFSLLKQAGDVEENPGPTSMDWIWRILFLVGAATGAHSGPQVQLQESGGGLAQAGGSLRLSCAASGRTFSMGWFRQAPGKEREFVAAITYSGGSPYYASSVRGRFTISRDNAKNTVYLQMNSLKPEDTAVYYCAANPTYGSDWNAENWGQGTQVTVSSGSGGGGSGGGGSGGGGSFEILNVEQSPQSLHVQEGDSTNFTCSFPSSNFYALHWYRWETAKSPEALFVMTLNGDEKKKGRISATLNTKEGYSYLYIKGSQPEDSATYLCARNTGNQFYFGTGTSLTVIPNIQNPDPAVYQLRDSKSSDKSVCLFTDFDSQTNVSQSKDSDVYITDKCVLDMRSMDFKSNSAVAWSNKSDFACANAFNNSIIPEDTFFPSSDVPCDVKLVEKSFETDTNLNFQNLSVIGFRILLLKVAGFNLLMTLRLWSSRAKRSGSGVKQTLNFDLLKLAGDVESNPGPSRGHMTEYKPTVRLATRDDVPRAVRTLAAAFADYPATRHTVDPDRHIERVTELQELFLTRVGLDIGKVWVADDGAAVAVWTTPESVEAGAVFAEIGPRMAELSGSRLAAQQQMEGLLAPHRPKEPAWFLATVGVSPDHQGKGLGSAVVLPGVEAAERAGVPAFLETSAPRNLPFYERLGFTVTADVEVPEGPRTWCMTRKPGA

SEQ ID NO: 14584 - protein, 981 aa, Artificial Sequence
  Synthetic Polypeptide
MTIRLLCYMGFYFLGAGLMGVTQTPKFQVLKTGQSMTLQCAQDMNHEYMSWYRQDPGMGLRLIHYSVGAGITDQGEVPNGYNVSRSTTEDFPLRLLSAAPSQTSVYFCASSFQTGASYGYTFGSGTRLTVLEDLKNVFPPEVAVFEPSEAEISHTQKATLVCLATGFYPDHVELSWWVNGKEVHSGVCTDPQPLKEQPALNDSRYCLSSRLRVSATFWQNPRNHFRCQVQFYGLSENDEWTQDRAKPVTQIVSAEAWGRADCGFTSESYQQGVLSATILYEILLGKATLYAVLVSALVLMAMVKRKDSRGRAKRSGSGATNFSLLKQAGDVEENPGPTSMDWIWRILFLVGAATGAHSGPQVQLQESGGGLAQAGGSLRLSCAASGRTFSMGWFRQAPGKEREFVAAITYSGGSPYYASSVRGRFTISRDNAKNTVYLQMNSLKPEDTAVYYCAANPTYGSDWNAENWGQGTQVTVSSGSGGGGSGGGGSGGGGSFEILNVEQSPQSLHVQEGDSTNFTCSFPSSNFYALHWYRWETAKSPEALFVMTLNGDEKKKGRISATLNTKEGYSYLYIKGSQPEDSATYLCARNTGNQFYFGTGTSLTVIPNIQNPDPAVYQLRDSKSSDKSVCLFTDFDSQTNVSQSKDSDVYITDKCVLDMRSMDFKSNSAVAWSNKSDFACANAFNNSIIPEDTFFPSPESSCDVKLVEKSFETDTNLNFQNLSVIGFRILLLKVAGFNLLMTLRLWSSRAKRSGSGVKQTLNFDLLKLAGDVESNPGPSRGHMTEYKPTVRLATRDDVPRAVRTLAAAFADYPATRHTVDPDRHIERVTELQELFLTRVGLDIGKVWVADDGAAVAVWTTPESVEAGAVFAEIGPRMAELSGSRLAAQQQMEGLLAPHRPKEPAWFLATVGVSPDHQGKGLGSAVVLPGVEAAERAGVPAFLETSAPRNLPFYERLGFTVTADVEVPEGPRTWCMTRKPGA

SEQ ID NO: 14585 - protein, 748 aa, Artificial Sequence
  Synthetic Polypeptide
MTIRLLCYMGFYFLGAGLMGVTQTPKFQVLKTGQSMTLQCAQDMNHEYMSWYRQDPGMGLRLIHYSVGAGITDQGEVPNGYNVSRSTTEDFPLRLLSAAPSQTSVYFCASSFQTGASYGYTFGSGTRLTVLEDLKNVFPPEVAVFEPSEAEISHTQKATLVCLATGFYPDHVELSWWVNGKEVHSGVCTDPQPLKEQPALNDSRYCLSSRLRVSATFWQNPRNHFRCQVQFYGLSENDEWTQDRAKPVTQIVSAEAWGRADCGFTSESYQQGVLSATILYEILLGKATLYAVLVSALVLMAMVKRKDSRGRAKRSGSGATNFSLLKQAGDVEENPGPTSMDWIWRILFLVGAATGAHSGPQVQLQESGGGLAQAGGSLRLSCAASGRTFSMGWFRQAPGKEREFVAAITYSGGSPYYASSVRGRFTISRDNAKNTVYLQMNSLKPEDTAVYYCAANPTYGSDWNAENWGQGTQVTVSSGSGGGGSGGGGSGGGGSFEILNVEQSPQSLHVQEGDSTNFTCSFPSSNFYALHWYRWETAKSPEALFVMTLNGDEKKKGRISATLNTKEGYSYLYIKGSQPEDSATYLCARNTGNQFYFGTGTSLTVIPNIQNPDPAVYQLRDSKSSDKSVCLFTDFDSQTNVSQSKDSDVYITDKCVLDMRSMDFKSNSAVAWSNKSDFACANAFNNSIIPEDTFFPSPESSCDVKLVEKSFETDTNLNFQNLSVIGFRILLLKVAGFNLLMTLRLWSS

SEQ ID NO: 14586 - protein, 973 aa, Artificial Sequence
  Synthetic Polypeptide
MTIRLLCYMGFYFLGAGLMGVTQTPKFQVLKTGQSMTLQCAQDMNHEYMSWYRQDPGMGLRLIHYSVGAGITDQGEVPNGYNVSRSTTEDFPLRLLSAAPSQTSVYFCASSFQTGASYGYTFGSGTRLTVLEDLKNVFPPEVAVFEPSEAEISHTQKATLVCLATGFYPDHVELSWWVNGKEVHSGVCTDPQPLKEQPALNDSRYCLSSRLRVSATFWQNPRNHFRCQVQFYGLSENDEWTQDRAKPVTQIVSAEAWGRADCGFTSESYQQGVLSATILYEILLGKATLYAVLVSALVLMAMVKRKDSRGRAKRSGSGATNFSLLKQAGDVEENPGPTSMDWIWRILFLVGAATGAHSGPQVQLQESGGGLAQAGGSLRLSCAASGRTFSMGWFRQAPGKEREFVAAITYSGGSPYYASSVRGRFTISRDNAKNTVYLQMNSLKPEDTAVYYCAANPTYGSDWNAENWGQGTQVTVSSGSGGGGSGGGGSGGGGSFEILNVEQSPQSLHVQEGDSTNFTCSFPSSNFYALHWYRWETAKSPEALFVMTLNGDEKKKGRISATLNTKEGYSYLYIKGSQPEDSATYLCARNTGNQFYFGTGTSLTVIPNIQNPDPAVYQLRDSKSSDKSVCLFTDFDSQTNVSQSKDSDVYITDKCVLDMRSMDFKSNSAVAWSNKSDFACANAFNNSIIPEDTFFPSPESSCDVKLVEKSFETDTNLNFQNLSVIGFRILLLKVAGFNLLMTLRLWSSRAKRSGSGVKQTLNFDLLKLAGDVESNPGPSRGGIHTMATYEVLCEVARKLGTDDREVVLFLLNVFIPQPTLAQLIGALRALKEEGRLTFPLLAECLFRAGRRDLLRDLLHLDPRFLERHLAGTMSYFSPYQLTVLHVDGELCARDIRSLIFLSKDTIGSRSTPQTFLHWVYCMENLDLLGPTDVDALMSMLRSLSRVDLQRQVQTLMGLHLSGPSHSQHYRHTP

SEQ ID NO: 14587 - protein, 752 aa, Artificial Sequence
  Synthetic Polypeptide
MTIRLLCYMGFYFLGAGLMGVTQTPKFQVLKTGQSMTLQCAQDMNHEYMSWYRQDPGMGLRLIHYSVGAGITDQGEVPNGYNVSRSTTEDFPLRLLSAAPSQTSVYFCASSFQTGASYGYTFGSGTRLTVLEIQNPDPAVYQLRDSKSSDKSVCLFTDFDSQTNVSQSKDSDVYITDKCVLDMRSMDFKSNSAVAWSNKSDFACANAFNNSIIPEDTFFPSPESSCDVKLVEKSFETDTNLNFQNLSVIGFRILLLKVAGFNLLMTLRLWSSRAKRSGSGVKQTLNFDLLKLAGDVESNPGPTSMDWIWRILFLVGAATGAHSGPQVQLQESGGGLAQAGGSLRLSCAASGRTFSMGWFRQAPGKEREFVAAITYSGGSPYYASSVRGRFTISRDNAKNTVYLQMNSLKPEDTAVYYCAANPTYGSDWNAENWGQGTQVTVSSGSGGGGSGGGGSGGGGSFEILNVEQSPQSLHVQEGDSTNFTCSFPSSNFYALHWYRWETAKSPEALFVMTLNGDEKKKGRISATLNTKEGYSYLYIKGSQPEDSATYLCARNTGNQFYFGTGTSLTVIPNEDLKNVFPPEVAVFEPSEAEISHTQKATLVCLATGFYPDHVELSWWVNGKEVHSGVCTDPQPLKEQPALNDSRYCLSSRLRVSATFWQNPRNHFRCQVQFYGLSENDEWTQDRAKPVTQIVSAEAWGRADCGFTSESYQQGVLSATILYEILLGKATLYAVLVSALVLMAMVKRKDSRG

SEQ ID NO: 14588 - protein, 974 aa, Artificial Sequence
  Synthetic Polypeptide
MTIRLLCYMGFYFLGAGLMGVTQTPKFQVLKTGQSMTLQCAQDMNHEYMSWYRQDPGMGLRLIHYSVGAGITDQGEVPNGYNVSRSTTEDFPLRLLSAAPSQTSVYFCASSFQTGASYGYTFGSGTRLTVLEIQNPDPAVYQLRDSKSSDKSVCLFTDFDSQTNVSQSKDSDVYITDKCVLDMRSMDFKSNSAVAWSNKSDFACANAFNNSIIPEDTFFPSPESSCDVKLVEKSFETDTNLNFQNLSVIGFRILLLKVAGFNLLMTLRLWSSRAKRSGSGVKQTLNFDLLKLAGDVESNPGPTSMDWIWRILFLVGAATGAHSGPQVQLQESGGGLAQAGGSLRLSCAASGRTFSMGWFRQAPGKEREFVAAITYSGGSPYYASSVRGRFTISRDNAKNTVYLQMNSLKPEDTAVYYCAANPTYGSDWNAENWGQGTQVTVSSGSGGGGSGGGGSGGGGSFEILNVEQSPQSLHVQEGDSTNFTCSFPSSNFYALHWYRWETAKSPEALFVMTLNGDEKKKGRISATLNTKEGYSYLYIKGSQPEDSATYLCARNTGNQFYFGTGTSLTVIPNEDLKNVFPPEVAVFEPSEAEISHTQKATLVCLATGFYPDHVELSWWVNGKEVHSGVCTDPQPLKEQPALNDSRYCLSSRLRVSATFWQNPRNHFRCQVQFYGLSENDEWTQDRAKPVTQIVSAEAWGRADCGFTSESYQQGVLSATILYEILLGKATLYAVLVSALVLMAMVKRKDSRGRAKRSGSGATNFSLLKQAGDVEENPGPSRGGIHTMATYEVLCEVARKLGTDDREVVLFLLNVFIPQPTLAQLIGALRALKEEGRLTFPLLAECLFRAGRRDLLRDLLHLDPRFLERHLAGTMSYFSPYQLTVLHVDGELCARDIRSLIFLSKDTIGSRSTPQTFLHWVYCMENLDLLGPTDVDALMSMLRSLSRVDLQRQVQTLMGLHLSGPSHSQHYRHTP

SEQ ID NO: 14589 - protein, 981 aa, Artificial Sequence
  Synthetic Polypeptide
MTIRLLCYMGFYFLGAGLMGVTQTPKFQVLKTGQSMTLQCAQDMNHEYMSWYRQDPGMGLRLIHYSVGAGITDQGEVPNGYNVSRSTTEDFPLRLLSAAPSQTSVYFCASSFQTGASYGYTFGSGTRLTVLEDLKNVFPPEVAVFEPSEAEISHTQKATLVCLATGFYPDHVELSWWVNGKEVHSGVSTDPQPLKEQPALNDSRYCLSSRLRVSATFWQNPRNHFRCQVQFYGLSENDEWTQDRAKPVTQIVSAEAWGRADCGFTSESYQQGVLSATILYEILLGKATLYAVLVSALVLMAMVKRKDSRGRAKRSGSGATNFSLLKQAGDVEENPGPTSMDWIWRILFLVGAATGAHSGPQVQLQESGGGLAQAGGSLRLSCAASGRTFSMGWFRQAPGKEREFVAAITYSGGSPYYASSVRGRFTISRDNAKNTVYLQMNSLKPEDTAVYYCAANPTYGSDWNAENWGQGTQVTVSSGSGGGGSGGGGSGGGGSFEILNVEQSPQSLHVQEGDSTNFTCSFPSSNFYALHWYRWETAKSPEALFVMTLNGDEKKKGRISATLNTKEGYSYLYIKGSQPEDSATYLCARNTGNQFYFGTGTSLTVIPNIQNPDPAVYQLRDSKSSDKSVCLFTDFDSQTNVSQSKDSDVYITDKTVLDMRSMDFKSNSAVAWSNKSDFACANAFNNSIIPEDTFFPSPESSCDVKLVEKSFETDTNLNFQNLSVIGFRILLLKVAGFNLLMTLRLWSSRAKRSGSGVKQTLNFDLLKLAGDVESNPGPSRGHMTEYKPTVRLATRDDVPRAVRTLAAAFADYPATRHTVDPDRHIERVTELQELFLTRVGLDIGKVWVADDGAAVAVWTTPESVEAGAVFAEIGPRMAELSGSRLAAQQQMEGLLAPHRPKEPAWFLATVGVSPDHQGKGLGSAVVLPGVEAAERAGVPAFLETSAPRNLPFYERLGFTVTADVEVPEGPRTWCMTRKPGA

SEQ ID NO: 14590 - protein, 1063 aa, Artificial Sequence
  Synthetic Polypeptide
MTIRLLCYMGFYFLGAGLMGVTQTPKFQVLKTGQSMTLQCAQDMNHEYMSWYRQDPGMGLRLIHYSVGAGITDQGEVPNGYNVSRSTTEDFPLRLLSAAPSQTSVYFCASSFQTGASYGYTFGSGTRLTVLEDLKNVFPPEVAVFEPSEAEISHTQKATLVCLATGFYPDHVELSWWVNGKEVHSGVSTDPQPLKEQPALNDSRYCLSSRLRVSATFWQNPRNHFRCQVQFYGLSENDEWTQDRAKPVTQIVSAEAWGRADCGFTSESYQQGVLSATILYEILLGKATLYAVLVSALVLMAMVKRKDSRGRAKRSGSGATNFSLLKQAGDVEENPGPTSMDWIWRILFLVGAATGAHSGPQVQLQESGGGLAQAGGSLRLSCAASGRTFSMGWFRQAPGKEREFVAAITYSGGSPYYASSVRGRFTISRDNAKNTVYLQMNSLKPEDTAVYYCAANPTYGSDWNAENWGQGTQVTVSSGSGGGGSGGGGSGGGGSFEILNVEQSPQSLHVQEGDSTNFTCSFPSSNFYALHWYRWETAKSPEALFVMTLNGDEKKKGRISATLNTKEGYSYLYIKGSQPEDSATYLCARNTGNQFYFGTGTSLTVIPNEQKLISEEDGSGTPFPSLAPPIMLLVDGKQQMVVVCLVLDVAPPGLDSPIWFSAGNGSALDAFTYGPSPATDGTWTNLAHLSLPSEELASWEPLVCHTGPGAEGHSRSTQPMHLSGEASTARTCPQEPLRGTPGGALWLGVLRLLLFKLLLFDLLLTCSCLCDPAGPLPSPATTTRLRALGSHRLHPATETGGREATSSPRPQPRDRRWGDTPPGRKPGSPVRAKRSGSGVKQTLNFDLLKLAGDVESNPGPSRGHMTEYKPTVRLATRDDVPRAVRTLAAAFADYPATRHTVDPDRHIERVTELQELFLTRVGLDIGKVWVADDGAAVAVWTTPESVEAGAVFAEIGPRMAELSGSRLAAQQQMEGLLAPHRPKEPAWFLATVGVSPDHQGKGLGSAVVLPGVEAAERAGVPAFLETSAPRNLPFYERLGFTVTADVEVPEGPRTWCMTRKPGA

SEQ ID NO: 14591 - protein, 1018 aa, Artificial Sequence
  Synthetic Polypeptide
MTIRLLCYMGFYFLGAGLMGVTQTPKFQVLKTGQSMTLQCAQDMNHEYMSWYRQDPGMGLRLIHYSVGAGITDQGEVPNGYNVSRSTTEDFPLRLLSAAPSQTSVYFCASSFQTGASYGYTFGSGTRLTVLEGKPIPNPLLGLDSTGSGDKQLDADVSPKPTIFLPSIAETKLQKAGTYLCLLEKFFPDVIKIHWQEKKSNTILGSQEGNTMKTNDTYMKFSWLTVPEKSLDKEHRCIVRHENNKNGVDQEIIFPPIKTDVITMDPKDNCSKDANDTLLLQLTNTSAYYMYLLLLLKSVVYFAIITCCLLRRTAFCCNGEKSRAKRSGSGATNFSLLKQAGDVEENPGPTSMDWIWRILFLVGAATGAHSGPQVQLQESGGGLAQAGGSLRLSCAASGRTFSMGWFRQAPGKEREFVAAITYSGGSPYYASSVRGRFTISRDNAKNTVYLQMNSLKPEDTAVYYCAANPTYGSDWNAENWGQGTQVTVSSGSGGGGSGGGGSGGGGSFEILNVEQSPQSLHVQEGDSTNFTCSFPSSNFYALHWYRWETAKSPEALFVMTLNGDEKKKGRISATLNTKEGYSYLYIKGSQPEDSATYLCARNTGNQFYFGTGTSLTVIPNEQKLISEEDGSGSQPHTKPSVFVMKNGTNVACLVKEFYPKDIRINLVSSKKITEFDPAIVISPSGKYNAVKLGKYEDSNSVTCSVQHDNKTVHSTDFEVKTDSTDHVKPKETENTKQPSKSCHKPKAIVHTEKVNMMSLTVLGLRMLFAKTVAVNFLLTAKLFFLRAKRSGSGVKQTLNFDLLKLAGDVESNPGPSRGHMTEYKPTVRLATRDDVPRAVRTLAAAFADYPATRHTVDPDRHIERVTELQELFLTRVGLDIGKVWVADDGAAVAVWTTPESVEAGAVFAEIGPRMAELSGSRLAAQQQMEGLLAPHRPKEPAWFLATVGVSPDHQGKGLGSAVVLPGVEAAERAGVPAFLETSAPRNLPFYERLGFTVTADVEVPEGPRTWCMTRKPGA

SEQ ID NO: 14592 - protein, 756 aa, Artificial Sequence
  Synthetic Polypeptide
MTIRLLCYMGFYFLGAGLMGVTQTPKFQVLKTGQSMTLQCAQDMNHEYMSWYRQDPGMGLRLIHYSVGAGITDQGEVPNGYNVSRSTTEDFPLRLLSAAPSQTSVYFCASSFQTGASYGYTFGSGTRLTVLESQPHTKPSVFVMKNGTNVACLVKEFYPKDIRINLVSSKKITEFDPAIVISPSGKYNAVKLGKYEDSNSVTCSVQHDNKTVHSTDFEVKTDSTDHVKPKETENTKQPSKSCHKPKAIVHTEKVNMMSLTVLGLRMLFAKTVAVNFLLTAKLFFLRAKRSGSGATNFSLLKQAGDVEENPGPTSMDWIWRILFLVGAATGAHSGPQVQLQESGGGLAQAGGSLRLSCAASGRTFSMGWFRQAPGKEREFVAAITYSGGSPYYASSVRGRFTISRDNAKNTVYLQMNSLKPEDTAVYYCAANPTYGSDWNAENWGQGTQVTVSSGSGGGGSGGGGSGGGGSFEILNVEQSPQSLHVQEGDSTNFTCSFPSSNFYALHWYRWETAKSPEALFVMTLNGDEKKKGRISATLNTKEGYSYLYIKGSQPEDSATYLCARNTGNQFYFGTGTSLTVIPNDKQLDADVSPKPTIFLPSIAETKLQKAGTYLCLLEKFFPDVIKIHWQEKKSNTILGSQEGNTMKTNDTYMKFSWLTVPEKSLDKEHRCIVRHENNKNGVDQEIIFPPIKTDVITMDPKDNCSKDANDTLLLQLTNTSAYYMYLLLLLKSVVYFAIITCCLLRRTAFCCNGEKS

SEQ ID NO: 14593 - protein, 1160 aa, Artificial Sequence
  Synthetic Polypeptide
MTIRLLCYMGFYFLGAGLMGVTQTPKFQVLKTGQSMTLQCAQDMNHEYMSWYRQDPGMGLRLIHYSVGAGITDQGEVPNGYNVSRSTTEDFPLRLLSAAPSQTSVYFCASSFQTGASYGYTFGSGTRLTVGQPKANPTVTLFPPSSEELQANKATLVCLISDFYPGAVTVAWKADGSPVKAGVETTKPSKQSNNKYAASSYLSLTPEQWKSHRSYSCQVTHEGSTVEKTVAPTECSGSQSFGLLDPKLCYLLDGILFIYGVILTALFLRVKFSRSADAPAYQQGQNQLYNELNLGRREEYDVLDKRRGRDPEMGGKPQRRKNPQEGLYNELQKDKMAEAYSEIGMKGERRRGKGHDGLYQGLSTATKDTYDALHMQALPPRRAKRSGSGATNFSLLKQAGDVEENPGPTSMDWIWRILFLVGAATGAHSGPQVQLQESGGGLAQAGGSLRLSCAASGRTFSMGWFRQAPGKEREFVAAITYSGGSPYYASSVRGRFTISRDNAKNTVYLQMNSLKPEDTAVYYCAANPTYGSDWNAENWGQGTQVTVSSGSGGGGSGGGGSGGGGSFEILNVEQSPQSLHVQEGDSTNFTCSFPSSNFYALHWYRWETAKSPEALFVMTLNGDEKKKGRISATLNTKEGYSYLYIKGSQPEDSATYLCARNTGNQFYFGTGTSLTVIPNASTKGPSVFPLAPSSKSTSGGTAALGCLVKDYFPEPVTVSWNSGALTSGVHTFPAVLQSSGLYSLSSVVTVPSSSLGTQTYICNVNHKPSNTKVDKRVEPKSCGTQSFGLLDPKLCYLLDGILFIYGVILTALFLRVKFSRSADAPAYQQGQNQLYNELNLGRREEYDVLDKRRGRDPEMGGKPQRRKNPQEGLYNELQKDKMAEAYSEIGMKGERRRGKGHDGLYQGLSTATKDTYDALHMQALPPRRAKRSGSGVKQTLNFDLLKLAGDVESNPGPSRGHMTEYKPTVRLATRDDVPRAVRTLAAAFADYPATRHTVDPDRHIERVTELQELFLTRVGLDIGKVWVADDGAAVAVWTTPESVEAGAVFAEIGPRMAELSGSRLAAQQQMEGLLAPHRPKEPAWFLATVGVSPDHQGKGLGSAVVLPGVEAAERAGVPAFLETSAPRNLPFYERLGFTVTADVEVPEGPRTWCMTRKPGA

SEQ ID NO: 14594 - protein, 944 aa, Artificial Sequence
  Synthetic Polypeptide
MTIRLLCYMGFYFLGAGLMGVTQTPKFQVLKTGQSMTLQCAQDMNHEYMSWYRQDPGMGLRLIHYSVGAGITDQGEVPNGYNVSRSTTEDFPLRLLSAAPSQTSVYFCASSFQTGASYGYTFGSGTRLTVLEDLKNVFPPEVAVFEPSEAEISHTQKATLVCLATGFYPDHVELSWWVNGKEVHSGVSTDPQPLKEQPALNDSRYCLSSRLRVSATFWQNPRNHFRCQVQFYGLSENDEWTQDRAKPVTQIVSAEAWGRADCGSQSFGLLDPKLCYLLDGILFIYGVILTALFLRVKFSRSADAPAYQQGQNQLYNELNLGRREEYDVLDKRRGRDPEMGGKPQRRKNPQEGLYNELQKDKMAEAYSEIGMKGERRRGKGHDGLYQGLSTATKDTYDALHMQALPPRRAKRSGSGATNFSLLKQAGDVEENPGPTSMDWIWRILFLVGAATGAHSGPQVQLQESGGGLAQAGGSLRLSCAASGRTFSMGWFRQAPGKEREFVAAITYSGGSPYYASSVRGRFTISRDNAKNTVYLQMNSLKPEDTAVYYCAANPTYGSDWNAENWGQGTQVTVSSGSGGGGSGGGGSGGGGSFEILNVEQSPQSLHVQEGDSTNFTCSFPSSNFYALHWYRWETAKSPEALFVMTLNGDEKKKGRISATLNTKEGYSYLYIKGSQPEDSATYLCARNTGNQFYFGTGTSLTVIPNIQNPDPAVYQLRDSKSSDKSVCLFTDFDSQTNVSQSKDSDVYITDKTVLDMRSMDFKSNSAVAWSNKSDFACANAFNNSIIPEDTFFPSPESSCGTQSFGLLDPKLCYLLDGILFIYGVILTALFLRVKFSRSADAPAYQQGQNQLYNELNLGRREEYDVLDKRRGRDPEMGGKPQRRKNPQEGLYNELQKDKMAEAYSEIGMKGERRRGKGHDGLYQGLSTATKDTYDALHMQALPPR

SEQ ID NO: 14595 - protein, 944 aa, Artificial Sequence
  Synthetic Polypeptide
MTIRLLCYMGFYFLGAGLMGVTQTPKFQVLKTGQSMTLQCAQDMNHEYMSWYRQDPGMGLRLIHYSVGAGITDQGEVPNGYNVSRSTTEDFPLRLLSAAPSQTSVYFCASSFQTGASYGYTFGSGTRLTVLEDLKNVFPPEVAVFEPSKAEIAHTQKATLVCLATGFYPDHVELSWWVNGKEVHSGVCTDPQPLKEQPALNDSRYCLSSRLRVSATFWQNPRNHFRCQVQFYGLSENDEWTQDRAKPVTQIVSAEAWGRADCGSQSFGLLDPKLCYLLDGILFIYGVILTALFLRVKFSRSADAPAYQQGQNQLYNELNLGRREEYDVLDKRRGRDPEMGGKPQRRKNPQEGLYNELQKDKMAEAYSEIGMKGERRRGKGHDGLYQGLSTATKDTYDALHMQALPPRRAKRSGSGATNFSLLKQAGDVEENPGPTSMDWIWRILFLVGAATGAHSGPQVQLQESGGGLAQAGGSLRLSCAASGRTFSMGWFRQAPGKEREFVAAITYSGGSPYYASSVRGRFTISRDNAKNTVYLQMNSLKPEDTAVYYCAANPTYGSDWNAENWGQGTQVTVSSGSGGGGSGGGGSGGGGSFEILNVEQSPQSLHVQEGDSTNFTCSFPSSNFYALHWYRWETAKSPEALFVMTLNGDEKKKGRISATLNTKEGYSYLYIKGSQPEDSATYLCARNTGNQFYFGTGTSLTVIPNIQNPDPAVYQLRDSKSSDKSVCLFTDFDSQTNVSQSKDSDVYITDKCVLDMRSMDFKSNSAVAWSNKSDFACANAFNNSIIPEDTFFPSSDVPCGTQSFGLLDPKLCYLLDGILFIYGVILTALFLRVKFSRSADAPAYQQGQNQLYNELNLGRREEYDVLDKRRGRDPEMGGKPQRRKNPQEGLYNELQKDKMAEAYSEIGMKGERRRGKGHDGLYQGLSTATKDTYDALHMQALPPR

SEQ ID NO: 14596 - protein, 1015 aa, Artificial Sequence
  Synthetic Polypeptide
MTIRLLCYMGFYFLGAGLMGVTQTPKFQVLKTGQSMTLQCAQDMNHEYMSWYRQDPGMGLRLIHYSVGAGITDQGEVPNGYNVSRSTTEDFPLRLLSAAPSQTSVYFCASSFQTGASYGYTFGSGTRLTVLEGKPIPNPLLGLDSTGSGEDLKNVFPPEVAVFEPSEAEISHTQKATLVCLATGFYPDHVELSWWVNGKEVHSGVSTDPQPLKEQPALNDSRYCLSSRLRVSATFWQNPRNHFRCQVQFYGLSENDEWTQDRAKPVTQIVSAEAWGRADCGSQSFGLLDPKLCYLLDGILFIYGVILTALFLRVKFSRSADAPAYQQGQNQLYNELNLGRREEYDVLDKRRGRDPEMGGKPQRRKNPQEGLYNELQKDKMAEAYSEIGMKGERRRGKGHDGLYQGLSTATKDTYDALHMQALPPRRAKRSGSGATNFSLLKQAGDVEENPGPTSMDWIWRILFLVGAATGAHSGPQVQLQESGGGLAQAGGSLRLSCAASGRTFSMGWFRQAPGKEREFVAAITYSGGSPYYASSVRGRFTISRDNAKNTVYLQMNSLKPEDTAVYYCAANPTYGSDWNAENWGQGTQVTVSSGSGGGGSGGGGSGGGGSFEILNVEQSPQSLHVQEGDSTNFTCSFPSSNFYALHWYRWETAKSPEALFVMTLNGDEKKKGRISATLNTKEGYSYLYIKGSQPEDSATYLCARNTGNQFYFGTGTSLTVIPNEQKLISEEDGSGIQNPDPAVYQLRDSKSSDKSVCLFTDFDSQTNVSQSKDSDVYITDKTVLDMRSMDFKSNSAVAWSNKSDFACANAFNNSIIPEDTFFPSPESSCGTQSFGLLDPKLCYLLDGILFIYGVILTALFLRSKRSRLLHSDYMNMTPRRPGPTRKHYQPYAPPRDFAAYRSRVKFSRSADAPAYQQGQNQLYNELNLGRREEYDVLDKRRGRDPEMGGKPQRRKNPQEGLYNELQKDKMAEAYSEIGMKGERRRGKGHDGLYQGLSTATKDTYDALHMQALPPR

SEQ ID NO: 14597 - protein, 1056 aa, Artificial Sequence
  Synthetic Polypeptide
MTIRLLCYMGFYFLGAGLMGVTQTPKFQVLKTGQSMTLQCAQDMNHEYMSWYRQDPGMGLRLIHYSVGAGITDQGEVPNGYNVSRSTTEDFPLRLLSAAPSQTSVYFCASSFQTGASYGYTFGSGTRLTVLEGKPIPNPLLGLDSTGSGEDLKNVFPPEVAVFEPSEAEISHTQKATLVCLATGFYPDHVELSWWVNGKEVHSGVSTDPQPLKEQPALNDSRYCLSSRLRVSATFWQNPRNHFRCQVQFYGLSENDEWTQDRAKPVTQIVSAEAWGRADCGSQSFGLLDPKLCYLLDGILFIYGVILTALFLRSKRSRLLHSDYMNMTPRRPGPTRKHYQPYAPPRDFAAYRSRVKFSRSADAPAYQQGQNQLYNELNLGRREEYDVLDKRRGRDPEMGGKPQRRKNPQEGLYNELQKDKMAEAYSEIGMKGERRRGKGHDGLYQGLSTATKDTYDALHMQALPPRRAKRSGSGATNFSLLKQAGDVEENPGPTSMDWIWRILFLVGAATGAHSGPQVQLQESGGGLAQAGGSLRLSCAASGRTFSMGWFRQAPGKEREFVAAITYSGGSPYYASSVRGRFTISRDNAKNTVYLQMNSLKPEDTAVYYCAANPTYGSDWNAENWGQGTQVTVSSGSGGGGSGGGGSGGGGSFEILNVEQSPQSLHVQEGDSTNFTCSFPSSNFYALHWYRWETAKSPEALFVMTLNGDEKKKGRISATLNTKEGYSYLYIKGSQPEDSATYLCARNTGNQFYFGTGTSLTVIPNEQKLISEEDGSGIQNPDPAVYQLRDSKSSDKSVCLFTDFDSQTNVSQSKDSDVYITDKTVLDMRSMDFKSNSAVAWSNKSDFACANAFNNSIIPEDTFFPSPESSCGTQSFGLLDPKLCYLLDGILFIYGVILTALFLRSKRSRLLHSDYMNMTPRRPGPTRKHYQPYAPPRDFAAYRSRVKFSRSADAPAYQQGQNQLYNELNLGRREEYDVLDKRRGRDPEMGGKPQRRKNPQEGLYNELQKDKMAEAYSEIGMKGERRRGKGHDGLYQGLSTATKDTYDALHMQALPPR

SEQ ID NO: 14598 - protein, 1017 aa, Artificial Sequence
  Synthetic Polypeptide
MTIRLLCYMGFYFLGAGLMGVTQTPKFQVLKTGQSMTLQCAQDMNHEYMSWYRQDPGMGLRLIHYSVGAGITDQGEVPNGYNVSRSTTEDFPLRLLSAAPSQTSVYFCASSFQTGASYGYTFGSGTRLTVLEGKPIPNPLLGLDSTGSGEDLKNVFPPEVAVFEPSEAEISHTQKATLVCLATGFYPDHVELSWWVNGKEVHSGVSTDPQPLKEQPALNDSRYCLSSRLRVSATFWQNPRNHFRCQVQFYGLSENDEWTQDRAKPVTQIVSAEAWGRADCGSQSFGLLDPKLCYLLDGILFIYGVILTALFLRVKFSRSADAPAYQQGQNQLYNELNLGRREEYDVLDKRRGRDPEMGGKPQRRKNPQEGLYNELQKDKMAEAYSEIGMKGERRRGKGHDGLYQGLSTATKDTYDALHMQALPPRRAKRSGSGATNFSLLKQAGDVEENPGPTSMDWIWRILFLVGAATGAHSGPQVQLQESGGGLAQAGGSLRLSCAASGRTFSMGWFRQAPGKEREFVAAITYSGGSPYYASSVRGRFTISRDNAKNTVYLQMNSLKPEDTAVYYCAANPTYGSDWNAENWGQGTQVTVSSGSGGGGSGGGGSGGGGSFEILNVEQSPQSLHVQEGDSTNFTCSFPSSNFYALHWYRWETAKSPEALFVMTLNGDEKKKGRISATLNTKEGYSYLYIKGSQPEDSATYLCARNTGNQFYFGTGTSLTVIPNEQKLISEEDLGSGIQNPDPAVYQLRDSKSSDKSVCLFTDFDSQTNVSQSKDSDVYITDKTVLDMRSMDFKSNSAVAWSNKSDFACANAFNNSIIPEDTFFPSPESSCGTQSFGLLDPKLCYLLDGILFIYGVILTALFLKRGRKKLLYIFKQPFMRPVQTTQEEDGCSCRFPEEEEGGCELRVKFSRSADAPAYQQGQNQLYNELNLGRREEYDVLDKRRGRDPEMGGKPQRRKNPQEGLYNELQKDKMAEAYSEIGMKGERRRGKGHDGLYQGLSTATKDTYDALHMQALPPR

SEQ ID NO: 14599 - protein, 1059 aa, Artificial Sequence
  Synthetic Polypeptide
MTIRLLCYMGFYFLGAGLMGVTQTPKFQVLKTGQSMTLQCAQDMNHEYMSWYRQDPGMGLRLIHYSVGAGITDQGEVPNGYNVSRSTTEDFPLRLLSAAPSQTSVYFCASSFQTGASYGYTFGSGTRLTVLEGKPIPNPLLGLDSTGSGEDLKNVFPPEVAVFEPSEAEISHTQKATLVCLATGFYPDHVELSWWVNGKEVHSGVSTDPQPLKEQPALNDSRYCLSSRLRVSATFWQNPRNHFRCQVQFYGLSENDEWTQDRAKPVTQIVSAEAWGRADCGSQSFGLLDPKLCYLLDGILFIYGVILTALFLKRGRKKLLYIFKQPFMRPVQTTQEEDGCSCRFPEEEEGGCELRVKFSRSADAPAYQQGQNQLYNELNLGRREEYDVLDKRRGRDPEMGGKPQRRKNPQEGLYNELQKDKMAEAYSEIGMKGERRRGKGHDGLYQGLSTATKDTYDALHMQALPPRRAKRSGSGATNFSLLKQAGDVEENPGPTSMDWIWRILFLVGAATGAHSGPQVQLQESGGGLAQAGGSLRLSCAASGRTFSMGWFRQAPGKEREFVAAITYSGGSPYYASSVRGRFTISRDNAKNTVYLQMNSLKPEDTAVYYCAANPTYGSDWNAENWGQGTQVTVSSGSGGGGSGGGGSGGGGSFEILNVEQSPQSLHVQEGDSTNFTCSFPSSNFYALHWYRWETAKSPEALFVMTLNGDEKKKGRISATLNTKEGYSYLYIKGSQPEDSATYLCARNTGNQFYFGTGTSLTVIPNEQKLISEEDLGSGIQNPDPAVYQLRDSKSSDKSVCLFTDFDSQTNVSQSKDSDVYITDKTVLDMRSMDFKSNSAVAWSNKSDFACANAFNNSIIPEDTFFPSPESSCGTQSFGLLDPKLCYLLDGILFIYGVILTALFLKRGRKKLLYIFKQPFMRPVQTTQEEDGCSCRFPEEEEGGCELRVKFSRSADAPAYQQGQNQLYNELNLGRREEYDVLDKRRGRDPEMGGKPQRRKNPQEGLYNELQKDKMAEAYSEIGMKGERRRGKGHDGLYQGLSTATKDTYDALHMQALPPR

SEQ ID NO: 14600 - protein, 949 aa, Artificial Sequence
  Synthetic Polypeptide
MTIRLLCYMGFYFLGAGLMGVTQTPKFQVLKTGQSMTLQCAQDMNHEYMSWYRQDPGMGLRLIHYSVGAGITDQGEVPNGYNVSRSTTEDFPLRLLSAAPSQTSVYFCASSFQTGASYGYTFGSGTRLTVLEQSFGLLDPKLCYLLDGILFIYGVILTALFLRVKFSRSADAPAYQQGQNQLYNELNLGRREEYDVLDKRRGRDPEMGGKPQRRKNPQEGLYNELQKDKMAEAYSEIGMKGERRRGKGHDGLYQGLSTATKDTYDALHMQALPPRRAKRSGSGATNFSLLKQAGDVEENPGPTSMDWIWRILFLVGAATGAHSGPQVQLQESGGGLAQAGGSLRLSCAASGRTFSMGWFRQAPGKEREFVAAITYSGGSPYYASSVRGRFTISRDNAKNTVYLQMNSLKPEDTAVYYCAANPTYGSDWNAENWGQGTQVTVSSGSGGGGSGGGGSGGGGSFEILNVEQSPQSLHVQEGDSTNFTCSFPSSNFYALHWYRWETAKSPEALFVMTLNGDEKKKGRISATLNTKEGYSYLYIKGSQPEDSATYLCARNTGNQFYFGTGTSLTVIPNQSFGLLDPKLCYLLDGILFIYGVILTALFLRVKFSRSADAPAYQQGQNQLYNELNLGRREEYDVLDKRRGRDPEMGGKPQRRKNPQEGLYNELQKDKMAEAYSEIGMKGERRRGKGHDGLYQGLSTATKDTYDALHMQALPPRRAKRSGSGVKQTLNFDLLKLAGDVESNPGPSRGHMTEYKPTVRLATRDDVPRAVRTLAAAFADYPATRHTVDPDRHIERVTELQELFLTRVGLDIGKVWVADDGAAVAVWTTPESVEAGAVFAEIGPRMAELSGSRLAAQQQMEGLLAPHRPKEPAWFLATVGVSPDHQGKGLGSAVVLPGVEAAERAGVPAFLETSAPRNLPFYERLGFTVTADVEVPEGPRTWCMTRKPGA

SEQ ID NO: 14601 - protein, 774 aa, Artificial Sequence
  Synthetic Polypeptide
MTIRLLCYMGFYFLGAGLMGVTQTPKFQVLKTGQSMTLQCAQDMNHEYMSWYRQDPGMGLRLIHYSVGAGITDQGEVPNGYNVSRSTTEDFPLRLLSAAPSQTSVYFCASSFQTGASYGYTFGSGTRLTVLEGQPKANPTVTLFPPSSEELQANKATLVCLISDFYPGAVTVAWKADGSPVKAGVETTKPSKQSNNKYAASSYLSLTPEQWKSHRSYSCQVTHEGSTVEKTVAPTECSPIKTDVITMDPKDNCSKDANDTLLLQLTNTSAYYMYLLLLLKSVVYFAIITCCLLRRTAFCCNGEKSRAKRSGSGATNFSLLKQAGDVEENPGPTSMDWIWRILFLVGAATGAHSGPQVQLQESGGGLAQAGGSLRLSCAASGRTFSMGWFRQAPGKEREFVAAITYSGGSPYYASSVRGRFTISRDNAKNTVYLQMNSLKPEDTAVYYCAANPTYGSDWNAENWGQGTQVTVSSGSGGGGSGGGGSGGGGSFEILNVEQSPQSLHVQEGDSTNFTCSFPSSNFYALHWYRWETAKSPEALFVMTLNGDEKKKGRISATLNTKEGYSYLYIKGSQPEDSATYLCARNTGNQFYFGTGTSLTVIPNASTKGPSVFPLAPSSKSTSGGTAALGCLVKDYFPEPVTVSWNSGALTSGVHTFPAVLQSSGLYSLSSVVTVPSSSLGTQTYICNVNHKPSNTKVDKRVEPKSCEVKTDSTDHVKPKETENTKQPSKSCHKPKAIVHTEKVNMMSLTVLGLRMLFAKTVAVNFLLTAKLFFL

SEQ ID NO: 14602 - protein, 752 aa, Artificial Sequence
  Synthetic Polypeptide
MTIRLLCYMGFYFLGAGLMGVTQTPKFQVLKTGQSMTLQCAQDMNHEYMSWYRQDPGMGLRLIHYSVGAGITDQGEVPNGYNVSRSTTEDFPLRLLSAAPSQTSVYFCASSFQTGASYGYTFGSGTRLTVLEGQPKANPTVTLFPPSSEELQANKATLVCLISDFYPGAVTVAWKADGSPVKAGVETTKPSKQSNNKYAASSYLSLTPEQWKSHRSYSCQVTHEGSTVEKTVAPTECSGRADCGITSASYHQGVLSATILYEILLGKATLYAVLVSALVLMAMVKRKDSRGRAKRSGSGATNFSLLKQAGDVEENPGPTSMDWIWRILFLVGAATGAHSGPQVQLQESGGGLAQAGGSLRLSCAASGRTFSMGWFRQAPGKEREFVAAITYSGGSPYYASSVRGRFTISRDNAKNTVYLQMNSLKPEDTAVYYCAANPTYGSDWNAENWGQGTQVTVSSGSGGGGSGGGGSGGGGSFEILNVEQSPQSLHVQEGDSTNFTCSFPSSNFYALHWYRWETAKSPEALFVMTLNGDEKKKGRISATLNTKEGYSYLYIKGSQPEDSATYLCARNTGNQFYFGTGTSLTVIPNASTKGPSVFPLAPSSKSTSGGTAALGCLVKDYFPEPVTVSWNSGALTSGVHTFPAVLQSSGLYSLSSVVTVPSSSLGTQTYICNVNHKPSNTKVDKRVEPKSCIPEDTFFPSSDVPCDVKLVEKSFETDTNLNFQNLSVIGFRILLLKVAGFNLLMTLRLWSS

SEQ ID NO: 14603 - protein, 752 aa, Artificial Sequence
  Synthetic Polypeptide
MTIRLLCYMGFYFLGAGLMGVTQTPKFQVLKTGQSMTLQCAQDMNHEYMSWYRQDPGMGLRLIHYSVGAGITDQGEVPNGYNVSRSTTEDFPLRLLSAAPSQTSVYFCASSFQTGASYGYTFGSGTRLTVLEGQPKANPTVTLFPPSSEELQANKATLVCLISDFYPGAVTVAWKADGSPVKAGVETTKPSKQSNNKYAASSYLSLTPEQWKSHRSYSCQVTHEGSTVEKTVAPTECSGRADCGFTSESYQQGVLSATILYEILLGKATLYAVLVSALVLMAMVKRKDSRGRAKRSGSGATNFSLLKQAGDVEENPGPTSMDWIWRILFLVGAATGAHSGPQVQLQESGGGLAQAGGSLRLSCAASGRTFSMGWFRQAPGKEREFVAAITYSGGSPYYASSVRGRFTISRDNAKNTVYLQMNSLKPEDTAVYYCAANPTYGSDWNAENWGQGTQVTVSSGSGGGGSGGGGSGGGGSFEILNVEQSPQSLHVQEGDSTNFTCSFPSSNFYALHWYRWETAKSPEALFVMTLNGDEKKKGRISATLNTKEGYSYLYIKGSQPEDSATYLCARNTGNQFYFGTGTSLTVIPNASTKGPSVFPLAPSSKSTSGGTAALGCLVKDYFPEPVTVSWNSGALTSGVHTFPAVLQSSGLYSLSSVVTVPSSSLGTQTYICNVNHKPSNTKVDKRVEPKSCIPEDTFFPSPESSCDVKLVEKSFETDTNLNFQNLSVIGFRILLLKVAGFNLLMTLRLWSS

SEQ ID NO: 14604 - protein, 586 aa, Artificial Sequence
  Synthetic Polypeptide
MDWIWRILFLVGAATGAHSGPQVQLQESGGGLAQAGGSLRLSCAASGRTFSMGWFRQAPGKEREFVAAITYSGGSPYYASSVRGRFTISRDNAKNTVYLQMNSLKPEDTAVYYCAANPTYGSDWNAENWGQGTQVTVSSGSGGGGSGGGGSGGGGSFEILNVEQSPQSLHVQEGDSTNFTCSFPSSNFYALHWYRWETAKSPEALFVMTLNGDEKKKGRISATLNTKEGYSYLYIKGSQPEDSATYLCARNTGNQFYFGTGTSLTVIPNGGGGSGGGGSGGGGSGVTQTPKFQVLKTGQSMTLQCAQDMNHEYMSWYRQDPGMGLRLIHYSVGAGITDQGEVPNGYNVSRSTTEDFPLRLLSAAPSQTSVYFCASSFQTGASYGYTFGSGTRLTVTRGGGSDGNEEMGGITQTPYKVSISGTTVILTCPQYPGSEILWQHNDKNIGGDEDDKNIGSDEDHLSLKEFSELEQSGYYVCYPRGSKPEDANFYLYLRARVCENCMEMDVMSVATIVIVDICITGGLLLLVYYWSKNRKAKAKPVTRGAGAGGRQRGQNKERPPPVPNPDYEPIRKGQRDLYSGLNQRRI

SEQ ID NO: 14605 - protein, 551 aa, Artificial Sequence
  Synthetic Polypeptide
MDWIWRILFLVGAATGAHSGPQVQLQESGGGLAQAGGSLRLSCAASGRTFSMGWFRQAPGKEREFVAAITYSGGSPYYASSVRGRFTISRDNAKNTVYLQMNSLKPEDTAVYYCAANPTYGSDWNAENWGQGTQVTVSSGSGGGGSGGGGSGGGGSFEILNVEQSPQSLHVQEGDSTNFTCSFPSSNFYALHWYRWETAKSPEALFVMTLNGDEKKKGRISATLNTKEGYSYLYIKGSQPEDSATYLCARNTGNQFYFGTGTSLTVIPNGGGGSGGGGSGGGGSGVTQTPKFQVLKTGQSMTLQCAQDMNHEYMSWYRQDPGMGLRLIHYSVGAGITDQGEVPNGYNVSRSTTEDFPLRLLSAAPSQTSVYFCASSFQTGASYGYTFGSGTRLTVTRGGGSFKIPIEELEDRVFVNCNTSITWVEGTVGTLLSDITRLDLGKRILDPRGIYRCNGTDIYKDKESTVQVHYRMCQSCVELDPATVAGIIVTDVIATLLLALGVFCFAGHETGRLSGAADTQALLRNDQVYQPLRDRDDAQYSHLGGNWARNK

SEQ ID NO: 14606 - protein, 561 aa, Artificial Sequence
  Synthetic Polypeptide
MDWIWRILFLVGAATGAHSGPQVQLQESGGGLAQAGGSLRLSCAASGRTFSMGWFRQAPGKEREFVAAITYSGGSPYYASSVRGRFTISRDNAKNTVYLQMNSLKPEDTAVYYCAANPTYGSDWNAENWGQGTQVTVSSGSGGGGSGGGGSGGGGSFEILNVEQSPQSLHVQEGDSTNFTCSFPSSNFYALHWYRWETAKSPEALFVMTLNGDEKKKGRISATLNTKEGYSYLYIKGSQPEDSATYLCARNTGNQFYFGTGTSLTVIPNGGGGSGGGGSGGGGSGVTQTPKFQVLKTGQSMTLQCAQDMNHEYMSWYRQDPGMGLRLIHYSVGAGITDQGEVPNGYNVSRSTTEDFPLRLLSAAPSQTSVYFCASSFQTGASYGYTFGSGTRLTVTRGGGSQSIKGNHLVKVYDYQEDGSVLLTCDAEAKNITWFKDGKMIGFLTEDKKKWNLGSNAKDPRGMYQCKGSQNKSKPLQVYYRMCQNCIELNAATISGFLFAEIVSIFVLAVGVYFIAGQDGVRQSRASDKQTLLPNDQLYQPLKDREDDQYSHLQGNQLRRN

SEQ ID NO: 14607 - protein, 544 aa, Artificial Sequence
  Synthetic Polypeptide
MDWIWRILFLVGAATGAHSGPQVQLQESGGGLAQAGGSLRLSCAASGRTFSMGWFRQAPGKEREFVAAITYSGGSPYYASSVRGRFTISRDNAKNTVYLQMNSLKPEDTAVYYCAANPTYGSDWNAENWGQGTQVTVSSGSGGGGSGGGGSGGGGSFEILNVEQSPQSLHVQEGDSTNFTCSFPSSNFYALHWYRWETAKSPEALFVMTLNGDEKKKGRISATLNTKEGYSYLYIKGSQPEDSATYLCARNTGNQFYFGTGTSLTVIPNGGGGSGGGGSGGGGSGVTQTPKFQVLKTGQSMTLQCAQDMNHEYMSWYRQDPGMGLRLIHYSVGAGITDQGEVPNGYNVSRSTTEDFPLRLLSAAPSQTSVYFCASSFQTGASYGYTFGSGTRLTVTRGGGSQSFGLLDPKLCYLLDGILFIYGVILTALFLRVKFSRSADAPAYQQGQNQLYNELNLGRREEYDVLDKRRGRDPEMGGKPQRRKNPQEGLYNELQKDKMAEAYSEIGMKGERRRGKGHDGLYQGLSTATKDTYDALHMQALPPR

SEQ ID NO: 14608 - protein, 575 aa, Artificial Sequence
  Synthetic Polypeptide
MDWIWRILFLVGAATGAHSGPQVQLQESGGGLAQAGGSLRLSCAASGRTFSMGWFRQAPGKEREFVAAITYSGGSPYYASSVRGRFTISRDNAKNTVYLQMNSLKPEDTAVYYCAANPTYGSDWNAENWGQGTQVTVSSGSGGGGSGGGGSGGGGSFEILNVEQSPQSLHVQEGDSTNFTCSFPSSNFYALHWYRWETAKSPEALFVMTLNGDEKKKGRISATLNTKEGYSYLYIKGSQPEDSATYLCARNTGNQFYFGTGTSLTVIPNIQNPDPAVYQLRDSKSSDKSVCLFTDFDSQTNVSQSKDSDVYITDKTVLDMRSMDFKSNSAVAWSNKSDFACANAFNNSIIPEDTFFPSPESSCDVKLVEKSFETDTNLNFQNLSVIGFRILLLKVAGFNLLMTLRLWSSRAKRSGSGVKQTLNFDLLKLAGDVESNPGPSRGHMAKPLSQEESTLIERATATINSIPISEDYSVASAALSSDGRIFTGVNVYHFTGGPCAELVVLGTAAAAAAGNLTCIVAIGNENRGILSPCGRCRQVLLDLHPGIKAIVKDSDGQPTAVGIRELLPSGYVWEG

SEQ ID NO: 14609 - protein, 409 aa, Artificial Sequence
  Synthetic Polypeptide
MDWIWRILFLVGAATGAHSGPQVQLQESGGGLAQAGGSLRLSCAASGRTFSMGWFRQAPGKEREFVAAITYSGGSPYYASSVRGRFTISRDNAKNTVYLQMNSLKPEDTAVYYCAANPTYGSDWNAENWGQGTQVTVSSGSGGGGSGGGGSGGGGSFEILNVEQSPQSLHVQEGDSTNFTCSFPSSNFYALHWYRWETAKSPEALFVMTLNGDEKKKGRISATLNTKEGYSYLYIKGSQPEDSATYLCARNTGNQFYFGTGTSLTVIPNIQNPDPAVYQLRDSKSSDKSVCLFTDFDSQTNVSQSKDSDVYITDKTVLDMRSMDFKSNSAVAWSNKSDFACANAFNNSIIPEDTFFPSPESSCDVKLVEKSFETDTNLNFQNLSVIGFRILLLKVAGFNLLMTLRLWSS

SEQ ID NO: 14610 - protein, 587 aa, Artificial Sequence
  Synthetic Polypeptide
MDWIWRILFLVGAATGAHSGPQVQLQESGGGLAQAGGSLRLSCAASGRTFSMGWFRQAPGKEREFVAAITYSGGSPYYASSVRGRFTISRDNAKNTVYLQMNSLKPEDTAVYYCAANPTYGSDWNAENWGQGTQVTVSSGSGGGGSGGGGSGGGGSFEILNVEQSPQSLHVQEGDSTNFTCSFPSSNFYALHWYRWETAKSPEALFVMTLNGDEKKKGRISATLNTKEGYSYLYIKGSQPEDSATYLCARNTGNQFYFGTGTSLTVIPNEQKLISEEDGSGIQNPDPAVYQLRDSKSSDKSVCLFTDFDSQTNVSQSKDSDVYITDKCVLDMRSMDFKSNSAVAWSNKSDFACANAFNNSIIPEDTFFPSPESSCDVKLVEKSFETDTNLNFQNLSVIGFRILLLKVAGFNLLMTLRLWSSRAKRSGSGVKQTLNFDLLKLAGDVESNPGPSRGHMAKPLSQEESTLIERATATINSIPISEDYSVASAALSSDGRIFTGVNVYHFTGGPCAELVVLGTAAAAAAGNLTCIVAIGNENRGILSPCGRCRQVLLDLHPGIKAIVKDSDGQPTAVGIRELLPSGYVWEG

SEQ ID NO: 14611 - protein, 421 aa, Artificial Sequence
  Synthetic Polypeptide
MDWIWRILFLVGAATGAHSGPQVQLQESGGGLAQAGGSLRLSCAASGRTFSMGWFRQAPGKEREFVAAITYSGGSPYYASSVRGRFTISRDNAKNTVYLQMNSLKPEDTAVYYCAANPTYGSDWNAENWGQGTQVTVSSGSGGGGSGGGGSGGGGSFEILNVEQSPQSLHVQEGDSTNFTCSFPSSNFYALHWYRWETAKSPEALFVMTLNGDEKKKGRISATLNTKEGYSYLYIKGSQPEDSATYLCARNTGNQFYFGTGTSLTVIPNEQKLISEEDGSGIQNPDPAVYQLRDSKSSDKSVCLFTDFDSQTNVSQSKDSDVYITDKCVLDMRSMDFKSNSAVAWSNKSDFACANAFNNSIIPEDTFFPSPESSCDVKLVEKSFETDTNLNFQNLSVIGFRILLLKVAGFNLLMTLRLWSS

SEQ ID NO: 14612 - protein, 630 aa, Artificial Sequence
  Synthetic Polypeptide
MTIRLLCYMGFYFLGAGLMACQVQLVESGGGLVQAGDSVTLSCTASGRTFSSYALAWFRQRPGKEREFVAGLRWGGPTNYADSVKDRFTISGDSAKHTMYLQMNSLKPEDTAVYYCGYNPGGWAVPSQYEYDSWGQGTQVTVSSGTGGGGSGGGGSGGGGSEFGVTQTPKFQVLKTGQSMTLQCAQDMNHEYMSWYRQDPGMGLRLIHYSVGAGITDQGEVPNGYNVSRSTTEDFPLRLLSAAPSQTSVYFCASSFQTGASYGYTFGSGTRLTVGGGGSGGGGSGGGGSILNVEQSPQSLHVQEGDSTNFTCSFPSSNFYALHWYRWETAKSPEALFVMTLNGDEKKKGRISATLNTKEGYSYLYIKGSQPEDSATYLCARNTGNQFYFGTGTSLTVIPNEQKLISEEDLKIEVMYPPPYLDNEKSNGTIIHVKGKHLCPSPLFPGPSKPFWVLVVVGGVLACYSLLVTVAFIIFWVRSKRSRLLHSDYMNMTPRRPGPTRKHYQPYAPPRDFAAYRSRVKFSRSADAPAYQQGQNQLYNELNLGRREEYDVLDKRRGRDPEMGGKPRRKNPQEGLYNELQKDKMAEAYSEIGMKGERRRGKGHDGLYQGLSTATKDTYDALHMQALPPR

SEQ ID NO: 14613 - protein, 636 aa, Artificial Sequence
  Synthetic Polypeptide
MTIRLLCYMGFYFLGAGLMACQVQLVESGGGLVQAGDSVTLSCTASGRTFSSYALAWFRQRPGKEREFVAGLRWGGPTNYADSVKDRFTISGDSAKHTMYLQMNSLKPEDTAVYYCGYNPGGWAVPSQYEYDSWGQGTQVTVSSGTGGGGSGGGGSGGGGSEFGVTQTPKFQVLKTGQSMTLQCAQDMNHEYMSWYRQDPGMGLRLIHYSVGAGITDQGEVPNGYNVSRSTTEDFPLRLLSAAPSQTSVYFCASSFQTGASYGYTFGSGTRLTVGGGGSGGGGSGGGGSILNVEQSPQSLHVQEGDSTNFTCSFPSSNFYALHWYRWETAKSPEALFVMTLNGDEKKKGRISATLNTKEGYSYLYIKGSQPEDSATYLCARNTGNQFYFGTGTSLTVIPNEQKLISEEDLAKPTTTPAPRPPTPAPTIASQPLSLRPEACRPAAGGAVHTRGLDFACDIYIWAPLAGTCGVLLLSLVITLYCKRGRKKLLYIFKQPFMRPVQTTQEEDGCSCRFPEEEEGGCELRVKFSRSADAPAYQQGQNQLYNELNLGRREEYDVLDKRRGRDPEMGGKPRRKNPQEGLYNELQKDKMAEAYSEIGMKGERRRGKGHDGLYQGLSTATKDTYDALHMQALPPR

SEQ ID NO: 14614 - protein, 1049 aa, Artificial Sequence
  Synthetic Polypeptide
MTIRLLCYMGFYFLGAGLMACQVQLVESGGGLVQAGDSVTLSCTASGRTFSSYALAWFRQRPGKEREFVAGLRWGGPTNYADSVKDRFTISGDSAKHTMYLQMNSLKPEDTAVYYCGYNPGGWAVPSQYEYDSWGQGTQVTVSSGTGGGGSGGGGSGGGGSEFGVTQTPKFQVLKTGQSMTLQCAQDMNHEYMSWYRQDPGMGLRLIHYSVGAGITDQGEVPNGYNVSRSTTEDFPLRLLSAAPSQTSVYFCASSFQTGASYGYTFGSGTRLTVGGGGSGGGGSGGGGSILNVEQSPQSLHVQEGDSTNFTCSFPSSNFYALHWYRWETAKSPEALFVMTLNGDEKKKGRISATLNTKEGYSYLYIKGSQPEDSATYLCARNTGNQFYFGTGTSLTVIPNEQKLISEEDLAKPTTTPAPRPPTPAPTIASQPLSLRPEACRPAAGGAVHTRGLDFACDIYIWAPLAGTCGVLLLSLVITLYCGRARVKFSRSADAPAYQQGQNQLYNELNLGRREEYDVLDKRRGRDPEMGGKPRRKNPQEGLYNELQKDKMAEAYSEIGMKGERRRGKGHDGLYQGLSTATKDTYDALHMQALPPRSRGSGATNFSLLKQAGDVEENPGPGIHMATYEVLCEVARKLGTDDREVVLFLLNVFIPQPTLAQLIGALRALKEEGRLTFPLLAECLFRAGRRDLLRDLLHLDPRFLERHLAGTMSYFSPYQLTVLHVDGELCARDIRSLIFLSKDTIGSRSTPQTFLHWVYCMENLDLLGPTDVDALMSMLRSLSRVDLQRQVQTLMGLHLSGPSHSQHYRHTPLETDFYDYKDDDDKTSGSGEGRGSLLTCGDVEENPGPHMTEYKPTVRLATRDDVPRAVRTLAAAFADYPATRHTVDPDRHIERVTELQELFLTRVGLDIGKVWVADDGAAVAVWTTPESVEAGAVFAEIGPRMAELSGSRLAAQQQMEGLLAPHRPKEPAWFLATVGVSPDHQGKGLGSAVVLPGVEAAERAGVPAFLETSAPRNLPFYERLGFTVTADVEVPEGPRTWCMTRKPGA

SEQ ID NO: 14615 - protein, 990 aa, Artificial Sequence
  Synthetic Polypeptide
MTIRLLCYMGFYFLGAGLMACQVQLVESGGGLVQAGDSVTLSCTASGRTFSSYALAWFRQRPGKEREFVAGLRWGGPTNYADSVKDRFTISGDSAKHTMYLQMNSLKPEDTAVYYCGYNPGGWAVPSQYEYDSWGQGTQVTVSSGTGGGGSGGGGSGGGGSEFGVTQTPKFQVLKTGQSMTLQCAQDMNHEYMSWYRQDPGMGLRLIHYSVGAGITDQGEVPNGYNVSRSTTEDFPLRLLSAAPSQTSVYFCASSFQTGASYGYTFGSGTRLTVLEIQNPDPAVYQLRDSKSSDKSVCLFTDFDSQTNVSQSKDSDVYITDKCVLDMRSMDFKSNSAVAWSNKSDFACANAFNNSIIPEDTFFPSSDVPCDVKLVEKSFETDTNLNFQNLSVIGFRILLLKVAGFNLLMTLRLWSSRAKRSGSGVKQTLNFDLLKLAGDVESNPGPTSMACPGFLWALVISTCLEFSMFEILNVEQSPQSLHVQEGDSTNFTCSFPSSNFYALHWYRWETAKSPEALFVMTLNGDEKKKGRISATLNTKEGYSYLYIKGSQPEDSATYLCARNTGNQFYFGTGTSLTVIPNEDLKNVFPPEVAVFEPSKAEIAHTQKATLVCLATGFYPDHVELSWWVNGKEVHSGVCTDPQPLKEQPALNDSRYCLSSRLRVSATFWQNPRNHFRCQVQFYGLSENDEWTQDRAKPVTQIVSAEAWGRADCGITSASYHQGVLSATILYEILLGKATLYAVLVSALVLMAMVKRKDSRGRAKRSGSGATNFSLLKQAGDVEENPGPSRGHMTEYKPTVRLATRDDVPRAVRTLAAAFADYPATRHTVDPDRHIERVTELQELFLTRVGLDIGKVWVADDGAAVAVWTTPESVEAGAVFAEIGPRMAELSGSRLAAQQQMEGLLAPHRPKEPAWFLATVGVSPDHQGKGLGSAVVLPGVEAAERAGVPAFLETSAPRNLPFYERLGFTVTADVEVPEGPRTWCMTRKPGA

SEQ ID NO: 14616 - protein, 989 aa, Artificial Sequence
  Synthetic Polypeptide
MTIRLLCYMGFYFLGAGLMACQVQLVESGGGLVQAGDSVTLSCTASGRTFSSYALAWFRQRPGKEREFVAGLRWGGPTNYADSVKDRFTISGDSAKHTMYLQMNSLKPEDTAVYYCGYNPGGWAVPSQYEYDSWGQGTQVTVSSGTGGGGSGGGGSGGGGSEFGVTQTPKFQVLKTGQSMTLQCAQDMNHEYMSWYRQDPGMGLRLIHYSVGAGITDQGEVPNGYNVSRSTTEDFPLRLLSAAPSQTSVYFCASSFQTGASYGYTFGSGTRLTVLEDLKNVFPPEVAVFEPSKAEIAHTQKATLVCLATGFYPDHVELSWWVNGKEVHSGVCTDPQPLKEQPALNDSRYCLSSRLRVSATFWQNPRNHFRCQVQFYGLSENDEWTQDRAKPVTQIVSAEAWGRADCGITSASYHQGVLSATILYEILLGKATLYAVLVSALVLMAMVKRKDSRGRAKRSGSGATNFSLLKQAGDVEENPGPTSMACPGFLWALVISTCLEFSMFEILNVEQSPQSLHVQEGDSTNFTCSFPSSNFYALHWYRWETAKSPEALFVMTLNGDEKKKGRISATLNTKEGYSYLYIKGSQPEDSATYLCARNTGNQFYFGTGTSLTVIPNIQNPDPAVYQLRDSKSSDKSVCLFTDFDSQTNVSQSKDSDVYITDKCVLDMRSMDFKSNSAVAWSNKSDFACANAFNNSIIPEDTFFPSSDVPCDVKLVEKSFETDTNLNFQNLSVIGFRILLLKVAGFNLLMTLRLWSSRAKRSGSGVKQTLNFDLLKLAGDVESNPGPSRGHMTEYKPTVRLATRDDVPRAVRTLAAAFADYPATRHTVDPDRHIERVTELQELFLTRVGLDIGKVWVADDGAAVAVWTTPESVEAGAVFAEIGPRMAELSGSRLAAQQQMEGLLAPHRPKEPAWFLATVGVSPDHQGKGLGSAVVLPGVEAAERAGVPAFLETSAPRNLPFYERLGFTVTADVEVPEGPRTWCMTRKPGA

SEQ ID NO: 14617 - protein, 756 aa, Artificial Sequence
  Synthetic Polypeptide
MTIRLLCYMGFYFLGAGLMACQVQLVESGGGLVQAGDSVTLSCTASGRTFSSYALAWFRQRPGKEREFVAGLRWGGPTNYADSVKDRFTISGDSAKHTMYLQMNSLKPEDTAVYYCGYNPGGWAVPSQYEYDSWGQGTQVTVSSGTGGGGSGGGGSGGGGSEFGVTQTPKFQVLKTGQSMTLQCAQDMNHEYMSWYRQDPGMGLRLIHYSVGAGITDQGEVPNGYNVSRSTTEDFPLRLLSAAPSQTSVYFCASSFQTGASYGYTFGSGTRLTVLEDLKNVFPPEVAVFEPSEAEISHTQKATLVCLATGFYPDHVELSWWVNGKEVHSGVCTDPQPLKEQPALNDSRYCLSSRLRVSATFWQNPRNHFRCQVQFYGLSENDEWTQDRAKPVTQIVSAEAWGRADCGFTSESYQQGVLSATILYEILLGKATLYAVLVSALVLMAMVKRKDSRGRAKRSGSGATNFSLLKQAGDVEENPGPTSMACPGFLWALVISTCLEFSMFEILNVEQSPQSLHVQEGDSTNFTCSFPSSNFYALHWYRWETAKSPEALFVMTLNGDEKKKGRISATLNTKEGYSYLYIKGSQPEDSATYLCARNTGNQFYFGTGTSLTVIPNIQNPDPAVYQLRDSKSSDKSVCLFTDFDSQTNVSQSKDSDVYITDKCVLDMRSMDFKSNSAVAWSNKSDFACANAFNNSIIPEDTFFPSPESSCDVKLVEKSFETDTNLNFQNLSVIGFRILLLKVAGFNLLMTLRLWSS

SEQ ID NO: 14618 - protein, 981 aa, Artificial Sequence
  Synthetic Polypeptide
MTIRLLCYMGFYFLGAGLMACQVQLVESGGGLVQAGDSVTLSCTASGRTFSSYALAWFRQRPGKEREFVAGLRWGGPTNYADSVKDRFTISGDSAKHTMYLQMNSLKPEDTAVYYCGYNPGGWAVPSQYEYDSWGQGTQVTVSSGTGGGGSGGGGSGGGGSEFGVTQTPKFQVLKTGQSMTLQCAQDMNHEYMSWYRQDPGMGLRLIHYSVGAGITDQGEVPNGYNVSRSTTEDFPLRLLSAAPSQTSVYFCASSFQTGASYGYTFGSGTRLTVLEDLKNVFPPEVAVFEPSEAEISHTQKATLVCLATGFYPDHVELSWWVNGKEVHSGVCTDPQPLKEQPALNDSRYCLSSRLRVSATFWQNPRNHFRCQVQFYGLSENDEWTQDRAKPVTQIVSAEAWGRADCGFTSESYQQGVLSATILYEILLGKATLYAVLVSALVLMAMVKRKDSRGRAKRSGSGATNFSLLKQAGDVEENPGPTSMACPGFLWALVISTCLEFSMFEILNVEQSPQSLHVQEGDSTNFTCSFPSSNFYALHWYRWETAKSPEALFVMTLNGDEKKKGRISATLNTKEGYSYLYIKGSQPEDSATYLCARNTGNQFYFGTGTSLTVIPNIQNPDPAVYQLRDSKSSDKSVCLFTDFDSQTNVSQSKDSDVYITDKCVLDMRSMDFKSNSAVAWSNKSDFACANAFNNSIIPEDTFFPSPESSCDVKLVEKSFETDTNLNFQNLSVIGFRILLLKVAGFNLLMTLRLWSSRAKRSGSGVKQTLNFDLLKLAGDVESNPGPSRGGIHTMATYEVLCEVARKLGTDDREVVLFLLNVFIPQPTLAQLIGALRALKEEGRLTFPLLAECLFRAGRRDLLRDLLHLDPRFLERHLAGTMSYFSPYQLTVLHVDGELCARDIRSLIFLSKDTIGSRSTPQTFLHWVYCMENLDLLGPTDVDALMSMLRSLSRVDLQRQVQTLMGLHLSGPSHSQHYRHTP

SEQ ID NO: 14619 - protein, 760 aa, Artificial Sequence
  Synthetic Polypeptide
MTIRLLCYMGFYFLGAGLMACQVQLVESGGGLVQAGDSVTLSCTASGRTFSSYALAWFRQRPGKEREFVAGLRWGGPTNYADSVKDRFTISGDSAKHTMYLQMNSLKPEDTAVYYCGYNPGGWAVPSQYEYDSWGQGTQVTVSSGTGGGGSGGGGSGGGGSEFGVTQTPKFQVLKTGQSMTLQCAQDMNHEYMSWYRQDPGMGLRLIHYSVGAGITDQGEVPNGYNVSRSTTEDFPLRLLSAAPSQTSVYFCASSFQTGASYGYTFGSGTRLTVLEIQNPDPAVYQLRDSKSSDKSVCLFTDFDSQTNVSQSKDSDVYITDKCVLDMRSMDFKSNSAVAWSNKSDFACANAFNNSIIPEDTFFPSPESSCDVKLVEKSFETDTNLNFQNLSVIGFRILLLKVAGFNLLMTLRLWSSRAKRSGSGVKQTLNFDLLKLAGDVESNPGPTSMACPGFLWALVISTCLEFSMFEILNVEQSPQSLHVQEGDSTNFTCSFPSSNFYALHWYRWETAKSPEALFVMTLNGDEKKKGRISATLNTKEGYSYLYIKGSQPEDSATYLCARNTGNQFYFGTGTSLTVIPNEDLKNVFPPEVAVFEPSEAEISHTQKATLVCLATGFYPDHVELSWWVNGKEVHSGVCTDPQPLKEQPALNDSRYCLSSRLRVSATFWQNPRNHFRCQVQFYGLSENDEWTQDRAKPVTQIVSAEAWGRADCGFTSESYQQGVLSATILYEILLGKATLYAVLVSALVLMAMVKRKDSRG

SEQ ID NO: 14620 - protein, 982 aa, Artificial Sequence
  Synthetic Polypeptide
MTIRLLCYMGFYFLGAGLMACQVQLVESGGGLVQAGDSVTLSCTASGRTFSSYALAWFRQRPGKEREFVAGLRWGGPTNYADSVKDRFTISGDSAKHTMYLQMNSLKPEDTAVYYCGYNPGGWAVPSQYEYDSWGQGTQVTVSSGTGGGGSGGGGSGGGGSEFGVTQTPKFQVLKTGQSMTLQCAQDMNHEYMSWYRQDPGMGLRLIHYSVGAGITDQGEVPNGYNVSRSTTEDFPLRLLSAAPSQTSVYFCASSFQTGASYGYTFGSGTRLTVLEIQNPDPAVYQLRDSKSSDKSVCLFTDFDSQTNVSQSKDSDVYITDKCVLDMRSMDFKSNSAVAWSNKSDFACANAFNNSIIPEDTFFPSPESSCDVKLVEKSFETDTNLNFQNLSVIGFRILLLKVAGFNLLMTLRLWSSRAKRSGSGVKQTLNFDLLKLAGDVESNPGPTSMACPGFLWALVISTCLEFSMFEILNVEQSPQSLHVQEGDSTNFTCSFPSSNFYALHWYRWETAKSPEALFVMTLNGDEKKKGRISATLNTKEGYSYLYIKGSQPEDSATYLCARNTGNQFYFGTGTSLTVIPNEDLKNVFPPEVAVFEPSEAEISHTQKATLVCLATGFYPDHVELSWWVNGKEVHSGVCTDPQPLKEQPALNDSRYCLSSRLRVSATFWQNPRNHFRCQVQFYGLSENDEWTQDRAKPVTQIVSAEAWGRADCGFTSESYQQGVLSATILYEILLGKATLYAVLVSALVLMAMVKRKDSRGRAKRSGSGATNFSLLKQAGDVEENPGPSRGGIHTMATYEVLCEVARKLGTDDREVVLFLLNVFIPQPTLAQLIGALRALKEEGRLTFPLLAECLFRAGRRDLLRDLLHLDPRFLERHLAGTMSYFSPYQLTVLHVDGELCARDIRSLIFLSKDTIGSRSTPQTFLHWVYCMENLDLLGPTDVDALMSMLRSLSRVDLQRQVQTLMGLHLSGPSHSQHYRHTP

SEQ ID NO: 14621 - protein, 1031 aa, Artificial Sequence
  Synthetic Polypeptide
MTIRLLCYMGFYFLGAGLMLEGKPIPNPLLGLDSTGSGEDLKNVFPPEVAVFEPSKAEIAHTQKATLVCLATGFYPDHVELSWWVNGKEVHSGVCTDPQPLKEQPALNDSRYCLSSRLRVSATFWQNPRNHFRCQVQFYGLSENDEWTQDRAKPVTQIVSAEAWGRADCGITSASYHQGVLSATILYEILLGKATLYAVLVSALVLMAMVKRKDSRGRAKRSGSGATNFSLLKQAGDVEENPGPTSMTIRLLCYMGFYFLGAGLMACQVQLVESGGGLVQAGDSVTLSCTASGRTFSSYALAWFRQRPGKEREFVAGLRWGGPTNYADSVKDRFTISGDSAKHTMYLQMNSLKPEDTAVYYCGYNPGGWAVPSQYEYDSWGQGTQVTVSSGTGGGGSGGGGSGGGGSEFGVTQTPKFQVLKTGQSMTLQCAQDMNHEYMSWYRQDPGMGLRLIHYSVGAGITDQGEVPNGYNVSRSTTEDFPLRLLSAAPSQTSVYFCASSFQTGASYGYTFGSGTRLTVGGGGSGGGGSGGGGSILNVEQSPQSLHVQEGDSTNFTCSFPSSNFYALHWYRWETAKSPEALFVMTLNGDEKKKGRISATLNTKEGYSYLYIKGSQPEDSATYLCARNTGNQFYFGTGTSLTVIPNEQKLISEEDGSGIQNPDPAVYQLRDSKSSDKSVCLFTDFDSQTNVSQSKDSDVYITDKCVLDMRSMDFKSNSAVAWSNKSDFACANAFNNSIIPEDTFFPSSDVPCDVKLVEKSFETDTNLNFQNLSVIGFRILLLKVAGFNLLMTLRLWSSRAKRSGSGVKQTLNFDLLKLAGDVESNPGPSRGHMTEYKPTVRLATRDDVPRAVRTLAAAFADYPATRHTVDPDRHIERVTELQELFLTRVGLDIGKVWVADDGAAVAVWTTPESVEAGAVFAEIGPRMAELSGSRLAAQQQMEGLLAPHRPKEPAWFLATVGVSPDHQGKGLGSAVVLPGVEAAERAGVPAFLETSAPRNLPFYERLGFTVTADVEVPEGPRTWCMTRKPGA

SEQ ID NO: 14622 - protein, 1032 aa, Artificial Sequence
  Synthetic Polypeptide
MTIRLLCYMGFYFLGAGLMLEQKLISEEDLGSGDRPDPAVYQLRDSKSSDKSVCLFTDFDSQTNVSQSKDSDVYITDKCVLDMRSMDFKSNSAVAWSNKSDFACANAFNNSIIPEDTFFPSPESSCDVKLVEKSFETDTNLNFQNLSVIGFRILLLKVAGFNLLMTLRLWSSSSRAKRSGSGVKQTLNFDLLKLAGDVESNPGPTSMTIRLLCYMGFYFLGAGLMACQVQLVESGGGLVQAGDSVTLSCTASGRTFSSYALAWFRQRPGKEREFVAGLRWGGPTNYADSVKDRFTISGDSAKHTMYLQMNSLKPEDTAVYYCGYNPGGWAVPSQYEYDSWGQGTQVTVSSGTGGGGSGGGGSGGGGSEFGVTQTPKFQVLKTGQSMTLQCAQDMNHEYMSWYRQDPGMGLRLIHYSVGAGITDQGEVPNGYNVSRSTTEDFPLRLLSAAPSQTSVYFCASSFQTGASYGYTFGSGTRLTVGGGGSGGGGSGGGGSILNVEQSPQSLHVQEGDSTNFTCSFPSSNFYALHWYRWETAKSPEALFVMTLNGDEKKKGRISATLNTKEGYSYLYIKGSQPEDSATYLCARNTGNQFYFGTGTSLTVIPNGKPIPNPLLGLDSTGSGEDLKNVFPPEVAVFEPSEAEISHTQKATLVCLATGFYPDHVELSWWVNGKEVHSGVCTDPQPLKEQPALNDSRYCLSSRLRVSATFWQNPRNHFRCQVQFYGLSENDEWTQDRAKPVTQIVSAEAWGRADCGFTSESYQQGVLSATILYEILLGKATLYAVLVSALVLMAMVKRKDSRGRAKRSGSGATNFSLLKQAGDVEENPGPSRGHMTEYKPTVRLATRDDVPRAVRTLAAAFADYPATRHTVDPDRHIERVTELQELFLTRVGLDIGKVWVADDGAAVAVWTTPESVEAGAVFAEIGPRMAELSGSRLAAQQQMEGLLAPHRPKEPAWFLATVGVSPDHQGKGLGSAVVLPGVEAAERAGVPAFLETSAPRNLPFYERLGFTVTADVEVPEGPRTWCMTRKPGA

SEQ ID NO: 14623 - protein, 989 aa, Artificial Sequence
  Synthetic Polypeptide
MTIRLLCYMGFYFLGAGLMACQVQLVESGGGLVQAGDSVTLSCTASGRTFSSYALAWFRQRPGKEREFVAGLRWGGPTNYADSVKDRFTISGDSAKHTMYLQMNSLKPEDTAVYYCGYNPGGWAVPSQYEYDSWGQGTQVTVSSGTGGGGSGGGGSGGGGSEFGVTQTPKFQVLKTGQSMTLQCAQDMNHEYMSWYRQDPGMGLRLIHYSVGAGITDQGEVPNGYNVSRSTTEDFPLRLLSAAPSQTSVYFCASSFQTGASYGYTFGSGTRLTVLEDLKNVFPPEVAVFEPSEAEISHTQKATLVCLATGFYPDHVELSWWVNGKEVHSGVSTDPQPLKEQPALNDSRYCLSSRLRVSATFWQNPRNHFRCQVQFYGLSENDEWTQDRAKPVTQIVSAEAWGRADCGFTSESYQQGVLSATILYEILLGKATLYAVLVSALVLMAMVKRKDSRGRAKRSGSGATNFSLLKQAGDVEENPGPTSMACPGFLWALVISTCLEFSMFEILNVEQSPQSLHVQEGDSTNFTCSFPSSNFYALHWYRWETAKSPEALFVMTLNGDEKKKGRISATLNTKEGYSYLYIKGSQPEDSATYLCARNTGNQFYFGTGTSLTVIPNIQNPDPAVYQLRDSKSSDKSVCLFTDFDSQTNVSQSKDSDVYITDKTVLDMRSMDFKSNSAVAWSNKSDFACANAFNNSIIPEDTFFPSPESSCDVKLVEKSFETDTNLNFQNLSVIGFRILLLKVAGFNLLMTLRLWSSRAKRSGSGVKQTLNFDLLKLAGDVESNPGPSRGHMTEYKPTVRLATRDDVPRAVRTLAAAFADYPATRHTVDPDRHIERVTELQELFLTRVGLDIGKVWVADDGAAVAVWTTPESVEAGAVFAEIGPRMAELSGSRLAAQQQMEGLLAPHRPKEPAWFLATVGVSPDHQGKGLGSAVVLPGVEAAERAGVPAFLETSAPRNLPFYERLGFTVTADVEVPEGPRTWCMTRKPGA

SEQ ID NO: 14624 - protein, 1071 aa, Artificial Sequence
  Synthetic Polypeptide
MTIRLLCYMGFYFLGAGLMACQVQLVESGGGLVQAGDSVTLSCTASGRTFSSYALAWFRQRPGKEREFVAGLRWGGPTNYADSVKDRFTISGDSAKHTMYLQMNSLKPEDTAVYYCGYNPGGWAVPSQYEYDSWGQGTQVTVSSGTGGGGSGGGGSGGGGSEFGVTQTPKFQVLKTGQSMTLQCAQDMNHEYMSWYRQDPGMGLRLIHYSVGAGITDQGEVPNGYNVSRSTTEDFPLRLLSAAPSQTSVYFCASSFQTGASYGYTFGSGTRLTVLEDLKNVFPPEVAVFEPSEAEISHTQKATLVCLATGFYPDHVELSWWVNGKEVHSGVSTDPQPLKEQPALNDSRYCLSSRLRVSATFWQNPRNHFRCQVQFYGLSENDEWTQDRAKPVTQIVSAEAWGRADCGFTSESYQQGVLSATILYEILLGKATLYAVLVSALVLMAMVKRKDSRGRAKRSGSGATNFSLLKQAGDVEENPGPTSMACPGFLWALVISTCLEFSMFEILNVEQSPQSLHVQEGDSTNFTCSFPSSNFYALHWYRWETAKSPEALFVMTLNGDEKKKGRISATLNTKEGYSYLYIKGSQPEDSATYLCARNTGNQFYFGTGTSLTVIPNEQKLISEEDGSGTPFPSLAPPIMLLVDGKQQMVVVCLVLDVAPPGLDSPIWFSAGNGSALDAFTYGPSPATDGTWTNLAHLSLPSEELASWEPLVCHTGPGAEGHSRSTQPMHLSGEASTARTCPQEPLRGTPGGALWLGVLRLLLFKLLLFDLLLTCSCLCDPAGPLPSPATTTRLRALGSHRLHPATETGGREATSSPRPQPRDRRWGDTPPGRKPGSPVRAKRSGSGVKQTLNFDLLKLAGDVESNPGPSRGHMTEYKPTVRLATRDDVPRAVRTLAAAFADYPATRHTVDPDRHIERVTELQELFLTRVGLDIGKVWVADDGAAVAVWTTPESVEAGAVFAEIGPRMAELSGSRLAAQQQMEGLLAPHRPKEPAWFLATVGVSPDHQGKGLGSAVVLPGVEAAERAGVPAFLETSAPRNLPFYERLGFTVTADVEVPEGPRTWCMTRKPGA

SEQ ID NO: 14625 - protein, 1086 aa, Artificial Sequence
  Synthetic Polypeptide
MTIRLLCYMGFYFLGAGLMLEDLKNVFPPEVAVFEPSEAEISHTQKATLVCLATGFYPDHVELSWWVNGKEVHSGVSTDPQPLKEQPALNDSRYCLSSRLRVSATFWQNPRNHFRCQVQFYGLSENDEWTQDRAKPVTQIVSAEAWGRADCGFTSESYQQGVLSATILYEILLGKATLYAVLVSALVLMAMVKRKDSRGRAKRSGSGATNFSLLKQAGDVEENPGPTSMTIRLLCYMGFYFLGAGLMACQVQLVESGGGLVQAGDSVTLSCTASGRTFSSYALAWFRQRPGKEREFVAGLRWGGPTNYADSVKDRFTISGDSAKHTMYLQMNSLKPEDTAVYYCGYNPGGWAVPSQYEYDSWGQGTQVTVSSGTGGGGSGGGGSGGGGSEFGVTQTPKFQVLKTGQSMTLQCAQDMNHEYMSWYRQDPGMGLRLIHYSVGAGITDQGEVPNGYNVSRSTTEDFPLRLLSAAPSQTSVYFCASSFQTGASYGYTFGSGTRLTVGGGGSGGGGSGGGGSILNVEQSPQSLHVQEGDSTNFTCSFPSSNFYALHWYRWETAKSPEALFVMTLNGDEKKKGRISATLNTKEGYSYLYIKGSQPEDSATYLCARNTGNQFYFGTGTSLTVIPNEQKLISEEDLGSGTPFPSLAPPIMLLVDGKQQMVVVCLVLDVAPPGLDSPIWFSAGNGSALDAFTYGPSPATDGTWTNLAHLSLPSEELASWEPLVCHTGPGAEGHSRSTQPMHLSGEASTARTCPQEPLRGTPGGALWLGVLRLLLFKLLLFDLLLTCSCLCDPAGPLPSPATTTRLRALGSHRLHPATETGGREATSSPRPQPRDRRWGDTPPGRKPGSPVRAKRSGSGVKQTLNFDLLKLAGDVESNPGPSRSRGHMTEYKPTVRLATRDDVPRAVRTLAAAFADYPATRHTVDPDRHIERVTELQELFLTRVGLDIGKVWVADDGAAVAVWTTPESVEAGAVFAEIGPRMAELSGSRLAAQQQMEGLLAPHRPKEPAWFLATVGVSPDHQGKGLGSAVVLPGVEAAERAGVPAFLETSAPRNLPFYERLGFTVTADVEVPEGPRTWCMTRKPGA

SEQ ID NO: 14626 - protein, 1026 aa, Artificial Sequence
  Synthetic Polypeptide
MTIRLLCYMGFYFLGAGLMACQVQLVESGGGLVQAGDSVTLSCTASGRTFSSYALAWFRQRPGKEREFVAGLRWGGPTNYADSVKDRFTISGDSAKHTMYLQMNSLKPEDTAVYYCGYNPGGWAVPSQYEYDSWGQGTQVTVSSGTGGGGSGGGGSGGGGSEFGVTQTPKFQVLKTGQSMTLQCAQDMNHEYMSWYRQDPGMGLRLIHYSVGAGITDQGEVPNGYNVSRSTTEDFPLRLLSAAPSQTSVYFCASSFQTGASYGYTFGSGTRLTVLEGKPIPNPLLGLDSTGSGDKQLDADVSPKPTIFLPSIAETKLQKAGTYLCLLEKFFPDVIKIHWQEKKSNTILGSQEGNTMKTNDTYMKFSWLTVPEKSLDKEHRCIVRHENNKNGVDQEIIFPPIKTDVITMDPKDNCSKDANDTLLLQLTNTSAYYMYLLLLLKSVVYFAIITCCLLRRTAFCCNGEKSRAKRSGSGATNFSLLKQAGDVEENPGPTSMACPGFLWALVISTCLEFSMFEILNVEQSPQSLHVQEGDSTNFTCSFPSSNFYALHWYRWETAKSPEALFVMTLNGDEKKKGRISATLNTKEGYSYLYIKGSQPEDSATYLCARNTGNQFYFGTGTSLTVIPNEQKLISEEDGSGSQPHTKPSVFVMKNGTNVACLVKEFYPKDIRINLVSSKKITEFDPAIVISPSGKYNAVKLGKYEDSNSVTCSVQHDNKTVHSTDFEVKTDSTDHVKPKETENTKQPSKSCHKPKAIVHTEKVNMMSLTVLGLRMLFAKTVAVNFLLTAKLFFLRAKRSGSGVKQTLNFDLLKLAGDVESNPGPSRGHMTEYKPTVRLATRDDVPRAVRTLAAAFADYPATRHTVDPDRHIERVTELQELFLTRVGLDIGKVWVADDGAAVAVWTTPESVEAGAVFAEIGPRMAELSGSRLAAQQQMEGLLAPHRPKEPAWFLATVGVSPDHQGKGLGSAVVLPGVEAAERAGVPAFLETSAPRNLPFYERLGFTVTADVEVPEGPRTWCMTRKPGA

SEQ ID NO: 14627 - protein, 764 aa, Artificial Sequence
  Synthetic Polypeptide
MTIRLLCYMGFYFLGAGLMACQVQLVESGGGLVQAGDSVTLSCTASGRTFSSYALAWFRQRPGKEREFVAGLRWGGPTNYADSVKDRFTISGDSAKHTMYLQMNSLKPEDTAVYYCGYNPGGWAVPSQYEYDSWGQGTQVTVSSGTGGGGSGGGGSGGGGSEFGVTQTPKFQVLKTGQSMTLQCAQDMNHEYMSWYRQDPGMGLRLIHYSVGAGITDQGEVPNGYNVSRSTTEDFPLRLLSAAPSQTSVYFCASSFQTGASYGYTFGSGTRLTVLESQPHTKPSVFVMKNGTNVACLVKEFYPKDIRINLVSSKKITEFDPAIVISPSGKYNAVKLGKYEDSNSVTCSVQHDNKTVHSTDFEVKTDSTDHVKPKETENTKQPSKSCHKPKAIVHTEKVNMMSLTVLGLRMLFAKTVAVNFLLTAKLFFLRAKRSGSGATNFSLLKQAGDVEENPGPTSMACPGFLWALVISTCLEFSMFEILNVEQSPQSLHVQEGDSTNFTCSFPSSNFYALHWYRWETAKSPEALFVMTLNGDEKKKGRISATLNTKEGYSYLYIKGSQPEDSATYLCARNTGNQFYFGTGTSLTVIPNDKQLDADVSPKPTIFLPSIAETKLQKAGTYLCLLEKFFPDVIKIHWQEKKSNTILGSQEGNTMKTNDTYMKFSWLTVPEKSLDKEHRCIVRHENNKNGVDQEIIFPPIKTDVITMDPKDNCSKDANDTLLLQLTNTSAYYMYLLLLLKSVVYFAIITCCLLRRTAFCCNGEKS

SEQ ID NO: 14628 - protein, 1038 aa, Artificial Sequence
  Synthetic Polypeptide
MTIRLLCYMGFYFLGAGLMLEGKPIPNPLLGLDSTGSGDKQLDADVSPKPTIFLPSIAETKLQKAGTYLCLLEKFFPDVIKIHWQEKKSNTILGSQEGNTMKTNDTYMKFSWLTVPEKSLDKEHRCIVRHENNKNGVDQEIIFPPIKTDVITMDPKDNCSKDANDTLLLQLTNTSAYYMYLLLLLKSVVYFAIITCCLLRRTAFCCNGEKSRAKRSGSGATNFSLLKQAGDVEENPGPTSMTIRLLCYMGFYFLGAGLMACQVQLVESGGGLVQAGDSVTLSCTASGRTFSSYALAWFRQRPGKEREFVAGLRWGGPTNYADSVKDRFTISGDSAKHTMYLQMNSLKPEDTAVYYCGYNPGGWAVPSQYEYDSWGQGTQVTVSSGTGGGGSGGGGSGGGGSEFGVTQTPKFQVLKTGQSMTLQCAQDMNHEYMSWYRQDPGMGLRLIHYSVGAGITDQGEVPNGYNVSRSTTEDFPLRLLSAAPSQTSVYFCASSFQTGASYGYTFGSGTRLTVGGGGSGGGGSGGGGSILNVEQSPQSLHVQEGDSTNFTCSFPSSNFYALHWYRWETAKSPEALFVMTLNGDEKKKGRISATLNTKEGYSYLYIKGSQPEDSATYLCARNTGNQFYFGTGTSLTVIPNEQKLISEEDGSGSQPHTKPSVFVMKNGTNVACLVKEFYPKDIRINLVSSKKITEFDPAIVISPSGKYNAVKLGKYEDSNSVTCSVQHDNKTVHSTDFEVKTDSTDHVKPKETENTKQPSKSCHKPKAIVHTEKVNMMSLTVLGLRMLFAKTVAVNFLLTAKLFFLRAKRSGSGVKQTLNFDLLKLAGDVESNPGPSRGHMTEYKPTVRLATRDDVPRAVRTLAAAFADYPATRHTVDPDRHIERVTELQELFLTRVGLDIGKVWVADDGAAVAVWTTPESVEAGAVFAEIGPRMAELSGSRLAAQQQMEGLLAPHRPKEPAWFLATVGVSPDHQGKGLGSAVVLPGVEAAERAGVPAFLETSAPRNLPFYERLGFTVTADVEVPEGPRTWCMTRKPGA

SEQ ID NO: 14629 - protein, 1168 aa, Artificial Sequence
  Synthetic Polypeptide
MTIRLLCYMGFYFLGAGLMACQVQLVESGGGLVQAGDSVTLSCTASGRTFSSYALAWFRQRPGKEREFVAGLRWGGPTNYADSVKDRFTISGDSAKHTMYLQMNSLKPEDTAVYYCGYNPGGWAVPSQYEYDSWGQGTQVTVSSGTGGGGSGGGGSGGGGSEFGVTQTPKFQVLKTGQSMTLQCAQDMNHEYMSWYRQDPGMGLRLIHYSVGAGITDQGEVPNGYNVSRSTTEDFPLRLLSAAPSQTSVYFCASSFQTGASYGYTFGSGTRLTVGQPKANPTVTLFPPSSEELQANKATLVCLISDFYPGAVTVAWKADGSPVKAGVETTKPSKQSNNKYAASSYLSLTPEQWKSHRSYSCQVTHEGSTVEKTVAPTECSGSQSFGLLDPKLCYLLDGILFIYGVILTALFLRVKFSRSADAPAYQQGQNQLYNELNLGRREEYDVLDKRRGRDPEMGGKPQRRKNPQEGLYNELQKDKMAEAYSEIGMKGERRRGKGHDGLYQGLSTATKDTYDALHMQALPPRRAKRSGSGATNFSLLKQAGDVEENPGPTSMACPGFLWALVISTCLEFSMFEILNVEQSPQSLHVQEGDSTNFTCSFPSSNFYALHWYRWETAKSPEALFVMTLNGDEKKKGRISATLNTKEGYSYLYIKGSQPEDSATYLCARNTGNQFYFGTGTSLTVIPNASTKGPSVFPLAPSSKSTSGGTAALGCLVKDYFPEPVTVSWNSGALTSGVHTFPAVLQSSGLYSLSSVVTVPSSSLGTQTYICNVNHKPSNTKVDKRVEPKSCGTQSFGLLDPKLCYLLDGILFIYGVILTALFLRVKFSRSADAPAYQQGQNQLYNELNLGRREEYDVLDKRRGRDPEMGGKPQRRKNPQEGLYNELQKDKMAEAYSEIGMKGERRRGKGHDGLYQGLSTATKDTYDALHMQALPPRRAKRSGSGVKQTLNFDLLKLAGDVESNPGPSRGHMTEYKPTVRLATRDDVPRAVRTLAAAFADYPATRHTVDPDRHIERVTELQELFLTRVGLDIGKVWVADDGAAVAVWTTPESVEAGAVFAEIGPRMAELSGSRLAAQQQMEGLLAPHRPKEPAWFLATVGVSPDHQGKGLGSAVVLPGVEAAERAGVPAFLETSAPRNLPFYERLGFTVTADVEVPEGPRTWCMTRKPGA

SEQ ID NO: 14630 - protein, 952 aa, Artificial Sequence
  Synthetic Polypeptide
MTIRLLCYMGFYFLGAGLMACQVQLVESGGGLVQAGDSVTLSCTASGRTFSSYALAWFRQRPGKEREFVAGLRWGGPTNYADSVKDRFTISGDSAKHTMYLQMNSLKPEDTAVYYCGYNPGGWAVPSQYEYDSWGQGTQVTVSSGTGGGGSGGGGSGGGGSEFGVTQTPKFQVLKTGQSMTLQCAQDMNHEYMSWYRQDPGMGLRLIHYSVGAGITDQGEVPNGYNVSRSTTEDFPLRLLSAAPSQTSVYFCASSFQTGASYGYTFGSGTRLTVLEDLKNVFPPEVAVFEPSEAEISHTQKATLVCLATGFYPDHVELSWWVNGKEVHSGVSTDPQPLKEQPALNDSRYCLSSRLRVSATFWQNPRNHFRCQVQFYGLSENDEWTQDRAKPVTQIVSAEAWGRADCGSQSFGLLDPKLCYLLDGILFIYGVILTALFLRVKFSRSADAPAYQQGQNQLYNELNLGRREEYDVLDKRRGRDPEMGGKPQRRKNPQEGLYNELQKDKMAEAYSEIGMKGERRRGKGHDGLYQGLSTATKDTYDALHMQALPPRRAKRSGSGATNFSLLKQAGDVEENPGPTSMACPGFLWALVISTCLEFSMFEILNVEQSPQSLHVQEGDSTNFTCSFPSSNFYALHWYRWETAKSPEALFVMTLNGDEKKKGRISATLNTKEGYSYLYIKGSQPEDSATYLCARNTGNQFYFGTGTSLTVIPNIQNPDPAVYQLRDSKSSDKSVCLFTDFDSQTNVSQSKDSDVYITDKTVLDMRSMDFKSNSAVAWSNKSDFACANAFNNSIIPEDTFFPSPESSCGTQSFGLLDPKLCYLLDGILFIYGVILTALFLRVKFSRSADAPAYQQGQNQLYNELNLGRREEYDVLDKRRGRDPEMGGKPQRRKNPQEGLYNELQKDKMAEAYSEIGMKGERRRGKGHDGLYQGLSTATKDTYDALHMQALPPR

SEQ ID NO: 14631 - protein, 952 aa, Artificial Sequence
  Synthetic Polypeptide
MTIRLLCYMGFYFLGAGLMACQVQLVESGGGLVQAGDSVTLSCTASGRTFSSYALAWFRQRPGKEREFVAGLRWGGPTNYADSVKDRFTISGDSAKHTMYLQMNSLKPEDTAVYYCGYNPGGWAVPSQYEYDSWGQGTQVTVSSGTGGGGSGGGGSGGGGSEFGVTQTPKFQVLKTGQSMTLQCAQDMNHEYMSWYRQDPGMGLRLIHYSVGAGITDQGEVPNGYNVSRSTTEDFPLRLLSAAPSQTSVYFCASSFQTGASYGYTFGSGTRLTVLEDLKNVFPPEVAVFEPSKAEIAHTQKATLVCLATGFYPDHVELSWWVNGKEVHSGVCTDPQPLKEQPALNDSRYCLSSRLRVSATFWQNPRNHFRCQVQFYGLSENDEWTQDRAKPVTQIVSAEAWGRADCGSQSFGLLDPKLCYLLDGILFIYGVILTALFLRVKFSRSADAPAYQQGQNQLYNELNLGRREEYDVLDKRRGRDPEMGGKPQRRKNPQEGLYNELQKDKMAEAYSEIGMKGERRRGKGHDGLYQGLSTATKDTYDALHMQALPPRRAKRSGSGATNFSLLKQAGDVEENPGPTSMACPGFLWALVISTCLEFSMFEILNVEQSPQSLHVQEGDSTNFTCSFPSSNFYALHWYRWETAKSPEALFVMTLNGDEKKKGRISATLNTKEGYSYLYIKGSQPEDSATYLCARNTGNQFYFGTGTSLTVIPNIQNPDPAVYQLRDSKSSDKSVCLFTDFDSQTNVSQSKDSDVYITDKCVLDMRSMDFKSNSAVAWSNKSDFACANAFNNSIIPEDTFFPSSDVPCGTQSFGLLDPKLCYLLDGILFIYGVILTALFLRVKFSRSADAPAYQQGQNQLYNELNLGRREEYDVLDKRRGRDPEMGGKPQRRKNPQEGLYNELQKDKMAEAYSEIGMKGERRRGKGHDGLYQGLSTATKDTYDALHMQALPPR

SEQ ID NO: 14632 - protein, 1023 aa, Artificial Sequence
  Synthetic Polypeptide
MTIRLLCYMGFYFLGAGLMACQVQLVESGGGLVQAGDSVTLSCTASGRTFSSYALAWFRQRPGKEREFVAGLRWGGPTNYADSVKDRFTISGDSAKHTMYLQMNSLKPEDTAVYYCGYNPGGWAVPSQYEYDSWGQGTQVTVSSGTGGGGSGGGGSGGGGSEFGVTQTPKFQVLKTGQSMTLQCAQDMNHEYMSWYRQDPGMGLRLIHYSVGAGITDQGEVPNGYNVSRSTTEDFPLRLLSAAPSQTSVYFCASSFQTGASYGYTFGSGTRLTVLEGKPIPNPLLGLDSTGSGEDLKNVFPPEVAVFEPSEAEISHTQKATLVCLATGFYPDHVELSWWVNGKEVHSGVSTDPQPLKEQPALNDSRYCLSSRLRVSATFWQNPRNHFRCQVQFYGLSENDEWTQDRAKPVTQIVSAEAWGRADCGSQSFGLLDPKLCYLLDGILFIYGVILTALFLRVKFSRSADAPAYQQGQNQLYNELNLGRREEYDVLDKRRGRDPEMGGKPQRRKNPQEGLYNELQKDKMAEAYSEIGMKGERRRGKGHDGLYQGLSTATKDTYDALHMQALPPRRAKRSGSGATNFSLLKQAGDVEENPGPTSMACPGFLWALVISTCLEFSMFEILNVEQSPQSLHVQEGDSTNFTCSFPSSNFYALHWYRWETAKSPEALFVMTLNGDEKKKGRISATLNTKEGYSYLYIKGSQPEDSATYLCARNTGNQFYFGTGTSLTVIPNEQKLISEEDGSGIQNPDPAVYQLRDSKSSDKSVCLFTDFDSQTNVSQSKDSDVYITDKTVLDMRSMDFKSNSAVAWSNKSDFACANAFNNSIIPEDTFFPSPESSCGTQSFGLLDPKLCYLLDGILFIYGVILTALFLRSKRSRLLHSDYMNMTPRRPGPTRKHYQPYAPPRDFAAYRSRVKFSRSADAPAYQQGQNQLYNELNLGRREEYDVLDKRRGRDPEMGGKPQRRKNPQEGLYNELQKDKMAEAYSEIGMKGERRRGKGHDGLYQGLSTATKDTYDALHMQALPPR

SEQ ID NO: 14633 - protein, 1064 aa, Artificial Sequence
  Synthetic Polypeptide
MTIRLLCYMGFYFLGAGLMACQVQLVESGGGLVQAGDSVTLSCTASGRTFSSYALAWFRQRPGKEREFVAGLRWGGPTNYADSVKDRFTISGDSAKHTMYLQMNSLKPEDTAVYYCGYNPGGWAVPSQYEYDSWGQGTQVTVSSGTGGGGSGGGGSGGGGSEFGVTQTPKFQVLKTGQSMTLQCAQDMNHEYMSWYRQDPGMGLRLIHYSVGAGITDQGEVPNGYNVSRSTTEDFPLRLLSAAPSQTSVYFCASSFQTGASYGYTFGSGTRLTVLEGKPIPNPLLGLDSTGSGEDLKNVFPPEVAVFEPSEAEISHTQKATLVCLATGFYPDHVELSWWVNGKEVHSGVSTDPQPLKEQPALNDSRYCLSSRLRVSATFWQNPRNHFRCQVQFYGLSENDEWTQDRAKPVTQIVSAEAWGRADCGSQSFGLLDPKLCYLLDGILFIYGVILTALFLRSKRSRLLHSDYMNMTPRRPGPTRKHYQPYAPPRDFAAYRSRVKFSRSADAPAYQQGQNQLYNELNLGRREEYDVLDKRRGRDPEMGGKPQRRKNPQEGLYNELQKDKMAEAYSEIGMKGERRRGKGHDGLYQGLSTATKDTYDALHMQALPPRRAKRSGSGATNFSLLKQAGDVEENPGPTSMACPGFLWALVISTCLEFSMFEILNVEQSPQSLHVQEGDSTNFTCSFPSSNFYALHWYRWETAKSPEALFVMTLNGDEKKKGRISATLNTKEGYSYLYIKGSQPEDSATYLCARNTGNQFYFGTGTSLTVIPNEQKLISEEDGSGIQNPDPAVYQLRDSKSSDKSVCLFTDFDSQTNVSQSKDSDVYITDKTVLDMRSMDFKSNSAVAWSNKSDFACANAFNNSIIPEDTFFPSPESSCGTQSFGLLDPKLCYLLDGILFIYGVILTALFLRSKRSRLLHSDYMNMTPRRPGPTRKHYQPYAPPRDFAAYRSRVKFSRSADAPAYQQGQNQLYNELNLGRREEYDVLDKRRGRDPEMGGKPQRRKNPQEGLYNELQKDKMAEAYSEIGMKGERRRGKGHDGLYQGLSTATKDTYDALHMQALPPR

SEQ ID NO: 14634 - protein, 1025 aa, Artificial Sequence
  Synthetic Polypeptide
MTIRLLCYMGFYFLGAGLMACQVQLVESGGGLVQAGDSVTLSCTASGRTFSSYALAWFRQRPGKEREFVAGLRWGGPTNYADSVKDRFTISGDSAKHTMYLQMNSLKPEDTAVYYCGYNPGGWAVPSQYEYDSWGQGTQVTVSSGTGGGGSGGGGSGGGGSEFGVTQTPKFQVLKTGQSMTLQCAQDMNHEYMSWYRQDPGMGLRLIHYSVGAGITDQGEVPNGYNVSRSTTEDFPLRLLSAAPSQTSVYFCASSFQTGASYGYTFGSGTRLTVLEGKPIPNPLLGLDSTGSGEDLKNVFPPEVAVFEPSEAEISHTQKATLVCLATGFYPDHVELSWWVNGKEVHSGVSTDPQPLKEQPALNDSRYCLSSRLRVSATFWQNPRNHFRCQVQFYGLSENDEWTQDRAKPVTQIVSAEAWGRADCGSQSFGLLDPKLCYLLDGILFIYGVILTALFLRVKFSRSADAPAYQQGQNQLYNELNLGRREEYDVLDKRRGRDPEMGGKPQRRKNPQEGLYNELQKDKMAEAYSEIGMKGERRRGKGHDGLYQGLSTATKDTYDALHMQALPPRRAKRSGSGATNFSLLKQAGDVEENPGPTSMACPGFLWALVISTCLEFSMFEILNVEQSPQSLHVQEGDSTNFTCSFPSSNFYALHWYRWETAKSPEALFVMTLNGDEKKKGRISATLNTKEGYSYLYIKGSQPEDSATYLCARNTGNQFYFGTGTSLTVIPNEQKLISEEDLGSGIQNPDPAVYQLRDSKSSDKSVCLFTDFDSQTNVSQSKDSDVYITDKTVLDMRSMDFKSNSAVAWSNKSDFACANAFNNSIIPEDTFFPSPESSCGTQSFGLLDPKLCYLLDGILFIYGVILTALFLKRGRKKLLYIFKQPFMRPVQTTQEEDGCSCRFPEEEEGGCELRVKFSRSADAPAYQQGQNQLYNELNLGRREEYDVLDKRRGRDPEMGGKPQRRKNPQEGLYNELQKDKMAEAYSEIGMKGERRRGKGHDGLYQGLSTATKDTYDALHMQALPPR

SEQ ID NO: 14635 - protein, 1067 aa, Artificial Sequence
  Synthetic Polypeptide
MTIRLLCYMGFYFLGAGLMACQVQLVESGGGLVQAGDSVTLSCTASGRTFSSYALAWFRQRPGKEREFVAGLRWGGPTNYADSVKDRFTISGDSAKHTMYLQMNSLKPEDTAVYYCGYNPGGWAVPSQYEYDSWGQGTQVTVSSGTGGGGSGGGGSGGGGSEFGVTQTPKFQVLKTGQSMTLQCAQDMNHEYMSWYRQDPGMGLRLIHYSVGAGITDQGEVPNGYNVSRSTTEDFPLRLLSAAPSQTSVYFCASSFQTGASYGYTFGSGTRLTVLEGKPIPNPLLGLDSTGSGEDLKNVFPPEVAVFEPSEAEISHTQKATLVCLATGFYPDHVELSWWVNGKEVHSGVSTDPQPLKEQPALNDSRYCLSSRLRVSATFWQNPRNHFRCQVQFYGLSENDEWTQDRAKPVTQIVSAEAWGRADCGSQSFGLLDPKLCYLLDGILFIYGVILTALFLKRGRKKLLYIFKQPFMRPVQTTQEEDGCSCRFPEEEEGGCELRVKFSRSADAPAYQQGQNQLYNELNLGRREEYDVLDKRRGRDPEMGGKPQRRKNPQEGLYNELQKDKMAEAYSEIGMKGERRRGKGHDGLYQGLSTATKDTYDALHMQALPPRRAKRSGSGATNFSLLKQAGDVEENPGPTSMACPGFLWALVISTCLEFSMFEILNVEQSPQSLHVQEGDSTNFTCSFPSSNFYALHWYRWETAKSPEALFVMTLNGDEKKKGRISATLNTKEGYSYLYIKGSQPEDSATYLCARNTGNQFYFGTGTSLTVIPNEQKLISEEDLGSGIQNPDPAVYQLRDSKSSDKSVCLFTDFDSQTNVSQSKDSDVYITDKTVLDMRSMDFKSNSAVAWSNKSDFACANAFNNSIIPEDTFFPSPESSCGTQSFGLLDPKLCYLLDGILFIYGVILTALFLKRGRKKLLYIFKQPFMRPVQTTQEEDGCSCRFPEEEEGGCELRVKFSRSADAPAYQQGQNQLYNELNLGRREEYDVLDKRRGRDPEMGGKPQRRKNPQEGLYNELQKDKMAEAYSEIGMKGERRRGKGHDGLYQGLSTATKDTYDALHMQALPPR

SEQ ID NO: 14636 - protein, 957 aa, Artificial Sequence
  Synthetic Polypeptide
MTIRLLCYMGFYFLGAGLMACQVQLVESGGGLVQAGDSVTLSCTASGRTFSSYALAWFRQRPGKEREFVAGLRWGGPTNYADSVKDRFTISGDSAKHTMYLQMNSLKPEDTAVYYCGYNPGGWAVPSQYEYDSWGQGTQVTVSSGTGGGGSGGGGSGGGGSEFGVTQTPKFQVLKTGQSMTLQCAQDMNHEYMSWYRQDPGMGLRLIHYSVGAGITDQGEVPNGYNVSRSTTEDFPLRLLSAAPSQTSVYFCASSFQTGASYGYTFGSGTRLTVLEQSFGLLDPKLCYLLDGILFIYGVILTALFLRVKFSRSADAPAYQQGQNQLYNELNLGRREEYDVLDKRRGRDPEMGGKPQRRKNPQEGLYNELQKDKMAEAYSEIGMKGERRRGKGHDGLYQGLSTATKDTYDALHMQALPPRRAKRSGSGATNFSLLKQAGDVEENPGPTSMACPGFLWALVISTCLEFSMFEILNVEQSPQSLHVQEGDSTNFTCSFPSSNFYALHWYRWETAKSPEALFVMTLNGDEKKKGRISATLNTKEGYSYLYIKGSQPEDSATYLCARNTGNQFYFGTGTSLTVIPNQSFGLLDPKLCYLLDGILFIYGVILTALFLRVKFSRSADAPAYQQGQNQLYNELNLGRREEYDVLDKRRGRDPEMGGKPQRRKNPQEGLYNELQKDKMAEAYSEIGMKGERRRGKGHDGLYQGLSTATKDTYDALHMQALPPRRAKRSGSGVKQTLNFDLLKLAGDVESNPGPSRGHMTEYKPTVRLATRDDVPRAVRTLAAAFADYPATRHTVDPDRHIERVTELQELFLTRVGLDIGKVWVADDGAAVAVWTTPESVEAGAVFAEIGPRMAELSGSRLAAQQQMEGLLAPHRPKEPAWFLATVGVSPDHQGKGLGSAVVLPGVEAAERAGVPAFLETSAPRNLPFYERLGFTVTADVEVPEGPRTWCMTRKPGA

SEQ ID NO: 14637 - protein, 782 aa, Artificial Sequence
  Synthetic Polypeptide
MTIRLLCYMGFYFLGAGLMACQVQLVESGGGLVQAGDSVTLSCTASGRTFSSYALAWFRQRPGKEREFVAGLRWGGPTNYADSVKDRFTISGDSAKHTMYLQMNSLKPEDTAVYYCGYNPGGWAVPSQYEYDSWGQGTQVTVSSGTGGGGSGGGGSGGGGSEFGVTQTPKFQVLKTGQSMTLQCAQDMNHEYMSWYRQDPGMGLRLIHYSVGAGITDQGEVPNGYNVSRSTTEDFPLRLLSAAPSQTSVYFCASSFQTGASYGYTFGSGTRLTVLEGQPKANPTVTLFPPSSEELQANKATLVCLISDFYPGAVTVAWKADGSPVKAGVETTKPSKQSNNKYAASSYLSLTPEQWKSHRSYSCQVTHEGSTVEKTVAPTECSPIKTDVITMDPKDNCSKDANDTLLLQLTNTSAYYMYLLLLLKSVVYFAIITCCLLRRTAFCCNGEKSRAKRSGSGATNFSLLKQAGDVEENPGPTSMACPGFLWALVISTCLEFSMFEILNVEQSPQSLHVQEGDSTNFTCSFPSSNFYALHWYRWETAKSPEALFVMTLNGDEKKKGRISATLNTKEGYSYLYIKGSQPEDSATYLCARNTGNQFYFGTGTSLTVIPNASTKGPSVFPLAPSSKSTSGGTAALGCLVKDYFPEPVTVSWNSGALTSGVHTFPAVLQSSGLYSLSSVVTVPSSSLGTQTYICNVNHKPSNTKVDKRVEPKSCEVKTDSTDHVKPKETENTKQPSKSCHKPKAIVHTEKVNMMSLTVLGLRMLFAKTVAVNFLLTAKLFFL

SEQ ID NO: 14638 - protein, 760 aa, Artificial Sequence
  Synthetic Polypeptide
MTIRLLCYMGFYFLGAGLMACQVQLVESGGGLVQAGDSVTLSCTASGRTFSSYALAWFRQRPGKEREFVAGLRWGGPTNYADSVKDRFTISGDSAKHTMYLQMNSLKPEDTAVYYCGYNPGGWAVPSQYEYDSWGQGTQVTVSSGTGGGGSGGGGSGGGGSEFGVTQTPKFQVLKTGQSMTLQCAQDMNHEYMSWYRQDPGMGLRLIHYSVGAGITDQGEVPNGYNVSRSTTEDFPLRLLSAAPSQTSVYFCASSFQTGASYGYTFGSGTRLTVLEGQPKANPTVTLFPPSSEELQANKATLVCLISDFYPGAVTVAWKADGSPVKAGVETTKPSKQSNNKYAASSYLSLTPEQWKSHRSYSCQVTHEGSTVEKTVAPTECSGRADCGITSASYHQGVLSATILYEILLGKATLYAVLVSALVLMAMVKRKDSRGRAKRSGSGATNFSLLKQAGDVEENPGPTSMACPGFLWALVISTCLEFSMFEILNVEQSPQSLHVQEGDSTNFTCSFPSSNFYALHWYRWETAKSPEALFVMTLNGDEKKKGRISATLNTKEGYSYLYIKGSQPEDSATYLCARNTGNQFYFGTGTSLTVIPNASTKGPSVFPLAPSSKSTSGGTAALGCLVKDYFPEPVTVSWNSGALTSGVHTFPAVLQSSGLYSLSSVVTVPSSSLGTQTYICNVNHKPSNTKVDKRVEPKSCIPEDTFFPSSDVPCDVKLVEKSFETDTNLNFQNLSVIGFRILLLKVAGFNLLMTLRLWSS

SEQ ID NO: 14639 - protein, 760 aa, Artificial Sequence
  Synthetic Polypeptide
MTIRLLCYMGFYFLGAGLMACQVQLVESGGGLVQAGDSVTLSCTASGRTFSSYALAWFRQRPGKEREFVAGLRWGGPTNYADSVKDRFTISGDSAKHTMYLQMNSLKPEDTAVYYCGYNPGGWAVPSQYEYDSWGQGTQVTVSSGTGGGGSGGGGSGGGGSEFGVTQTPKFQVLKTGQSMTLQCAQDMNHEYMSWYRQDPGMGLRLIHYSVGAGITDQGEVPNGYNVSRSTTEDFPLRLLSAAPSQTSVYFCASSFQTGASYGYTFGSGTRLTVLEGQPKANPTVTLFPPSSEELQANKATLVCLISDFYPGAVTVAWKADGSPVKAGVETTKPSKQSNNKYAASSYLSLTPEQWKSHRSYSCQVTHEGSTVEKTVAPTECSGRADCGFTSESYQQGVLSATILYEILLGKATLYAVLVSALVLMAMVKRKDSRGRAKRSGSGATNFSLLKQAGDVEENPGPTSMACPGFLWALVISTCLEFSMFEILNVEQSPQSLHVQEGDSTNFTCSFPSSNFYALHWYRWETAKSPEALFVMTLNGDEKKKGRISATLNTKEGYSYLYIKGSQPEDSATYLCARNTGNQFYFGTGTSLTVIPNASTKGPSVFPLAPSSKSTSGGTAALGCLVKDYFPEPVTVSWNSGALTSGVHTFPAVLQSSGLYSLSSVVTVPSSSLGTQTYICNVNHKPSNTKVDKRVEPKSCIPEDTFFPSPESSCDVKLVEKSFETDTNLNFQNLSVIGFRILLLKVAGFNLLMTLRLWSS

SEQ ID NO: 14640 - protein, 585 aa, Artificial Sequence
  Synthetic Polypeptide
MTIRLLCYMGFYFLGAGLMACQVQLVESGGGLVQAGDSVTLSCTASGRTFSSYALAWFRQRPGKEREFVAGLRWGGPTNYADSVKDRFTISGDSAKHTMYLQMNSLKPEDTAVYYCGYNPGGWAVPSQYEYDSWGQGTQVTVSSGTGGGGSGGGGSGGGGSEFGVTQTPKFQVLKTGQSMTLQCAQDMNHEYMSWYRQDPGMGLRLIHYSVGAGITDQGEVPNGYNVSRSTTEDFPLRLLSAAPSQTSVYFCASSFQTGASYGYTFGSGTRLTVGGGGSGGGGSGGGGSILNVEQSPQSLHVQEGDSTNFTCSFPSSNFYALHWYRWETAKSPEALFVMTLNGDEKKKGRISATLNTKEGYSYLYIKGSQPEDSATYLCARNTGNQFYFGTGTSLTVIPNDGNEEMGGITQTPYKVSISGTTVILTCPQYPGSEILWQHNDKNIGGDEDDKNIGSDEDHLSLKEFSELEQSGYYVCYPRGSKPEDANFYLYLRARVCENCMEMDVMSVATIVIVDICITGGLLLLVYYWSKNRKAKAKPVTRGAGAGGRQRGQNKERPPPVPNPDYEPIRKGQRDLYSGLNQRRI

SEQ ID NO: 14641 - protein, 550 aa, Artificial Sequence
  Synthetic Polypeptide
MTIRLLCYMGFYFLGAGLMACQVQLVESGGGLVQAGDSVTLSCTASGRTFSSYALAWFRQRPGKEREFVAGLRWGGPTNYADSVKDRFTISGDSAKHTMYLQMNSLKPEDTAVYYCGYNPGGWAVPSQYEYDSWGQGTQVTVSSGTGGGGSGGGGSGGGGSEFGVTQTPKFQVLKTGQSMTLQCAQDMNHEYMSWYRQDPGMGLRLIHYSVGAGITDQGEVPNGYNVSRSTTEDFPLRLLSAAPSQTSVYFCASSFQTGASYGYTFGSGTRLTVGGGGSGGGGSGGGGSILNVEQSPQSLHVQEGDSTNFTCSFPSSNFYALHWYRWETAKSPEALFVMTLNGDEKKKGRISATLNTKEGYSYLYIKGSQPEDSATYLCARNTGNQFYFGTGTSLTVIPNFKIPIEELEDRVFVNCNTSITWVEGTVGTLLSDITRLDLGKRILDPRGIYRCNGTDIYKDKESTVQVHYRMCQSCVELDPATVAGIIVTDVIATLLLALGVFCFAGHETGRLSGAADTQALLRNDQVYQPLRDRDDAQYSHLGGNWARNK

SEQ ID NO: 14642 - protein, 560 aa, Artificial Sequence
  Synthetic Polypeptide
MTIRLLCYMGFYFLGAGLMACQVQLVESGGGLVQAGDSVTLSCTASGRTFSSYALAWFRQRPGKEREFVAGLRWGGPTNYADSVKDRFTISGDSAKHTMYLQMNSLKPEDTAVYYCGYNPGGWAVPSQYEYDSWGQGTQVTVSSGTGGGGSGGGGSGGGGSEFGVTQTPKFQVLKTGQSMTLQCAQDMNHEYMSWYRQDPGMGLRLIHYSVGAGITDQGEVPNGYNVSRSTTEDFPLRLLSAAPSQTSVYFCASSFQTGASYGYTFGSGTRLTVGGGGSGGGGSGGGGSILNVEQSPQSLHVQEGDSTNFTCSFPSSNFYALHWYRWETAKSPEALFVMTLNGDEKKKGRISATLNTKEGYSYLYIKGSQPEDSATYLCARNTGNQFYFGTGTSLTVIPNQSIKGNHLVKVYDYQEDGSVLLTCDAEAKNITWFKDGKMIGFLTEDKKKWNLGSNAKDPRGMYQCKGSQNKSKPLQVYYRMCQNCIELNAATISGFLFAEIVSIFVLAVGVYFIAGQDGVRQSRASDKQTLLPNDQLYQPLKDREDDQYSHLQGNQLRRN

SEQ ID NO: 14643 - protein, 543 aa, Artificial Sequence
  Synthetic Polypeptide
MTIRLLCYMGFYFLGAGLMACQVQLVESGGGLVQAGDSVTLSCTASGRTFSSYALAWFRQRPGKEREFVAGLRWGGPTNYADSVKDRFTISGDSAKHTMYLQMNSLKPEDTAVYYCGYNPGGWAVPSQYEYDSWGQGTQVTVSSGTGGGGSGGGGSGGGGSEFGVTQTPKFQVLKTGQSMTLQCAQDMNHEYMSWYRQDPGMGLRLIHYSVGAGITDQGEVPNGYNVSRSTTEDFPLRLLSAAPSQTSVYFCASSFQTGASYGYTFGSGTRLTVGGGGSGGGGSGGGGSILNVEQSPQSLHVQEGDSTNFTCSFPSSNFYALHWYRWETAKSPEALFVMTLNGDEKKKGRISATLNTKEGYSYLYIKGSQPEDSATYLCARNTGNQFYFGTGTSLTVIPNQSFGLLDPKLCYLLDGILFIYGVILTALFLRVKFSRSADAPAYQQGQNQLYNELNLGRREEYDVLDKRRGRDPEMGGKPQRRKNPQEGLYNELQKDKMAEAYSEIGMKGERRRGKGHDGLYQGLSTATKDTYDALHMQALPPR

SEQ ID NO: 14644 - protein, 776 aa, Artificial Sequence
  Synthetic Polypeptide
MTIRLLCYMGFYFLGAGLMACQVQLVESGGGLVQAGDSVTLSCTASGRTFSSYALAWFRQRPGKEREFVAGLRWGGPTNYADSVKDRFTISGDSAKHTMYLQMNSLKPEDTAVYYCGYNPGGWAVPSQYEYDSWGQGTQVTVSSGTGGGGSGGGGSGGGGSEFGVTQTPKFQVLKTGQSMTLQCAQDMNHEYMSWYRQDPGMGLRLIHYSVGAGITDQGEVPNGYNVSRSTTEDFPLRLLSAAPSQTSVYFCASSFQTGASYGYTFGSGTRLTVGGGGSGGGGSGGGGSILNVEQSPQSLHVQEGDSTNFTCSFPSSNFYALHWYRWETAKSPEALFVMTLNGDEKKKGRISATLNTKEGYSYLYIKGSQPEDSATYLCARNTGNQFYFGTGTSLTVIPNGSGIQNPDPAVYQLRDSKSSDKSVCLFTDFDSQTNVSQSKDSDVYITDKTVLDMRSMDFKSNSAVAWSNKSDFACANAFNNSIIPEDTFFPSPESSCDVKLVEKSFETDTNLNFQNLSVIGFRILLLKVAGFNLLMTLRLWSSRAKRSGSGVKQTLNFDLLKLAGDVESNPGPSRGHMTEYKPTVRLATRDDVPRAVRTLAAAFADYPATRHTVDPDRHIERVTELQELFLTRVGLDIGKVWVADDGAAVAVWTTPESVEAGAVFAEIGPRMAELSGSRLAAQQQMEGLLAPHRPKEPAWFLATVGVSPDHQGKGLGSAVVLPGVEAAERAGVPAFLETSAPRNLPFYERLGFTVTADVEVPEGPRTWCMTRKPGA

SEQ ID NO: 14645 - protein, 810 aa, Artificial Sequence
  Synthetic Polypeptide
MTIRLLCYMGFYFLGAGLMACQVQLVESGGGLVQAGDSVTLSCTASGRTFSSYALAWFRQRPGKEREFVAGLRWGGPTNYADSVKDRFTISGDSAKHTMYLQMNSLKPEDTAVYYCGYNPGGWAVPSQYEYDSWGQGTQVTVSSGTGGGGSGGGGSGGGGSEFGVTQTPKFQVLKTGQSMTLQCAQDMNHEYMSWYRQDPGMGLRLIHYSVGAGITDQGEVPNGYNVSRSTTEDFPLRLLSAAPSQTSVYFCASSFQTGASYGYTFGSGTRLTVGGGGSGGGGSGGGGSILNVEQSPQSLHVQEGDSTNFTCSFPSSNFYALHWYRWETAKSPEALFVMTLNGDEKKKGRISATLNTKEGYSYLYIKGSQPEDSATYLCARNTGNQFYFGTGTSLTVIPNLEDLKNVFPPEVAVFEPSEAEISHTQKATLVCLATGFYPDHVELSWWVNGKEVHSGVSTDPQPLKEQPALNDSRYCLSSRLRVSATFWQNPRNHFRCQVQFYGLSENDEWTQDRAKPVTQIVSAEAWGRADCGFTSESYQQGVLSATILYEILLGKATLYAVLVSALVLMAMVKRKDSRGRAKRSGSGATNFSLLKQAGDVEENPGPTRGHMTEYKPTVRLATRDDVPRAVRTLAAAFADYPATRHTVDPDRHIERVTELQELFLTRVGLDIGKVWVADDGAAVAVWTTPESVEAGAVFAEIGPRMAELSGSRLAAQQQMEGLLAPHRPKEPAWFLATVGVSPDHQGKGLGSAVVLPGVEAAERAGVPAFLETSAPRNLPFYERLGFTVTADVEVPEGPRTWCMTRKPGA

SEQ ID NO: 14646 - protein, 858 aa, Artificial Sequence
  Synthetic Polypeptide
MTIRLLCYMGFYFLGAGLMACQVQLVESGGGLVQAGDSVTLSCTASGRTFSSYALAWFRQRPGKEREFVAGLRWGGPTNYADSVKDRFTISGDSAKHTMYLQMNSLKPEDTAVYYCGYNPGGWAVPSQYEYDSWGQGTQVTVSSGTGGGGSGGGGSGGGGSEFGVTQTPKFQVLKTGQSMTLQCAQDMNHEYMSWYRQDPGMGLRLIHYSVGAGITDQGEVPNGYNVSRSTTEDFPLRLLSAAPSQTSVYFCASSFQTGASYGYTFGSGTRLTVGGGGSGGGGSGGGGSILNVEQSPQSLHVQEGDSTNFTCSFPSSNFYALHWYRWETAKSPEALFVMTLNGDEKKKGRISATLNTKEGYSYLYIKGSQPEDSATYLCARNTGNQFYFGTGTSLTVIPNEQKLISEEDLGSGTPFPSLAPPIMLLVDGKQQMVVVCLVLDVAPPGLDSPIWFSAGNGSALDAFTYGPSPATDGTWTNLAHLSLPSEELASWEPLVCHTGPGAEGHSRSTQPMHLSGEASTARTCPQEPLRGTPGGALWLGVLRLLLFKLLLFDLLLTCSCLCDPAGPLPSPATTTRLRALGSHRLHPATETGGREATSSPRPQPRDRRWGDTPPGRKPGSPVRAKRSGSGVKQTLNFDLLKLAGDVESNPGPSRSRGHMTEYKPTVRLATRDDVPRAVRTLAAAFADYPATRHTVDPDRHIERVTELQELFLTRVGLDIGKVWVADDGAAVAVWTTPESVEAGAVFAEIGPRMAELSGSRLAAQQQMEGLLAPHRPKEPAWFLATVGVSPDHQGKGLGSAVVLPGVEAAERAGVPAFLETSAPRNLPFYERLGFTVTADVEVPEGPRTWCMTRKPGA

SEQ ID NO: 14647 - protein, 684 aa, Artificial Sequence
  Synthetic Polypeptide
MTIRLLCYMGFYFLGAGLMACQVQLVESGGGLVQAGDSVTLSCTASGRTFSSYALAWFRQRPGKEREFVAGLRWGGPTNYADSVKDRFTISGDSAKHTMYLQMNSLKPEDTAVYYCGYNPGGWAVPSQYEYDSWGQGTQVTVSSGTGGGGSGGGGSGGGGSEFGVTQTPKFQVLKTGQSMTLQCAQDMNHEYMSWYRQDPGMGLRLIHYSVGAGITDQGEVPNGYNVSRSTTEDFPLRLLSAAPSQTSVYFCASSFQTGASYGYTFGSGTRLTVLEDLKNVFPPEVAVFEPSEAEISHTQKATLVCLATGFYPDHVELSWWVNGKEVHSGVSTDPQPLKEQPALNDSRYCLSSRLRVSATFWQNPRNHFRCQVQFYGLSENDEWTQDRAKPVTQIVSAEAWGRADCGFTSESYQQGVLSATILYEILLGKATLYAVLVSALVLMAMVKRKDSRGRAKRSGSGATNFSLLKQAGDVEENPGPTRGHMTEYKPTVRLATRDDVPRAVRTLAAAFADYPATRHTVDPDRHIERVTELQELFLTRVGLDIGKVWVADDGAAVAVWTTPESVEAGAVFAEIGPRMAELSGSRLAAQQQMEGLLAPHRPKEPAWFLATVGVSPDHQGKGLGSAVVLPGVEAAERAGVPAFLETSAPRNLPFYERLGFTVTADVEVPEGPRTWCMTRKPGA

SEQ ID NO: 14648 - protein, 454 aa, Artificial Sequence
  Synthetic Polypeptide
MTIRLLCYMGFYFLGAGLMACQVQLVESGGGLVQAGDSVTLSCTASGRTFSSYALAWFRQRPGKEREFVAGLRWGGPTNYADSVKDRFTISGDSAKHTMYLQMNSLKPEDTAVYYCGYNPGGWAVPSQYEYDSWGQGTQVTVSSGTGGGGSGGGGSGGGGSEFGVTQTPKFQVLKTGQSMTLQCAQDMNHEYMSWYRQDPGMGLRLIHYSVGAGITDQGEVPNGYNVSRSTTEDFPLRLLSAAPSQTSVYFCASSFQTGASYGYTFGSGTRLTVLEDLKNVFPPEVAVFEPSEAEISHTQKATLVCLATGFYPDHVELSWWVNGKEVHSGVSTDPQPLKEQPALNDSRYCLSSRLRVSATFWQNPRNHFRCQVQFYGLSENDEWTQDRAKPVTQIVSAEAWGRADCGFTSESYQQGVLSATILYEILLGKATLYAVLVSALVLMAMVKRKDSRG

SEQ ID NO: 14649 - protein, 439 aa, Artificial Sequence
  Synthetic Polypeptide
MACPGFLWALVISTCLEFSMFEILNVEQSPQSLHVQEGDSTNFTCSFPSSNFYALHWYRWETAKSPEALFVMTLNGDEKKKGRISATLNTKEGYSYLYIKGSQPEDSATYLCARNTGNQFYFGTGTSLTVIPNIQNPDPAVYQLRDSKSSDKSVCLFTDFDSQTNVSQSKDSDVYITDKTVLDMRSMDFKSNSAVAWSNKSDFACANAFNNSIIPEDTFFPSPESSCDVKLVEKSFETDTNLNFQNLSVIGFRILLLKVAGFNLLMTLRLWSSRAKRSGSGVKQTLNFDLLKLAGDVESNPGPSRGHMAKPLSQEESTLIERATATINSIPISEDYSVASAALSSDGRIFTGVNVYHFTGGPCAELVVLGTAAAAAAGNLTCIVAIGNENRGILSPCGRCRQVLLDLHPGIKAIVKDSDGQPTAVGIRELLPSGYVWEG

SEQ ID NO: 14650 - protein, 273 aa, Artificial Sequence
  Synthetic Polypeptide
MACPGFLWALVISTCLEFSMFEILNVEQSPQSLHVQEGDSTNFTCSFPSSNFYALHWYRWETAKSPEALFVMTLNGDEKKKGRISATLNTKEGYSYLYIKGSQPEDSATYLCARNTGNQFYFGTGTSLTVIPNIQNPDPAVYQLRDSKSSDKSVCLFTDFDSQTNVSQSKDSDVYITDKTVLDMRSMDFKSNSAVAWSNKSDFACANAFNNSIIPEDTFFPSPESSCDVKLVEKSFETDTNLNFQNLSVIGFRILLLKVAGFNLLMTLRLWSS

SEQ ID NO: 14651 - protein, 702 aa, Artificial Sequence
  Synthetic Polypeptide
MTIRLLCYMGFYFLGAGLMACQVQLVESGGGLVQAGDSVTLSCTASGRTFSSYALAWFRQRPGKEREFVAGLRWGGPTNYADSVKDRFTISGDSAKHTMYLQMNSLKPEDTAVYYCGYNPGGWAVPSQYEYDSWGQGTQVTVSSGTGGGGSGGGGSGGGGSEFGVTQTPKFQVLKTGQSMTLQCAQDMNHEYMSWYRQDPGMGLRLIHYSVGAGITDQGEVPNGYNVSRSTTEDFPLRLLSAAPSQTSVYFCASSFQTGASYGYTFGSGTRLTVLEGKPIPNPLLGLDSTGSGEDLKNVFPPEVAVFEPSEAEISHTQKATLVCLATGFYPDHVELSWWVNGKEVHSGVCTDPQPLKEQPALNDSRYCLSSRLRVSATFWQNPRNHFRCQVQFYGLSENDEWTQDRAKPVTQIVSAEAWGRADCGFTSESYQQGVLSATILYEILLGKATLYAVLVSALVLMAMVKRKDSRGRAKRSGSGATNFSLLKQAGDVEENPGPTRGHMTEYKPTVRLATRDDVPRAVRTLAAAFADYPATRHTVDPDRHIERVTELQELFLTRVGLDIGKVWVADDGAAVAVWTTPESVEAGAVFAEIGPRMAELSGSRLAAQQQMEGLLAPHRPKEPAWFLATVGVSPDHQGKGLGSAVVLPGVEAAERAGVPAFLETSAPRNLPFYERLGFTVTADVEVPEGPRTWCMTRKPGA

SEQ ID NO: 14652 - protein, 472 aa, Artificial Sequence
  Synthetic Polypeptide
MTIRLLCYMGFYFLGAGLMACQVQLVESGGGLVQAGDSVTLSCTASGRTFSSYALAWFRQRPGKEREFVAGLRWGGPTNYADSVKDRFTISGDSAKHTMYLQMNSLKPEDTAVYYCGYNPGGWAVPSQYEYDSWGQGTQVTVSSGTGGGGSGGGGSGGGGSEFGVTQTPKFQVLKTGQSMTLQCAQDMNHEYMSWYRQDPGMGLRLIHYSVGAGITDQGEVPNGYNVSRSTTEDFPLRLLSAAPSQTSVYFCASSFQTGASYGYTFGSGTRLTVLEGKPIPNPLLGLDSTGSGEDLKNVFPPEVAVFEPSEAEISHTQKATLVCLATGFYPDHVELSWWVNGKEVHSGVCTDPQPLKEQPALNDSRYCLSSRLRVSATFWQNPRNHFRCQVQFYGLSENDEWTQDRAKPVTQIVSAEAWGRADCGFTSESYQQGVLSATILYEILLGKATLYAVLVSALVLMAMVKRKDSRG

SEQ ID NO: 14653 - protein, 451 aa, Artificial Sequence
  Synthetic Polypeptide
MACPGFLWALVISTCLEFSMFEILNVEQSPQSLHVQEGDSTNFTCSFPSSNFYALHWYRWETAKSPEALFVMTLNGDEKKKGRISATLNTKEGYSYLYIKGSQPEDSATYLCARNTGNQFYFGTGTSLTVIPNEQKLISEEDGSGIQNPDPAVYQLRDSKSSDKSVCLFTDFDSQTNVSQSKDSDVYITDKCVLDMRSMDFKSNSAVAWSNKSDFACANAFNNSIIPEDTFFPSPESSCDVKLVEKSFETDTNLNFQNLSVIGFRILLLKVAGFNLLMTLRLWSSRAKRSGSGVKQTLNFDLLKLAGDVESNPGPSRGHMAKPLSQEESTLIERATATINSIPISEDYSVASAALSSDGRIFTGVNVYHFTGGPCAELVVLGTAAAAAAGNLTCIVAIGNENRGILSPCGRCRQVLLDLHPGIKAIVKDSDGQPTAVGIRELLPSGYVWEG

SEQ ID NO: 14654 - protein, 285 aa, Artificial Sequence
  Synthetic Polypeptide
MACPGFLWALVISTCLEFSMFEILNVEQSPQSLHVQEGDSTNFTCSFPSSNFYALHWYRWETAKSPEALFVMTLNGDEKKKGRISATLNTKEGYSYLYIKGSQPEDSATYLCARNTGNQFYFGTGTSLTVIPNEQKLISEEDGSGIQNPDPAVYQLRDSKSSDKSVCLFTDFDSQTNVSQSKDSDVYITDKCVLDMRSMDFKSNSAVAWSNKSDFACANAFNNSIIPEDTFFPSPESSCDVKLVEKSFETDTNLNFQNLSVIGFRILLLKVAGFNLLMTLRLWSS

SEQ ID NO: 14655 - protein, 776 aa, Artificial Sequence
  Synthetic Polypeptide
MTIRLLCYMGFYFLGAGLMACQVQLVESGGGLVQAGDSVTLSCTASGRTFSSYALAWFRQRPGKEREFVAGLRWGGPTNYADSVKDRFTISGDSAKHTMYLQMNSLKPEDTAVYYCGYNPGGWAVPSQYEYDSWGQGTQVTVSSGTGGGGSGGGGSGGGGSEFGVTQTPKFQVLKTGQSMTLQCAQDMNHEYMSWYRQDPGMGLRLIHYSVGAGITDQGEVPNGYNVSRSTTEDFPLRLLSAAPSQTSVYFCASSFQTGASYGYTFGSGTRLTVGGGGSGGGGSGGGGSILNVEQSPQSLHVQEGDSTNFTCSFPSSNFYALHWYRWETAKSPEALFVMTLNGDEKKKGRISATLNTKEGYSYLYIKGSQPEDSATYLCARNTGNQFYFGTGTSLTVIPNGSGIQNPDPAVYQLRDSKSSDKSVCLFTDFDSQTNVSQSKDSDVYITDKTVLDMRSMDFKSNSAVAWSNKSDFACANAFNNSIIPEDTFFPSSDVPCDVKLVEKSFETDTNLNFQNLSVIGFRILLLKVAGFNLLMTLRLWSSRAKRSGSGVKQTLNFDLLKLAGDVESNPGPSRGHMTEYKPTVRLATRDDVPRAVRTLAAAFADYPATRHTVDPDRHIERVTELQELFLTRVGLDIGKVWVADDGAAVAVWTTPESVEAGAVFAEIGPRMAELSGSRLAAQQQMEGLLAPHRPKEPAWFLATVGVSPDHQGKGLGSAVVLPGVEAAERAGVPAFLETSAPRNLPFYERLGFTVTADVEVPEGPRTWCMTRKPGA

SEQ ID NO: 14656 - protein, 810 aa, Artificial Sequence
  Synthetic Polypeptide
MTIRLLCYMGFYFLGAGLMACQVQLVESGGGLVQAGDSVTLSCTASGRTFSSYALAWFRQRPGKEREFVAGLRWGGPTNYADSVKDRFTISGDSAKHTMYLQMNSLKPEDTAVYYCGYNPGGWAVPSQYEYDSWGQGTQVTVSSGTGGGGSGGGGSGGGGSEFGVTQTPKFQVLKTGQSMTLQCAQDMNHEYMSWYRQDPGMGLRLIHYSVGAGITDQGEVPNGYNVSRSTTEDFPLRLLSAAPSQTSVYFCASSFQTGASYGYTFGSGTRLTVGGGGSGGGGSGGGGSILNVEQSPQSLHVQEGDSTNFTCSFPSSNFYALHWYRWETAKSPEALFVMTLNGDEKKKGRISATLNTKEGYSYLYIKGSQPEDSATYLCARNTGNQFYFGTGTSLTVIPNLEDLKNVFPPEVAVFEPSKAEIAHTQKATLVCLATGFYPDHVELSWWVNGKEVHSGVSTDPQPLKEQPALNDSRYCLSSRLRVSATFWQNPRNHFRCQVQFYGLSENDEWTQDRAKPVTQIVSAEAWGRADCGITSASYHQGVLSATILYEILLGKATLYAVLVSALVLMAMVKRKDSRGRAKRSGSGATNFSLLKQAGDVEENPGPTRGHMTEYKPTVRLATRDDVPRAVRTLAAAFADYPATRHTVDPDRHIERVTELQELFLTRVGLDIGKVWVADDGAAVAVWTTPESVEAGAVFAEIGPRMAELSGSRLAAQQQMEGLLAPHRPKEPAWFLATVGVSPDHQGKGLGSAVVLPGVEAAERAGVPAFLETSAPRNLPFYERLGFTVTADVEVPEGPRTWCMTRKPGA

SEQ ID NO: 14657 - protein, 1126 aa, Artificial Sequence
  Synthetic Polypeptide
MTIRLLCYMGFYFLGAGLMACQVQLVESGGGLVQAGDSVTLSCTASGRTFSSYALAWFRQRPGKEREFVAGLRWGGPTNYADSVKDRFTISGDSAKHTMYLQMNSLKPEDTAVYYCGYNPGGWAVPSQYEYDSWGQGTQVTVSSGTGGGGSGGGGSGGGGSEFGVTQTPKFQVLKTGQSMTLQCAQDMNHEYMSWYRQDPGMGLRLIHYSVGAGITDQGEVPNGYNVSRSTTEDFPLRLLSAAPSQTSVYFCASSFQTGASYGYTFGSGTRLTVLEIQNPDPAVYQLRDSKSSDKSVCLFTDFDSQTNVSQSKDSDVYITDKCVLDMRSMDFKSNSAVAWSNKSDFACANAFNNSIIPEDTFFPSSDVPCDVKLVEKSFETDTNLNFQNLSVIGFRILLLKVAGFNLLMTLRLWSSRAKRSGSGVKQTLNFDLLKLAGDVESNPGPTSMDWIWRILFLVGAATGAHSGPQVQLQESGGGLAQAGGSLRLSCAASGRTFSMGWFRQAPGKEREFVAAITYSGGSPYYASSVRGRFTISRDNAKNTVYLQMNSLKPEDTAVYYCAANPTYGSDWNAENWGQGTQVTVSSGSGGGGSGGGGSGGGGSFEILNVEQSPQSLHVQEGDSTNFTCSFPSSNFYALHWYRWETAKSPEALFVMTLNGDEKKKGRISATLNTKEGYSYLYIKGSQPEDSATYLCARNTGNQFYFGTGTSLTVIPNEDLKNVFPPEVAVFEPSKAEIAHTQKATLVCLATGFYPDHVELSWWVNGKEVHSGVCTDPQPLKEQPALNDSRYCLSSRLRVSATFWQNPRNHFRCQVQFYGLSENDEWTQDRAKPVTQIVSAEAWGRADCGITSASYHQGVLSATILYEILLGKATLYAVLVSALVLMAMVKRKDSRGRAKRSGSGATNFSLLKQAGDVEENPGPSRGHMTEYKPTVRLATRDDVPRAVRTLAAAFADYPATRHTVDPDRHIERVTELQELFLTRVGLDIGKVWVADDGAAVAVWTTPESVEAGAVFAEIGPRMAELSGSRLAAQQQMEGLLAPHRPKEPAWFLATVGVSPDHQGKGLGSAVVLPGVEAAERAGVPAFLETSAPRNLPFYERLGFTVTADVEVPEGPRTWCMTRKPGA

SEQ ID NO: 14658 - protein, 1125 aa, Artificial Sequence
  Synthetic Polypeptide
MTIRLLCYMGFYFLGAGLMACQVQLVESGGGLVQAGDSVTLSCTASGRTFSSYALAWFRQRPGKEREFVAGLRWGGPTNYADSVKDRFTISGDSAKHTMYLQMNSLKPEDTAVYYCGYNPGGWAVPSQYEYDSWGQGTQVTVSSGTGGGGSGGGGSGGGGSEFGVTQTPKFQVLKTGQSMTLQCAQDMNHEYMSWYRQDPGMGLRLIHYSVGAGITDQGEVPNGYNVSRSTTEDFPLRLLSAAPSQTSVYFCASSFQTGASYGYTFGSGTRLTVLEDLKNVFPPEVAVFEPSKAEIAHTQKATLVCLATGFYPDHVELSWWVNGKEVHSGVCTDPQPLKEQPALNDSRYCLSSRLRVSATFWQNPRNHFRCQVQFYGLSENDEWTQDRAKPVTQIVSAEAWGRADCGITSASYHQGVLSATILYEILLGKATLYAVLVSALVLMAMVKRKDSRGRAKRSGSGATNFSLLKQAGDVEENPGPTSMDWIWRILFLVGAATGAHSGPQVQLQESGGGLAQAGGSLRLSCAASGRTFSMGWFRQAPGKEREFVAAITYSGGSPYYASSVRGRFTISRDNAKNTVYLQMNSLKPEDTAVYYCAANPTYGSDWNAENWGQGTQVTVSSGSGGGGSGGGGSGGGGSFEILNVEQSPQSLHVQEGDSTNFTCSFPSSNFYALHWYRWETAKSPEALFVMTLNGDEKKKGRISATLNTKEGYSYLYIKGSQPEDSATYLCARNTGNQFYFGTGTSLTVIPNIQNPDPAVYQLRDSKSSDKSVCLFTDFDSQTNVSQSKDSDVYITDKCVLDMRSMDFKSNSAVAWSNKSDFACANAFNNSIIPEDTFFPSSDVPCDVKLVEKSFETDTNLNFQNLSVIGFRILLLKVAGFNLLMTLRLWSSRAKRSGSGVKQTLNFDLLKLAGDVESNPGPSRGHMTEYKPTVRLATRDDVPRAVRTLAAAFADYPATRHTVDPDRHIERVTELQELFLTRVGLDIGKVWVADDGAAVAVWTTPESVEAGAVFAEIGPRMAELSGSRLAAQQQMEGLLAPHRPKEPAWFLATVGVSPDHQGKGLGSAVVLPGVEAAERAGVPAFLETSAPRNLPFYERLGFTVTADVEVPEGPRTWCMTRKPGA

SEQ ID NO: 14659 - protein, 1125 aa, Artificial Sequence
  Synthetic Polypeptide
MTIRLLCYMGFYFLGAGLMACQVQLVESGGGLVQAGDSVTLSCTASGRTFSSYALAWFRQRPGKEREFVAGLRWGGPTNYADSVKDRFTISGDSAKHTMYLQMNSLKPEDTAVYYCGYNPGGWAVPSQYEYDSWGQGTQVTVSSGTGGGGSGGGGSGGGGSEFGVTQTPKFQVLKTGQSMTLQCAQDMNHEYMSWYRQDPGMGLRLIHYSVGAGITDQGEVPNGYNVSRSTTEDFPLRLLSAAPSQTSVYFCASSFQTGASYGYTFGSGTRLTVLEDLKNVFPPEVAVFEPSEAEISHTQKATLVCLATGFYPDHVELSWWVNGKEVHSGVCTDPQPLKEQPALNDSRYCLSSRLRVSATFWQNPRNHFRCQVQFYGLSENDEWTQDRAKPVTQIVSAEAWGRADCGFTSESYQQGVLSATILYEILLGKATLYAVLVSALVLMAMVKRKDSRGRAKRSGSGATNFSLLKQAGDVEENPGPTSMDWIWRILFLVGAATGAHSGPQVQLQESGGGLAQAGGSLRLSCAASGRTFSMGWFRQAPGKEREFVAAITYSGGSPYYASSVRGRFTISRDNAKNTVYLQMNSLKPEDTAVYYCAANPTYGSDWNAENWGQGTQVTVSSGSGGGGSGGGGSGGGGSFEILNVEQSPQSLHVQEGDSTNFTCSFPSSNFYALHWYRWETAKSPEALFVMTLNGDEKKKGRISATLNTKEGYSYLYIKGSQPEDSATYLCARNTGNQFYFGTGTSLTVIPNIQNPDPAVYQLRDSKSSDKSVCLFTDFDSQTNVSQSKDSDVYITDKCVLDMRSMDFKSNSAVAWSNKSDFACANAFNNSIIPEDTFFPSPESSCDVKLVEKSFETDTNLNFQNLSVIGFRILLLKVAGFNLLMTLRLWSSRAKRSGSGVKQTLNFDLLKLAGDVESNPGPSRGHMTEYKPTVRLATRDDVPRAVRTLAAAFADYPATRHTVDPDRHIERVTELQELFLTRVGLDIGKVWVADDGAAVAVWTTPESVEAGAVFAEIGPRMAELSGSRLAAQQQMEGLLAPHRPKEPAWFLATVGVSPDHQGKGLGSAVVLPGVEAAERAGVPAFLETSAPRNLPFYERLGFTVTADVEVPEGPRTWCMTRKPGA

SEQ ID NO: 14660 - protein, 892 aa, Artificial Sequence
  Synthetic Polypeptide
MTIRLLCYMGFYFLGAGLMACQVQLVESGGGLVQAGDSVTLSCTASGRTFSSYALAWFRQRPGKEREFVAGLRWGGPTNYADSVKDRFTISGDSAKHTMYLQMNSLKPEDTAVYYCGYNPGGWAVPSQYEYDSWGQGTQVTVSSGTGGGGSGGGGSGGGGSEFGVTQTPKFQVLKTGQSMTLQCAQDMNHEYMSWYRQDPGMGLRLIHYSVGAGITDQGEVPNGYNVSRSTTEDFPLRLLSAAPSQTSVYFCASSFQTGASYGYTFGSGTRLTVLEDLKNVFPPEVAVFEPSEAEISHTQKATLVCLATGFYPDHVELSWWVNGKEVHSGVCTDPQPLKEQPALNDSRYCLSSRLRVSATFWQNPRNHFRCQVQFYGLSENDEWTQDRAKPVTQIVSAEAWGRADCGFTSESYQQGVLSATILYEILLGKATLYAVLVSALVLMAMVKRKDSRGRAKRSGSGATNFSLLKQAGDVEENPGPTSMDWIWRILFLVGAATGAHSGPQVQLQESGGGLAQAGGSLRLSCAASGRTFSMGWFRQAPGKEREFVAAITYSGGSPYYASSVRGRFTISRDNAKNTVYLQMNSLKPEDTAVYYCAANPTYGSDWNAENWGQGTQVTVSSGSGGGGSGGGGSGGGGSFEILNVEQSPQSLHVQEGDSTNFTCSFPSSNFYALHWYRWETAKSPEALFVMTLNGDEKKKGRISATLNTKEGYSYLYIKGSQPEDSATYLCARNTGNQFYFGTGTSLTVIPNIQNPDPAVYQLRDSKSSDKSVCLFTDFDSQTNVSQSKDSDVYITDKCVLDMRSMDFKSNSAVAWSNKSDFACANAFNNSIIPEDTFFPSPESSCDVKLVEKSFETDTNLNFQNLSVIGFRILLLKVAGFNLLMTLRLWSS

SEQ ID NO: 14661 - protein, 1117 aa, Artificial Sequence
  Synthetic Polypeptide
MTIRLLCYMGFYFLGAGLMACQVQLVESGGGLVQAGDSVTLSCTASGRTFSSYALAWFRQRPGKEREFVAGLRWGGPTNYADSVKDRFTISGDSAKHTMYLQMNSLKPEDTAVYYCGYNPGGWAVPSQYEYDSWGQGTQVTVSSGTGGGGSGGGGSGGGGSEFGVTQTPKFQVLKTGQSMTLQCAQDMNHEYMSWYRQDPGMGLRLIHYSVGAGITDQGEVPNGYNVSRSTTEDFPLRLLSAAPSQTSVYFCASSFQTGASYGYTFGSGTRLTVLEDLKNVFPPEVAVFEPSEAEISHTQKATLVCLATGFYPDHVELSWWVNGKEVHSGVCTDPQPLKEQPALNDSRYCLSSRLRVSATFWQNPRNHFRCQVQFYGLSENDEWTQDRAKPVTQIVSAEAWGRADCGFTSESYQQGVLSATILYEILLGKATLYAVLVSALVLMAMVKRKDSRGRAKRSGSGATNFSLLKQAGDVEENPGPTSMDWIWRILFLVGAATGAHSGPQVQLQESGGGLAQAGGSLRLSCAASGRTFSMGWFRQAPGKEREFVAAITYSGGSPYYASSVRGRFTISRDNAKNTVYLQMNSLKPEDTAVYYCAANPTYGSDWNAENWGQGTQVTVSSGSGGGGSGGGGSGGGGSFEILNVEQSPQSLHVQEGDSTNFTCSFPSSNFYALHWYRWETAKSPEALFVMTLNGDEKKKGRISATLNTKEGYSYLYIKGSQPEDSATYLCARNTGNQFYFGTGTSLTVIPNIQNPDPAVYQLRDSKSSDKSVCLFTDFDSQTNVSQSKDSDVYITDKCVLDMRSMDFKSNSAVAWSNKSDFACANAFNNSIIPEDTFFPSPESSCDVKLVEKSFETDTNLNFQNLSVIGFRILLLKVAGFNLLMTLRLWSSRAKRSGSGVKQTLNFDLLKLAGDVESNPGPSRGGIHTMATYEVLCEVARKLGTDDREVVLFLLNVFIPQPTLAQLIGALRALKEEGRLTFPLLAECLFRAGRRDLLRDLLHLDPRFLERHLAGTMSYFSPYQLTVLHVDGELCARDIRSLIFLSKDTIGSRSTPQTFLHWVYCMENLDLLGPTDVDALMSMLRSLSRVDLQRQVQTLMGLHLSGPSHSQHYRHTP

SEQ ID NO: 14662 - protein, 896 aa, Artificial Sequence
  Synthetic Polypeptide
MTIRLLCYMGFYFLGAGLMACQVQLVESGGGLVQAGDSVTLSCTASGRTFSSYALAWFRQRPGKEREFVAGLRWGGPTNYADSVKDRFTISGDSAKHTMYLQMNSLKPEDTAVYYCGYNPGGWAVPSQYEYDSWGQGTQVTVSSGTGGGGSGGGGSGGGGSEFGVTQTPKFQVLKTGQSMTLQCAQDMNHEYMSWYRQDPGMGLRLIHYSVGAGITDQGEVPNGYNVSRSTTEDFPLRLLSAAPSQTSVYFCASSFQTGASYGYTFGSGTRLTVLEIQNPDPAVYQLRDSKSSDKSVCLFTDFDSQTNVSQSKDSDVYITDKCVLDMRSMDFKSNSAVAWSNKSDFACANAFNNSIIPEDTFFPSPESSCDVKLVEKSFETDTNLNFQNLSVIGFRILLLKVAGFNLLMTLRLWSSRAKRSGSGVKQTLNFDLLKLAGDVESNPGPTSMDWIWRILFLVGAATGAHSGPQVQLQESGGGLAQAGGSLRLSCAASGRTFSMGWFRQAPGKEREFVAAITYSGGSPYYASSVRGRFTISRDNAKNTVYLQMNSLKPEDTAVYYCAANPTYGSDWNAENWGQGTQVTVSSGSGGGGSGGGGSGGGGSFEILNVEQSPQSLHVQEGDSTNFTCSFPSSNFYALHWYRWETAKSPEALFVMTLNGDEKKKGRISATLNTKEGYSYLYIKGSQPEDSATYLCARNTGNQFYFGTGTSLTVIPNEDLKNVFPPEVAVFEPSEAEISHTQKATLVCLATGFYPDHVELSWWVNGKEVHSGVCTDPQPLKEQPALNDSRYCLSSRLRVSATFWQNPRNHFRCQVQFYGLSENDEWTQDRAKPVTQIVSAEAWGRADCGFTSESYQQGVLSATILYEILLGKATLYAVLVSALVLMAMVKRKDSRG

SEQ ID NO: 14663 - protein, 1118 aa, Artificial Sequence
  Synthetic Polypeptide
MTIRLLCYMGFYFLGAGLMACQVQLVESGGGLVQAGDSVTLSCTASGRTFSSYALAWFRQRPGKEREFVAGLRWGGPTNYADSVKDRFTISGDSAKHTMYLQMNSLKPEDTAVYYCGYNPGGWAVPSQYEYDSWGQGTQVTVSSGTGGGGSGGGGSGGGGSEFGVTQTPKFQVLKTGQSMTLQCAQDMNHEYMSWYRQDPGMGLRLIHYSVGAGITDQGEVPNGYNVSRSTTEDFPLRLLSAAPSQTSVYFCASSFQTGASYGYTFGSGTRLTVLEIQNPDPAVYQLRDSKSSDKSVCLFTDFDSQTNVSQSKDSDVYITDKCVLDMRSMDFKSNSAVAWSNKSDFACANAFNNSIIPEDTFFPSPESSCDVKLVEKSFETDTNLNFQNLSVIGFRILLLKVAGFNLLMTLRLWSSRAKRSGSGVKQTLNFDLLKLAGDVESNPGPTSMDWIWRILFLVGAATGAHSGPQVQLQESGGGLAQAGGSLRLSCAASGRTFSMGWFRQAPGKEREFVAAITYSGGSPYYASSVRGRFTISRDNAKNTVYLQMNSLKPEDTAVYYCAANPTYGSDWNAENWGQGTQVTVSSGSGGGGSGGGGSGGGGSFEILNVEQSPQSLHVQEGDSTNFTCSFPSSNFYALHWYRWETAKSPEALFVMTLNGDEKKKGRISATLNTKEGYSYLYIKGSQPEDSATYLCARNTGNQFYFGTGTSLTVIPNEDLKNVFPPEVAVFEPSEAEISHTQKATLVCLATGFYPDHVELSWWVNGKEVHSGVCTDPQPLKEQPALNDSRYCLSSRLRVSATFWQNPRNHFRCQVQFYGLSENDEWTQDRAKPVTQIVSAEAWGRADCGFTSESYQQGVLSATILYEILLGKATLYAVLVSALVLMAMVKRKDSRGRAKRSGSGATNFSLLKQAGDVEENPGPSRGGIHTMATYEVLCEVARKLGTDDREVVLFLLNVFIPQPTLAQLIGALRALKEEGRLTFPLLAECLFRAGRRDLLRDLLHLDPRFLERHLAGTMSYFSPYQLTVLHVDGELCARDIRSLIFLSKDTIGSRSTPQTFLHWVYCMENLDLLGPTDVDALMSMLRSLSRVDLQRQVQTLMGLHLSGPSHSQHYRHTP

SEQ ID NO: 14664 - protein, 1125 aa, Artificial Sequence
  Synthetic Polypeptide
MTIRLLCYMGFYFLGAGLMACQVQLVESGGGLVQAGDSVTLSCTASGRTFSSYALAWFRQRPGKEREFVAGLRWGGPTNYADSVKDRFTISGDSAKHTMYLQMNSLKPEDTAVYYCGYNPGGWAVPSQYEYDSWGQGTQVTVSSGTGGGGSGGGGSGGGGSEFGVTQTPKFQVLKTGQSMTLQCAQDMNHEYMSWYRQDPGMGLRLIHYSVGAGITDQGEVPNGYNVSRSTTEDFPLRLLSAAPSQTSVYFCASSFQTGASYGYTFGSGTRLTVLEDLKNVFPPEVAVFEPSEAEISHTQKATLVCLATGFYPDHVELSWWVNGKEVHSGVSTDPQPLKEQPALNDSRYCLSSRLRVSATFWQNPRNHFRCQVQFYGLSENDEWTQDRAKPVTQIVSAEAWGRADCGFTSESYQQGVLSATILYEILLGKATLYAVLVSALVLMAMVKRKDSRGRAKRSGSGATNFSLLKQAGDVEENPGPTSMDWIWRILFLVGAATGAHSGPQVQLQESGGGLAQAGGSLRLSCAASGRTFSMGWFRQAPGKEREFVAAITYSGGSPYYASSVRGRFTISRDNAKNTVYLQMNSLKPEDTAVYYCAANPTYGSDWNAENWGQGTQVTVSSGSGGGGSGGGGSGGGGSFEILNVEQSPQSLHVQEGDSTNFTCSFPSSNFYALHWYRWETAKSPEALFVMTLNGDEKKKGRISATLNTKEGYSYLYIKGSQPEDSATYLCARNTGNQFYFGTGTSLTVIPNIQNPDPAVYQLRDSKSSDKSVCLFTDFDSQTNVSQSKDSDVYITDKTVLDMRSMDFKSNSAVAWSNKSDFACANAFNNSIIPEDTFFPSPESSCDVKLVEKSFETDTNLNFQNLSVIGFRILLLKVAGFNLLMTLRLWSSRAKRSGSGVKQTLNFDLLKLAGDVESNPGPSRGHMTEYKPTVRLATRDDVPRAVRTLAAAFADYPATRHTVDPDRHIERVTELQELFLTRVGLDIGKVWVADDGAAVAVWTTPESVEAGAVFAEIGPRMAELSGSRLAAQQQMEGLLAPHRPKEPAWFLATVGVSPDHQGKGLGSAVVLPGVEAAERAGVPAFLETSAPRNLPFYERLGFTVTADVEVPEGPRTWCMTRKPGA

SEQ ID NO: 14665 - protein, 1207 aa, Artificial Sequence
  Synthetic Polypeptide
MTIRLLCYMGFYFLGAGLMACQVQLVESGGGLVQAGDSVTLSCTASGRTFSSYALAWFRQRPGKEREFVAGLRWGGPTNYADSVKDRFTISGDSAKHTMYLQMNSLKPEDTAVYYCGYNPGGWAVPSQYEYDSWGQGTQVTVSSGTGGGGSGGGGSGGGGSEFGVTQTPKFQVLKTGQSMTLQCAQDMNHEYMSWYRQDPGMGLRLIHYSVGAGITDQGEVPNGYNVSRSTTEDFPLRLLSAAPSQTSVYFCASSFQTGASYGYTFGSGTRLTVLEDLKNVFPPEVAVFEPSEAEISHTQKATLVCLATGFYPDHVELSWWVNGKEVHSGVSTDPQPLKEQPALNDSRYCLSSRLRVSATFWQNPRNHFRCQVQFYGLSENDEWTQDRAKPVTQIVSAEAWGRADCGFTSESYQQGVLSATILYEILLGKATLYAVLVSALVLMAMVKRKDSRGRAKRSGSGATNFSLLKQAGDVEENPGPTSMDWIWRILFLVGAATGAHSGPQVQLQESGGGLAQAGGSLRLSCAASGRTFSMGWFRQAPGKEREFVAAITYSGGSPYYASSVRGRFTISRDNAKNTVYLQMNSLKPEDTAVYYCAANPTYGSDWNAENWGQGTQVTVSSGSGGGGSGGGGSGGGGSFEILNVEQSPQSLHVQEGDSTNFTCSFPSSNFYALHWYRWETAKSPEALFVMTLNGDEKKKGRISATLNTKEGYSYLYIKGSQPEDSATYLCARNTGNQFYFGTGTSLTVIPNEQKLISEEDGSGTPFPSLAPPIMLLVDGKQQMVVVCLVLDVAPPGLDSPIWFSAGNGSALDAFTYGPSPATDGTWTNLAHLSLPSEELASWEPLVCHTGPGAEGHSRSTQPMHLSGEASTARTCPQEPLRGTPGGALWLGVLRLLLFKLLLFDLLLTCSCLCDPAGPLPSPATTTRLRALGSHRLHPATETGGREATSSPRPQPRDRRWGDTPPGRKPGSPVRAKRSGSGVKQTLNFDLLKLAGDVESNPGPSRGHMTEYKPTVRLATRDDVPRAVRTLAAAFADYPATRHTVDPDRHIERVTELQELFLTRVGLDIGKVWVADDGAAVAVWTTPESVEAGAVFAEIGPRMAELSGSRLAAQQQMEGLLAPHRPKEPAWFLATVGVSPDHQGKGLGSAVVLPGVEAAERAGVPAFLETSAPRNLPFYERLGFTVTADVEVPEGPRTWCMTRKPGA

SEQ ID NO: 14666 - protein, 1162 aa, Artificial Sequence
  Synthetic Polypeptide
MTIRLLCYMGFYFLGAGLMACQVQLVESGGGLVQAGDSVTLSCTASGRTFSSYALAWFRQRPGKEREFVAGLRWGGPTNYADSVKDRFTISGDSAKHTMYLQMNSLKPEDTAVYYCGYNPGGWAVPSQYEYDSWGQGTQVTVSSGTGGGGSGGGGSGGGGSEFGVTQTPKFQVLKTGQSMTLQCAQDMNHEYMSWYRQDPGMGLRLIHYSVGAGITDQGEVPNGYNVSRSTTEDFPLRLLSAAPSQTSVYFCASSFQTGASYGYTFGSGTRLTVLEGKPIPNPLLGLDSTGSGDKQLDADVSPKPTIFLPSIAETKLQKAGTYLCLLEKFFPDVIKIHWQEKKSNTILGSQEGNTMKTNDTYMKFSWLTVPEKSLDKEHRCIVRHENNKNGVDQEIIFPPIKTDVITMDPKDNCSKDANDTLLLQLTNTSAYYMYLLLLLKSVVYFAIITCCLLRRTAFCCNGEKSRAKRSGSGATNFSLLKQAGDVEENPGPTSMDWIWRILFLVGAATGAHSGPQVQLQESGGGLAQAGGSLRLSCAASGRTFSMGWFRQAPGKEREFVAAITYSGGSPYYASSVRGRFTISRDNAKNTVYLQMNSLKPEDTAVYYCAANPTYGSDWNAENWGQGTQVTVSSGSGGGGSGGGGSGGGGSFEILNVEQSPQSLHVQEGDSTNFTCSFPSSNFYALHWYRWETAKSPEALFVMTLNGDEKKKGRISATLNTKEGYSYLYIKGSQPEDSATYLCARNTGNQFYFGTGTSLTVIPNEQKLISEEDGSGSQPHTKPSVFVMKNGTNVACLVKEFYPKDIRINLVSSKKITEFDPAIVISPSGKYNAVKLGKYEDSNSVTCSVQHDNKTVHSTDFEVKTDSTDHVKPKETENTKQPSKSCHKPKAIVHTEKVNMMSLTVLGLRMLFAKTVAVNFLLTAKLFFLRAKRSGSGVKQTLNFDLLKLAGDVESNPGPSRGHMTEYKPTVRLATRDDVPRAVRTLAAAFADYPATRHTVDPDRHIERVTELQELFLTRVGLDIGKVWVADDGAAVAVWTTPESVEAGAVFAEIGPRMAELSGSRLAAQQQMEGLLAPHRPKEPAWFLATVGVSPDHQGKGLGSAVVLPGVEAAERAGVPAFLETSAPRNLPFYERLGFTVTADVEVPEGPRTWCMTRKPGA

SEQ ID NO: 14667 - protein, 900 aa, Artificial Sequence
  Synthetic Polypeptide
MTIRLLCYMGFYFLGAGLMACQVQLVESGGGLVQAGDSVTLSCTASGRTFSSYALAWFRQRPGKEREFVAGLRWGGPTNYADSVKDRFTISGDSAKHTMYLQMNSLKPEDTAVYYCGYNPGGWAVPSQYEYDSWGQGTQVTVSSGTGGGGSGGGGSGGGGSEFGVTQTPKFQVLKTGQSMTLQCAQDMNHEYMSWYRQDPGMGLRLIHYSVGAGITDQGEVPNGYNVSRSTTEDFPLRLLSAAPSQTSVYFCASSFQTGASYGYTFGSGTRLTVLESQPHTKPSVFVMKNGTNVACLVKEFYPKDIRINLVSSKKITEFDPAIVISPSGKYNAVKLGKYEDSNSVTCSVQHDNKTVHSTDFEVKTDSTDHVKPKETENTKQPSKSCHKPKAIVHTEKVNMMSLTVLGLRMLFAKTVAVNFLLTAKLFFLRAKRSGSGATNFSLLKQAGDVEENPGPTSMDWIWRILFLVGAATGAHSGPQVQLQESGGGLAQAGGSLRLSCAASGRTFSMGWFRQAPGKEREFVAAITYSGGSPYYASSVRGRFTISRDNAKNTVYLQMNSLKPEDTAVYYCAANPTYGSDWNAENWGQGTQVTVSSGSGGGGSGGGGSGGGGSFEILNVEQSPQSLHVQEGDSTNFTCSFPSSNFYALHWYRWETAKSPEALFVMTLNGDEKKKGRISATLNTKEGYSYLYIKGSQPEDSATYLCARNTGNQFYFGTGTSLTVIPNDKQLDADVSPKPTIFLPSIAETKLQKAGTYLCLLEKFFPDVIKIHWQEKKSNTILGSQEGNTMKTNDTYMKFSWLTVPEKSLDKEHRCIVRHENNKNGVDQEIIFPPIKTDVITMDPKDNCSKDANDTLLLQLTNTSAYYMYLLLLLKSVVYFAIITCCLLRRTAFCCNGEKS

SEQ ID NO: 14668 - protein, 1304 aa, Artificial Sequence
  Synthetic Polypeptide
MTIRLLCYMGFYFLGAGLMACQVQLVESGGGLVQAGDSVTLSCTASGRTFSSYALAWFRQRPGKEREFVAGLRWGGPTNYADSVKDRFTISGDSAKHTMYLQMNSLKPEDTAVYYCGYNPGGWAVPSQYEYDSWGQGTQVTVSSGTGGGGSGGGGSGGGGSEFGVTQTPKFQVLKTGQSMTLQCAQDMNHEYMSWYRQDPGMGLRLIHYSVGAGITDQGEVPNGYNVSRSTTEDFPLRLLSAAPSQTSVYFCASSFQTGASYGYTFGSGTRLTVGQPKANPTVTLFPPSSEELQANKATLVCLISDFYPGAVTVAWKADGSPVKAGVETTKPSKQSNNKYAASSYLSLTPEQWKSHRSYSCQVTHEGSTVEKTVAPTECSGSQSFGLLDPKLCYLLDGILFIYGVILTALFLRVKFSRSADAPAYQQGQNQLYNELNLGRREEYDVLDKRRGRDPEMGGKPQRRKNPQEGLYNELQKDKMAEAYSEIGMKGERRRGKGHDGLYQGLSTATKDTYDALHMQALPPRRAKRSGSGATNFSLLKQAGDVEENPGPTSMDWIWRILFLVGAATGAHSGPQVQLQESGGGLAQAGGSLRLSCAASGRTFSMGWFRQAPGKEREFVAAITYSGGSPYYASSVRGRFTISRDNAKNTVYLQMNSLKPEDTAVYYCAANPTYGSDWNAENWGQGTQVTVSSGSGGGGSGGGGSGGGGSFEILNVEQSPQSLHVQEGDSTNFTCSFPSSNFYALHWYRWETAKSPEALFVMTLNGDEKKKGRISATLNTKEGYSYLYIKGSQPEDSATYLCARNTGNQFYFGTGTSLTVIPNASTKGPSVFPLAPSSKSTSGGTAALGCLVKDYFPEPVTVSWNSGALTSGVHTFPAVLQSSGLYSLSSVVTVPSSSLGTQTYICNVNHKPSNTKVDKRVEPKSCGTQSFGLLDPKLCYLLDGILFIYGVILTALFLRVKFSRSADAPAYQQGQNQLYNELNLGRREEYDVLDKRRGRDPEMGGKPQRRKNPQEGLYNELQKDKMAEAYSEIGMKGERRRGKGHDGLYQGLSTATKDTYDALHMQALPPRRAKRSGSGVKQTLNFDLLKLAGDVESNPGPSRGHMTEYKPTVRLATRDDVPRAVRTLAAAFADYPATRHTVDPDRHIERVTELQELFLTRVGLDIGKVWVADDGAAVAVWTTPESVEAGAVFAEIGPRMAELSGSRLAAQQQMEGLLAPHRPKEPAWFLATVGVSPDHQGKGLGSAVVLPGVEAAERAGVPAFLETSAPRNLPFYERLGFTVTADVEVPEGPRTWCMTRKPGA

SEQ ID NO: 14669 - protein, 1088 aa, Artificial Sequence
  Synthetic Polypeptide
MTIRLLCYMGFYFLGAGLMACQVQLVESGGGLVQAGDSVTLSCTASGRTFSSYALAWFRQRPGKEREFVAGLRWGGPTNYADSVKDRFTISGDSAKHTMYLQMNSLKPEDTAVYYCGYNPGGWAVPSQYEYDSWGQGTQVTVSSGTGGGGSGGGGSGGGGSEFGVTQTPKFQVLKTGQSMTLQCAQDMNHEYMSWYRQDPGMGLRLIHYSVGAGITDQGEVPNGYNVSRSTTEDFPLRLLSAAPSQTSVYFCASSFQTGASYGYTFGSGTRLTVLEDLKNVFPPEVAVFEPSEAEISHTQKATLVCLATGFYPDHVELSWWVNGKEVHSGVSTDPQPLKEQPALNDSRYCLSSRLRVSATFWQNPRNHFRCQVQFYGLSENDEWTQDRAKPVTQIVSAEAWGRADCGSQSFGLLDPKLCYLLDGILFIYGVILTALFLRVKFSRSADAPAYQQGQNQLYNELNLGRREEYDVLDKRRGRDPEMGGKPQRRKNPQEGLYNELQKDKMAEAYSEIGMKGERRRGKGHDGLYQGLSTATKDTYDALHMQALPPRRAKRSGSGATNFSLLKQAGDVEENPGPTSMDWIWRILFLVGAATGAHSGPQVQLQESGGGLAQAGGSLRLSCAASGRTFSMGWFRQAPGKEREFVAAITYSGGSPYYASSVRGRFTISRDNAKNTVYLQMNSLKPEDTAVYYCAANPTYGSDWNAENWGQGTQVTVSSGSGGGGSGGGGSGGGGSFEILNVEQSPQSLHVQEGDSTNFTCSFPSSNFYALHWYRWETAKSPEALFVMTLNGDEKKKGRISATLNTKEGYSYLYIKGSQPEDSATYLCARNTGNQFYFGTGTSLTVIPNIQNPDPAVYQLRDSKSSDKSVCLFTDFDSQTNVSQSKDSDVYITDKTVLDMRSMDFKSNSAVAWSNKSDFACANAFNNSIIPEDTFFPSPESSCGTQSFGLLDPKLCYLLDGILFIYGVILTALFLRVKFSRSADAPAYQQGQNQLYNELNLGRREEYDVLDKRRGRDPEMGGKPQRRKNPQEGLYNELQKDKMAEAYSEIGMKGERRRGKGHDGLYQGLSTATKDTYDALHMQALPPR

SEQ ID NO: 14670 - protein, 1088 aa, Artificial Sequence
  Synthetic Polypeptide
MTIRLLCYMGFYFLGAGLMACQVQLVESGGGLVQAGDSVTLSCTASGRTFSSYALAWFRQRPGKEREFVAGLRWGGPTNYADSVKDRFTISGDSAKHTMYLQMNSLKPEDTAVYYCGYNPGGWAVPSQYEYDSWGQGTQVTVSSGTGGGGSGGGGSGGGGSEFGVTQTPKFQVLKTGQSMTLQCAQDMNHEYMSWYRQDPGMGLRLIHYSVGAGITDQGEVPNGYNVSRSTTEDFPLRLLSAAPSQTSVYFCASSFQTGASYGYTFGSGTRLTVLEDLKNVFPPEVAVFEPSKAEIAHTQKATLVCLATGFYPDHVELSWWVNGKEVHSGVCTDPQPLKEQPALNDSRYCLSSRLRVSATFWQNPRNHFRCQVQFYGLSENDEWTQDRAKPVTQIVSAEAWGRADCGSQSFGLLDPKLCYLLDGILFIYGVILTALFLRVKFSRSADAPAYQQGQNQLYNELNLGRREEYDVLDKRRGRDPEMGGKPQRRKNPQEGLYNELQKDKMAEAYSEIGMKGERRRGKGHDGLYQGLSTATKDTYDALHMQALPPRRAKRSGSGATNFSLLKQAGDVEENPGPTSMDWIWRILFLVGAATGAHSGPQVQLQESGGGLAQAGGSLRLSCAASGRTFSMGWFRQAPGKEREFVAAITYSGGSPYYASSVRGRFTISRDNAKNTVYLQMNSLKPEDTAVYYCAANPTYGSDWNAENWGQGTQVTVSSGSGGGGSGGGGSGGGGSFEILNVEQSPQSLHVQEGDSTNFTCSFPSSNFYALHWYRWETAKSPEALFVMTLNGDEKKKGRISATLNTKEGYSYLYIKGSQPEDSATYLCARNTGNQFYFGTGTSLTVIPNIQNPDPAVYQLRDSKSSDKSVCLFTDFDSQTNVSQSKDSDVYITDKCVLDMRSMDFKSNSAVAWSNKSDFACANAFNNSIIPEDTFFPSSDVPCGTQSFGLLDPKLCYLLDGILFIYGVILTALFLRVKFSRSADAPAYQQGQNQLYNELNLGRREEYDVLDKRRGRDPEMGGKPQRRKNPQEGLYNELQKDKMAEAYSEIGMKGERRRGKGHDGLYQGLSTATKDTYDALHMQALPPR

SEQ ID NO: 14671 - protein, 1159 aa, Artificial Sequence
  Synthetic Polypeptide
MTIRLLCYMGFYFLGAGLMACQVQLVESGGGLVQAGDSVTLSCTASGRTFSSYALAWFRQRPGKEREFVAGLRWGGPTNYADSVKDRFTISGDSAKHTMYLQMNSLKPEDTAVYYCGYNPGGWAVPSQYEYDSWGQGTQVTVSSGTGGGGSGGGGSGGGGSEFGVTQTPKFQVLKTGQSMTLQCAQDMNHEYMSWYRQDPGMGLRLIHYSVGAGITDQGEVPNGYNVSRSTTEDFPLRLLSAAPSQTSVYFCASSFQTGASYGYTFGSGTRLTVLEGKPIPNPLLGLDSTGSGEDLKNVFPPEVAVFEPSEAEISHTQKATLVCLATGFYPDHVELSWWVNGKEVHSGVSTDPQPLKEQPALNDSRYCLSSRLRVSATFWQNPRNHFRCQVQFYGLSENDEWTQDRAKPVTQIVSAEAWGRADCGSQSFGLLDPKLCYLLDGILFIYGVILTALFLRVKFSRSADAPAYQQGQNQLYNELNLGRREEYDVLDKRRGRDPEMGGKPQRRKNPQEGLYNELQKDKMAEAYSEIGMKGERRRGKGHDGLYQGLSTATKDTYDALHMQALPPRRAKRSGSGATNFSLLKQAGDVEENPGPTSMDWIWRILFLVGAATGAHSGPQVQLQESGGGLAQAGGSLRLSCAASGRTFSMGWFRQAPGKEREFVAAITYSGGSPYYASSVRGRFTISRDNAKNTVYLQMNSLKPEDTAVYYCAANPTYGSDWNAENWGQGTQVTVSSGSGGGGSGGGGSGGGGSFEILNVEQSPQSLHVQEGDSTNFTCSFPSSNFYALHWYRWETAKSPEALFVMTLNGDEKKKGRISATLNTKEGYSYLYIKGSQPEDSATYLCARNTGNQFYFGTGTSLTVIPNEQKLISEEDGSGIQNPDPAVYQLRDSKSSDKSVCLFTDFDSQTNVSQSKDSDVYITDKTVLDMRSMDFKSNSAVAWSNKSDFACANAFNNSIIPEDTFFPSPESSCGTQSFGLLDPKLCYLLDGILFIYGVILTALFLRSKRSRLLHSDYMNMTPRRPGPTRKHYQPYAPPRDFAAYRSRVKFSRSADAPAYQQGQNQLYNELNLGRREEYDVLDKRRGRDPEMGGKPQRRKNPQEGLYNELQKDKMAEAYSEIGMKGERRRGKGHDGLYQGLSTATKDTYDALHMQALPPR

SEQ ID NO: 14672 - protein, 1200 aa, Artificial Sequence
  Synthetic Polypeptide
MTIRLLCYMGFYFLGAGLMACQVQLVESGGGLVQAGDSVTLSCTASGRTFSSYALAWFRQRPGKEREFVAGLRWGGPTNYADSVKDRFTISGDSAKHTMYLQMNSLKPEDTAVYYCGYNPGGWAVPSQYEYDSWGQGTQVTVSSGTGGGGSGGGGSGGGGSEFGVTQTPKFQVLKTGQSMTLQCAQDMNHEYMSWYRQDPGMGLRLIHYSVGAGITDQGEVPNGYNVSRSTTEDFPLRLLSAAPSQTSVYFCASSFQTGASYGYTFGSGTRLTVLEGKPIPNPLLGLDSTGSGEDLKNVFPPEVAVFEPSEAEISHTQKATLVCLATGFYPDHVELSWWVNGKEVHSGVSTDPQPLKEQPALNDSRYCLSSRLRVSATFWQNPRNHFRCQVQFYGLSENDEWTQDRAKPVTQIVSAEAWGRADCGSQSFGLLDPKLCYLLDGILFIYGVILTALFLRSKRSRLLHSDYMNMTPRRPGPTRKHYQPYAPPRDFAAYRSRVKFSRSADAPAYQQGQNQLYNELNLGRREEYDVLDKRRGRDPEMGGKPQRRKNPQEGLYNELQKDKMAEAYSEIGMKGERRRGKGHDGLYQGLSTATKDTYDALHMQALPPRRAKRSGSGATNFSLLKQAGDVEENPGPTSMDWIWRILFLVGAATGAHSGPQVQLQESGGGLAQAGGSLRLSCAASGRTFSMGWFRQAPGKEREFVAAITYSGGSPYYASSVRGRFTISRDNAKNTVYLQMNSLKPEDTAVYYCAANPTYGSDWNAENWGQGTQVTVSSGSGGGGSGGGGSGGGGSFEILNVEQSPQSLHVQEGDSTNFTCSFPSSNFYALHWYRWETAKSPEALFVMTLNGDEKKKGRISATLNTKEGYSYLYIKGSQPEDSATYLCARNTGNQFYFGTGTSLTVIPNEQKLISEEDGSGIQNPDPAVYQLRDSKSSDKSVCLFTDFDSQTNVSQSKDSDVYITDKTVLDMRSMDFKSNSAVAWSNKSDFACANAFNNSIIPEDTFFPSPESSCGTQSFGLLDPKLCYLLDGILFIYGVILTALFLRSKRSRLLHSDYMNMTPRRPGPTRKHYQPYAPPRDFAAYRSRVKFSRSADAPAYQQGQNQLYNELNLGRREEYDVLDKRRGRDPEMGGKPQRRKNPQEGLYNELQKDKMAEAYSEIGMKGERRRGKGHDGLYQGLSTATKDTYDALHMQALPPR

SEQ ID NO: 14673 - protein, 1161 aa, Artificial Sequence
  Synthetic Polypeptide
MTIRLLCYMGFYFLGAGLMACQVQLVESGGGLVQAGDSVTLSCTASGRTFSSYALAWFRQRPGKEREFVAGLRWGGPTNYADSVKDRFTISGDSAKHTMYLQMNSLKPEDTAVYYCGYNPGGWAVPSQYEYDSWGQGTQVTVSSGTGGGGSGGGGSGGGGSEFGVTQTPKFQVLKTGQSMTLQCAQDMNHEYMSWYRQDPGMGLRLIHYSVGAGITDQGEVPNGYNVSRSTTEDFPLRLLSAAPSQTSVYFCASSFQTGASYGYTFGSGTRLTVLEGKPIPNPLLGLDSTGSGEDLKNVFPPEVAVFEPSEAEISHTQKATLVCLATGFYPDHVELSWWVNGKEVHSGVSTDPQPLKEQPALNDSRYCLSSRLRVSATFWQNPRNHFRCQVQFYGLSENDEWTQDRAKPVTQIVSAEAWGRADCGSQSFGLLDPKLCYLLDGILFIYGVILTALFLRVKFSRSADAPAYQQGQNQLYNELNLGRREEYDVLDKRRGRDPEMGGKPQRRKNPQEGLYNELQKDKMAEAYSEIGMKGERRRGKGHDGLYQGLSTATKDTYDALHMQALPPRRAKRSGSGATNFSLLKQAGDVEENPGPTSMDWIWRILFLVGAATGAHSGPQVQLQESGGGLAQAGGSLRLSCAASGRTFSMGWFRQAPGKEREFVAAITYSGGSPYYASSVRGRFTISRDNAKNTVYLQMNSLKPEDTAVYYCAANPTYGSDWNAENWGQGTQVTVSSGSGGGGSGGGGSGGGGSFEILNVEQSPQSLHVQEGDSTNFTCSFPSSNFYALHWYRWETAKSPEALFVMTLNGDEKKKGRISATLNTKEGYSYLYIKGSQPEDSATYLCARNTGNQFYFGTGTSLTVIPNEQKLISEEDLGSGIQNPDPAVYQLRDSKSSDKSVCLFTDFDSQTNVSQSKDSDVYITDKTVLDMRSMDFKSNSAVAWSNKSDFACANAFNNSIIPEDTFFPSPESSCGTQSFGLLDPKLCYLLDGILFIYGVILTALFLKRGRKKLLYIFKQPFMRPVQTTQEEDGCSCRFPEEEEGGCELRVKFSRSADAPAYQQGQNQLYNELNLGRREEYDVLDKRRGRDPEMGGKPQRRKNPQEGLYNELQKDKMAEAYSEIGMKGERRRGKGHDGLYQGLSTATKDTYDALHMQALPPR

SEQ ID NO: 14674 - protein, 1203 aa, Artificial Sequence
  Synthetic Polypeptide
MTIRLLCYMGFYFLGAGLMACQVQLVESGGGLVQAGDSVTLSCTASGRTFSSYALAWFRQRPGKEREFVAGLRWGGPTNYADSVKDRFTISGDSAKHTMYLQMNSLKPEDTAVYYCGYNPGGWAVPSQYEYDSWGQGTQVTVSSGTGGGGSGGGGSGGGGSEFGVTQTPKFQVLKTGQSMTLQCAQDMNHEYMSWYRQDPGMGLRLIHYSVGAGITDQGEVPNGYNVSRSTTEDFPLRLLSAAPSQTSVYFCASSFQTGASYGYTFGSGTRLTVLEGKPIPNPLLGLDSTGSGEDLKNVFPPEVAVFEPSEAEISHTQKATLVCLATGFYPDHVELSWWVNGKEVHSGVSTDPQPLKEQPALNDSRYCLSSRLRVSATFWQNPRNHFRCQVQFYGLSENDEWTQDRAKPVTQIVSAEAWGRADCGSQSFGLLDPKLCYLLDGILFIYGVILTALFLKRGRKKLLYIFKQPFMRPVQTTQEEDGCSCRFPEEEEGGCELRVKFSRSADAPAYQQGQNQLYNELNLGRREEYDVLDKRRGRDPEMGGKPQRRKNPQEGLYNELQKDKMAEAYSEIGMKGERRRGKGHDGLYQGLSTATKDTYDALHMQALPPRRAKRSGSGATNFSLLKQAGDVEENPGPTSMDWIWRILFLVGAATGAHSGPQVQLQESGGGLAQAGGSLRLSCAASGRTFSMGWFRQAPGKEREFVAAITYSGGSPYYASSVRGRFTISRDNAKNTVYLQMNSLKPEDTAVYYCAANPTYGSDWNAENWGQGTQVTVSSGSGGGGSGGGGSGGGGSFEILNVEQSPQSLHVQEGDSTNFTCSFPSSNFYALHWYRWETAKSPEALFVMTLNGDEKKKGRISATLNTKEGYSYLYIKGSQPEDSATYLCARNTGNQFYFGTGTSLTVIPNEQKLISEEDLGSGIQNPDPAVYQLRDSKSSDKSVCLFTDFDSQTNVSQSKDSDVYITDKTVLDMRSMDFKSNSAVAWSNKSDFACANAFNNSIIPEDTFFPSPESSCGTQSFGLLDPKLCYLLDGILFIYGVILTALFLKRGRKKLLYIFKQPFMRPVQTTQEEDGCSCRFPEEEEGGCELRVKFSRSADAPAYQQGQNQLYNELNLGRREEYDVLDKRRGRDPEMGGKPQRRKNPQEGLYNELQKDKMAEAYSEIGMKGERRRGKGHDGLYQGLSTATKDTYDALHMQALPPR

SEQ ID NO: 14675 - protein, 1093 aa, Artificial Sequence
  Synthetic Polypeptide
MTIRLLCYMGFYFLGAGLMACQVQLVESGGGLVQAGDSVTLSCTASGRTFSSYALAWFRQRPGKEREFVAGLRWGGPTNYADSVKDRFTISGDSAKHTMYLQMNSLKPEDTAVYYCGYNPGGWAVPSQYEYDSWGQGTQVTVSSGTGGGGSGGGGSGGGGSEFGVTQTPKFQVLKTGQSMTLQCAQDMNHEYMSWYRQDPGMGLRLIHYSVGAGITDQGEVPNGYNVSRSTTEDFPLRLLSAAPSQTSVYFCASSFQTGASYGYTFGSGTRLTVLEQSFGLLDPKLCYLLDGILFIYGVILTALFLRVKFSRSADAPAYQQGQNQLYNELNLGRREEYDVLDKRRGRDPEMGGKPQRRKNPQEGLYNELQKDKMAEAYSEIGMKGERRRGKGHDGLYQGLSTATKDTYDALHMQALPPRRAKRSGSGATNFSLLKQAGDVEENPGPTSMDWIWRILFLVGAATGAHSGPQVQLQESGGGLAQAGGSLRLSCAASGRTFSMGWFRQAPGKEREFVAAITYSGGSPYYASSVRGRFTISRDNAKNTVYLQMNSLKPEDTAVYYCAANPTYGSDWNAENWGQGTQVTVSSGSGGGGSGGGGSGGGGSFEILNVEQSPQSLHVQEGDSTNFTCSFPSSNFYALHWYRWETAKSPEALFVMTLNGDEKKKGRISATLNTKEGYSYLYIKGSQPEDSATYLCARNTGNQFYFGTGTSLTVIPNQSFGLLDPKLCYLLDGILFIYGVILTALFLRVKFSRSADAPAYQQGQNQLYNELNLGRREEYDVLDKRRGRDPEMGGKPQRRKNPQEGLYNELQKDKMAEAYSEIGMKGERRRGKGHDGLYQGLSTATKDTYDALHMQALPPRRAKRSGSGVKQTLNFDLLKLAGDVESNPGPSRGHMTEYKPTVRLATRDDVPRAVRTLAAAFADYPATRHTVDPDRHIERVTELQELFLTRVGLDIGKVWVADDGAAVAVWTTPESVEAGAVFAEIGPRMAELSGSRLAAQQQMEGLLAPHRPKEPAWFLATVGVSPDHQGKGLGSAVVLPGVEAAERAGVPAFLETSAPRNLPFYERLGFTVTADVEVPEGPRTWCMTRKPGA

SEQ ID NO: 14676 - protein, 918 aa, Artificial Sequence
  Synthetic Polypeptide
MTIRLLCYMGFYFLGAGLMACQVQLVESGGGLVQAGDSVTLSCTASGRTFSSYALAWFRQRPGKEREFVAGLRWGGPTNYADSVKDRFTISGDSAKHTMYLQMNSLKPEDTAVYYCGYNPGGWAVPSQYEYDSWGQGTQVTVSSGTGGGGSGGGGSGGGGSEFGVTQTPKFQVLKTGQSMTLQCAQDMNHEYMSWYRQDPGMGLRLIHYSVGAGITDQGEVPNGYNVSRSTTEDFPLRLLSAAPSQTSVYFCASSFQTGASYGYTFGSGTRLTVLEGQPKANPTVTLFPPSSEELQANKATLVCLISDFYPGAVTVAWKADGSPVKAGVETTKPSKQSNNKYAASSYLSLTPEQWKSHRSYSCQVTHEGSTVEKTVAPTECSPIKTDVITMDPKDNCSKDANDTLLLQLTNTSAYYMYLLLLLKSVVYFAIITCCLLRRTAFCCNGEKSRAKRSGSGATNFSLLKQAGDVEENPGPTSMDWIWRILFLVGAATGAHSGPQVQLQESGGGLAQAGGSLRLSCAASGRTFSMGWFRQAPGKEREFVAAITYSGGSPYYASSVRGRFTISRDNAKNTVYLQMNSLKPEDTAVYYCAANPTYGSDWNAENWGQGTQVTVSSGSGGGGSGGGGSGGGGSFEILNVEQSPQSLHVQEGDSTNFTCSFPSSNFYALHWYRWETAKSPEALFVMTLNGDEKKKGRISATLNTKEGYSYLYIKGSQPEDSATYLCARNTGNQFYFGTGTSLTVIPNASTKGPSVFPLAPSSKSTSGGTAALGCLVKDYFPEPVTVSWNSGALTSGVHTFPAVLQSSGLYSLSSVVTVPSSSLGTQTYICNVNHKPSNTKVDKRVEPKSCEVKTDSTDHVKPKETENTKQPSKSCHKPKAIVHTEKVNMMSLTVLGLRMLFAKTVAVNFLLTAKLFFL

SEQ ID NO: 14677 - protein, 896 aa, Artificial Sequence
  Synthetic Polypeptide
MTIRLLCYMGFYFLGAGLMACQVQLVESGGGLVQAGDSVTLSCTASGRTFSSYALAWFRQRPGKEREFVAGLRWGGPTNYADSVKDRFTISGDSAKHTMYLQMNSLKPEDTAVYYCGYNPGGWAVPSQYEYDSWGQGTQVTVSSGTGGGGSGGGGSGGGGSEFGVTQTPKFQVLKTGQSMTLQCAQDMNHEYMSWYRQDPGMGLRLIHYSVGAGITDQGEVPNGYNVSRSTTEDFPLRLLSAAPSQTSVYFCASSFQTGASYGYTFGSGTRLTVLEGQPKANPTVTLFPPSSEELQANKATLVCLISDFYPGAVTVAWKADGSPVKAGVETTKPSKQSNNKYAASSYLSLTPEQWKSHRSYSCQVTHEGSTVEKTVAPTECSGRADCGITSASYHQGVLSATILYEILLGKATLYAVLVSALVLMAMVKRKDSRGRAKRSGSGATNFSLLKQAGDVEENPGPTSMDWIWRILFLVGAATGAHSGPQVQLQESGGGLAQAGGSLRLSCAASGRTFSMGWFRQAPGKEREFVAAITYSGGSPYYASSVRGRFTISRDNAKNTVYLQMNSLKPEDTAVYYCAANPTYGSDWNAENWGQGTQVTVSSGSGGGGSGGGGSGGGGSFEILNVEQSPQSLHVQEGDSTNFTCSFPSSNFYALHWYRWETAKSPEALFVMTLNGDEKKKGRISATLNTKEGYSYLYIKGSQPEDSATYLCARNTGNQFYFGTGTSLTVIPNASTKGPSVFPLAPSSKSTSGGTAALGCLVKDYFPEPVTVSWNSGALTSGVHTFPAVLQSSGLYSLSSVVTVPSSSLGTQTYICNVNHKPSNTKVDKRVEPKSCIPEDTFFPSSDVPCDVKLVEKSFETDTNLNFQNLSVIGFRILLLKVAGFNLLMTLRLWSS

SEQ ID NO: 14678 - protein, 896 aa, Artificial Sequence
  Synthetic Polypeptide
MTIRLLCYMGFYFLGAGLMACQVQLVESGGGLVQAGDSVTLSCTASGRTFSSYALAWFRQRPGKEREFVAGLRWGGPTNYADSVKDRFTISGDSAKHTMYLQMNSLKPEDTAVYYCGYNPGGWAVPSQYEYDSWGQGTQVTVSSGTGGGGSGGGGSGGGGSEFGVTQTPKFQVLKTGQSMTLQCAQDMNHEYMSWYRQDPGMGLRLIHYSVGAGITDQGEVPNGYNVSRSTTEDFPLRLLSAAPSQTSVYFCASSFQTGASYGYTFGSGTRLTVLEGQPKANPTVTLFPPSSEELQANKATLVCLISDFYPGAVTVAWKADGSPVKAGVETTKPSKQSNNKYAASSYLSLTPEQWKSHRSYSCQVTHEGSTVEKTVAPTECSGRADCGFTSESYQQGVLSATILYEILLGKATLYAVLVSALVLMAMVKRKDSRGRAKRSGSGATNFSLLKQAGDVEENPGPTSMDWIWRILFLVGAATGAHSGPQVQLQESGGGLAQAGGSLRLSCAASGRTFSMGWFRQAPGKEREFVAAITYSGGSPYYASSVRGRFTISRDNAKNTVYLQMNSLKPEDTAVYYCAANPTYGSDWNAENWGQGTQVTVSSGSGGGGSGGGGSGGGGSFEILNVEQSPQSLHVQEGDSTNFTCSFPSSNFYALHWYRWETAKSPEALFVMTLNGDEKKKGRISATLNTKEGYSYLYIKGSQPEDSATYLCARNTGNQFYFGTGTSLTVIPNASTKGPSVFPLAPSSKSTSGGTAALGCLVKDYFPEPVTVSWNSGALTSGVHTFPAVLQSSGLYSLSSVVTVPSSSLGTQTYICNVNHKPSNTKVDKRVEPKSCIPEDTFFPSPESSCDVKLVEKSFETDTNLNFQNLSVIGFRILLLKVAGFNLLMTLRLWSS

SEQ ID NO: 14679 - protein, 635 aa, Artificial Sequence
  Synthetic Polypeptide
MDWIWRILFLVGAATGAHSGPQVQLQESGGGLAQAGGSLRLSCAASGRTFSMGWFRQAPGKEREFVAAITYSGGSPYYASSVRGRFTISRDNAKNTVYLQMNSLKPEDTAVYYCAANPTYGSDWNAENWGQGTQVTVSSGSGGGGSGGGGSGGGGSFEQEVTQIPAALSVPEGENLVLNCSFTDSAIYNLQWFRQDPGKGLTSLLLIQSSQREQTSGRLNASLDKSSGRSTLYIAASQPGDSATYLCAVRPTSGGSYIPTFGRGTSLIVHPYGGGGSGGGGSGGGGSNAGVTQTPKFQVLKTGQSMTLQCAQDMNHEYMSWYRQDPGMGLRLIHYSVAIQTTDQGEVPNGYNVSRSTIEDFPLRLLSAAPSQTSVYFCASSYLGNTGELFFGEGSRLTVEQKLISEEDLAKPTTTPAPRPPTPAPTIASQPLSLRPEACRPAAGGAVHTRGLDFACDIYIWAPLAGTCGVLLLSLVITLYCKRGRKKLLYIFKQPFMRPVQTTQEEDGCSCRFPEEEEGGCELRVKFSRSADAPAYQQGQNQLYNELNLGRREEYDVLDKRRGRDPEMGGKPRRKNPQEGLYNELQKDKMAEAYSEIGMKGERRRGKGHDGLYQGLSTATKDTYDALHMQALPPR

SEQ ID NO: 14680 - protein, 988 aa, Artificial Sequence
  Synthetic Polypeptide
MALPVTALLLPLALLLHAARPNAGVTQTPKFQVLKTGQSMTLQCAQDMNHEYMSWYRQDPGMGLRLIHYSVAIQTTDQGEVPNGYNVSRSTIEDFPLRLLSAAPSQTSVYFCASSYLGNTGELFFGEGSRLTVLEIQNPDPAVYQLRDSKSSDKSVCLFTDFDSQTNVSQSKDSDVYITDKCVLDMRSMDFKSNSAVAWSNKSDFACANAFNNSIIPEDTFFPSSDVPCDVKLVEKSFETDTNLNFQNLSVIGFRILLLKVAGFNLLMTLRLWSSRAKRSGSGVKQTLNFDLLKLAGDVESNPGPTSMDWIWRILFLVGAATGAHSGPQVQLQESGGGLAQAGGSLRLSCAASGRTFSMGWFRQAPGKEREFVAAITYSGGSPYYASSVRGRFTISRDNAKNTVYLQMNSLKPEDTAVYYCAANPTYGSDWNAENWGQGTQVTVSSGSGGGGSGGGGSGGGGSFEQEVTQIPAALSVPEGENLVLNCSFTDSAIYNLQWFRQDPGKGLTSLLLIQSSQREQTSGRLNASLDKSSGRSTLYIAASQPGDSATYLCAVRPTSGGSYIPTFGRGTSLIVHPYEDLKNVFPPEVAVFEPSKAEIAHTQKATLVCLATGFYPDHVELSWWVNGKEVHSGVCTDPQPLKEQPALNDSRYCLSSRLRVSATFWQNPRNHFRCQVQFYGLSENDEWTQDRAKPVTQIVSAEAWGRADCGITSASYHQGVLSATILYEILLGKATLYAVLVSALVLMAMVKRKDSRGRAKRSGSGATNFSLLKQAGDVEENPGPSRGHMTEYKPTVRLATRDDVPRAVRTLAAAFADYPATRHTVDPDRHIERVTELQELFLTRVGLDIGKVWVADDGAAVAVWTTPESVEAGAVFAEIGPRMAELSGSRLAAQQQMEGLLAPHRPKEPAWFLATVGVSPDHQGKGLGSAVVLPGVEAAERAGVPAFLETSAPRNLPFYERLGFTVTADVEVPEGPRTWCMTRKPGA

SEQ ID NO: 14681 - protein, 987 aa, Artificial Sequence
  Synthetic Polypeptide
MALPVTALLLPLALLLHAARPNAGVTQTPKFQVLKTGQSMTLQCAQDMNHEYMSWYRQDPGMGLRLIHYSVAIQTTDQGEVPNGYNVSRSTIEDFPLRLLSAAPSQTSVYFCASSYLGNTGELFFGEGSRLTVLEDLKNVFPPEVAVFEPSKAEIAHTQKATLVCLATGFYPDHVELSWWVNGKEVHSGVCTDPQPLKEQPALNDSRYCLSSRLRVSATFWQNPRNHFRCQVQFYGLSENDEWTQDRAKPVTQIVSAEAWGRADCGITSASYHQGVLSATILYEILLGKATLYAVLVSALVLMAMVKRKDSRGRAKRSGSGATNFSLLKQAGDVEENPGPTSMDWIWRILFLVGAATGAHSGPQVQLQESGGGLAQAGGSLRLSCAASGRTFSMGWFRQAPGKEREFVAAITYSGGSPYYASSVRGRFTISRDNAKNTVYLQMNSLKPEDTAVYYCAANPTYGSDWNAENWGQGTQVTVSSGSGGGGSGGGGSGGGGSFEQEVTQIPAALSVPEGENLVLNCSFTDSAIYNLQWFRQDPGKGLTSLLLIQSSQREQTSGRLNASLDKSSGRSTLYIAASQPGDSATYLCAVRPTSGGSYIPTFGRGTSLIVHPYIQNPDPAVYQLRDSKSSDKSVCLFTDFDSQTNVSQSKDSDVYITDKCVLDMRSMDFKSNSAVAWSNKSDFACANAFNNSIIPEDTFFPSSDVPCDVKLVEKSFETDTNLNFQNLSVIGFRILLLKVAGFNLLMTLRLWSSRAKRSGSGVKQTLNFDLLKLAGDVESNPGPSRGHMTEYKPTVRLATRDDVPRAVRTLAAAFADYPATRHTVDPDRHIERVTELQELFLTRVGLDIGKVWVADDGAAVAVWTTPESVEAGAVFAEIGPRMAELSGSRLAAQQQMEGLLAPHRPKEPAWFLATVGVSPDHQGKGLGSAVVLPGVEAAERAGVPAFLETSAPRNLPFYERLGFTVTADVEVPEGPRTWCMTRKPGA

SEQ ID NO: 14682 - protein, 987 aa, Artificial Sequence
  Synthetic Polypeptide
MALPVTALLLPLALLLHAARPNAGVTQTPKFQVLKTGQSMTLQCAQDMNHEYMSWYRQDPGMGLRLIHYSVAIQTTDQGEVPNGYNVSRSTIEDFPLRLLSAAPSQTSVYFCASSYLGNTGELFFGEGSRLTVLEDLKNVFPPEVAVFEPSEAEISHTQKATLVCLATGFYPDHVELSWWVNGKEVHSGVCTDPQPLKEQPALNDSRYCLSSRLRVSATFWQNPRNHFRCQVQFYGLSENDEWTQDRAKPVTQIVSAEAWGRADCGFTSESYQQGVLSATILYEILLGKATLYAVLVSALVLMAMVKRKDSRGRAKRSGSGATNFSLLKQAGDVEENPGPTSMDWIWRILFLVGAATGAHSGPQVQLQESGGGLAQAGGSLRLSCAASGRTFSMGWFRQAPGKEREFVAAITYSGGSPYYASSVRGRFTISRDNAKNTVYLQMNSLKPEDTAVYYCAANPTYGSDWNAENWGQGTQVTVSSGSGGGGSGGGGSGGGGSFEQEVTQIPAALSVPEGENLVLNCSFTDSAIYNLQWFRQDPGKGLTSLLLIQSSQREQTSGRLNASLDKSSGRSTLYIAASQPGDSATYLCAVRPTSGGSYIPTFGRGTSLIVHPYIQNPDPAVYQLRDSKSSDKSVCLFTDFDSQTNVSQSKDSDVYITDKCVLDMRSMDFKSNSAVAWSNKSDFACANAFNNSIIPEDTFFPSPESSCDVKLVEKSFETDTNLNFQNLSVIGFRILLLKVAGFNLLMTLRLWSSRAKRSGSGVKQTLNFDLLKLAGDVESNPGPSRGHMTEYKPTVRLATRDDVPRAVRTLAAAFADYPATRHTVDPDRHIERVTELQELFLTRVGLDIGKVWVADDGAAVAVWTTPESVEAGAVFAEIGPRMAELSGSRLAAQQQMEGLLAPHRPKEPAWFLATVGVSPDHQGKGLGSAVVLPGVEAAERAGVPAFLETSAPRNLPFYERLGFTVTADVEVPEGPRTWCMTRKPGA

SEQ ID NO: 14683 - protein, 754 aa, Artificial Sequence
  Synthetic Polypeptide
MALPVTALLLPLALLLHAARPNAGVTQTPKFQVLKTGQSMTLQCAQDMNHEYMSWYRQDPGMGLRLIHYSVAIQTTDQGEVPNGYNVSRSTIEDFPLRLLSAAPSQTSVYFCASSYLGNTGELFFGEGSRLTVLEDLKNVFPPEVAVFEPSEAEISHTQKATLVCLATGFYPDHVELSWWVNGKEVHSGVCTDPQPLKEQPALNDSRYCLSSRLRVSATFWQNPRNHFRCQVQFYGLSENDEWTQDRAKPVTQIVSAEAWGRADCGFTSESYQQGVLSATILYEILLGKATLYAVLVSALVLMAMVKRKDSRGRAKRSGSGATNFSLLKQAGDVEENPGPTSMDWIWRILFLVGAATGAHSGPQVQLQESGGGLAQAGGSLRLSCAASGRTFSMGWFRQAPGKEREFVAAITYSGGSPYYASSVRGRFTISRDNAKNTVYLQMNSLKPEDTAVYYCAANPTYGSDWNAENWGQGTQVTVSSGSGGGGSGGGGSGGGGSFEQEVTQIPAALSVPEGENLVLNCSFTDSAIYNLQWFRQDPGKGLTSLLLIQSSQREQTSGRLNASLDKSSGRSTLYIAASQPGDSATYLCAVRPTSGGSYIPTFGRGTSLIVHPYIQNPDPAVYQLRDSKSSDKSVCLFTDFDSQTNVSQSKDSDVYITDKCVLDMRSMDFKSNSAVAWSNKSDFACANAFNNSIIPEDTFFPSPESSCDVKLVEKSFETDTNLNFQNLSVIGFRILLLKVAGFNLLMTLRLWSS

SEQ ID NO: 14684 - protein, 979 aa, Artificial Sequence
  Synthetic Polypeptide
MALPVTALLLPLALLLHAARPNAGVTQTPKFQVLKTGQSMTLQCAQDMNHEYMSWYRQDPGMGLRLIHYSVAIQTTDQGEVPNGYNVSRSTIEDFPLRLLSAAPSQTSVYFCASSYLGNTGELFFGEGSRLTVLEDLKNVFPPEVAVFEPSEAEISHTQKATLVCLATGFYPDHVELSWWVNGKEVHSGVCTDPQPLKEQPALNDSRYCLSSRLRVSATFWQNPRNHFRCQVQFYGLSENDEWTQDRAKPVTQIVSAEAWGRADCGFTSESYQQGVLSATILYEILLGKATLYAVLVSALVLMAMVKRKDSRGRAKRSGSGATNFSLLKQAGDVEENPGPTSMDWIWRILFLVGAATGAHSGPQVQLQESGGGLAQAGGSLRLSCAASGRTFSMGWFRQAPGKEREFVAAITYSGGSPYYASSVRGRFTISRDNAKNTVYLQMNSLKPEDTAVYYCAANPTYGSDWNAENWGQGTQVTVSSGSGGGGSGGGGSGGGGSFEQEVTQIPAALSVPEGENLVLNCSFTDSAIYNLQWFRQDPGKGLTSLLLIQSSQREQTSGRLNASLDKSSGRSTLYIAASQPGDSATYLCAVRPTSGGSYIPTFGRGTSLIVHPYIQNPDPAVYQLRDSKSSDKSVCLFTDFDSQTNVSQSKDSDVYITDKCVLDMRSMDFKSNSAVAWSNKSDFACANAFNNSIIPEDTFFPSPESSCDVKLVEKSFETDTNLNFQNLSVIGFRILLLKVAGFNLLMTLRLWSSRAKRSGSGVKQTLNFDLLKLAGDVESNPGPSRGGIHTMATYEVLCEVARKLGTDDREVVLFLLNVFIPQPTLAQLIGALRALKEEGRLTFPLLAECLFRAGRRDLLRDLLHLDPRFLERHLAGTMSYFSPYQLTVLHVDGELCARDIRSLIFLSKDTIGSRSTPQTFLHWVYCMENLDLLGPTDVDALMSMLRSLSRVDLQRQVQTLMGLHLSGPSHSQHYRHTP

SEQ ID NO: 14685 - protein, 758 aa, Artificial Sequence
  Synthetic Polypeptide
MALPVTALLLPLALLLHAARPNAGVTQTPKFQVLKTGQSMTLQCAQDMNHEYMSWYRQDPGMGLRLIHYSVAIQTTDQGEVPNGYNVSRSTIEDFPLRLLSAAPSQTSVYFCASSYLGNTGELFFGEGSRLTVLEIQNPDPAVYQLRDSKSSDKSVCLFTDFDSQTNVSQSKDSDVYITDKCVLDMRSMDFKSNSAVAWSNKSDFACANAFNNSIIPEDTFFPSPESSCDVKLVEKSFETDTNLNFQNLSVIGFRILLLKVAGFNLLMTLRLWSSRAKRSGSGVKQTLNFDLLKLAGDVESNPGPTSMDWIWRILFLVGAATGAHSGPQVQLQESGGGLAQAGGSLRLSCAASGRTFSMGWFRQAPGKEREFVAAITYSGGSPYYASSVRGRFTISRDNAKNTVYLQMNSLKPEDTAVYYCAANPTYGSDWNAENWGQGTQVTVSSGSGGGGSGGGGSGGGGSFEQEVTQIPAALSVPEGENLVLNCSFTDSAIYNLQWFRQDPGKGLTSLLLIQSSQREQTSGRLNASLDKSSGRSTLYIAASQPGDSATYLCAVRPTSGGSYIPTFGRGTSLIVHPYEDLKNVFPPEVAVFEPSEAEISHTQKATLVCLATGFYPDHVELSWWVNGKEVHSGVCTDPQPLKEQPALNDSRYCLSSRLRVSATFWQNPRNHFRCQVQFYGLSENDEWTQDRAKPVTQIVSAEAWGRADCGFTSESYQQGVLSATILYEILLGKATLYAVLVSALVLMAMVKRKDSRG

SEQ ID NO: 14686 - protein, 980 aa, Artificial Sequence
  Synthetic Polypeptide
MALPVTALLLPLALLLHAARPNAGVTQTPKFQVLKTGQSMTLQCAQDMNHEYMSWYRQDPGMGLRLIHYSVAIQTTDQGEVPNGYNVSRSTIEDFPLRLLSAAPSQTSVYFCASSYLGNTGELFFGEGSRLTVLEIQNPDPAVYQLRDSKSSDKSVCLFTDFDSQTNVSQSKDSDVYITDKCVLDMRSMDFKSNSAVAWSNKSDFACANAFNNSIIPEDTFFPSPESSCDVKLVEKSFETDTNLNFQNLSVIGFRILLLKVAGFNLLMTLRLWSSRAKRSGSGVKQTLNFDLLKLAGDVESNPGPTSMDWIWRILFLVGAATGAHSGPQVQLQESGGGLAQAGGSLRLSCAASGRTFSMGWFRQAPGKEREFVAAITYSGGSPYYASSVRGRFTISRDNAKNTVYLQMNSLKPEDTAVYYCAANPTYGSDWNAENWGQGTQVTVSSGSGGGGSGGGGSGGGGSFEQEVTQIPAALSVPEGENLVLNCSFTDSAIYNLQWFRQDPGKGLTSLLLIQSSQREQTSGRLNASLDKSSGRSTLYIAASQPGDSATYLCAVRPTSGGSYIPTFGRGTSLIVHPYEDLKNVFPPEVAVFEPSEAEISHTQKATLVCLATGFYPDHVELSWWVNGKEVHSGVCTDPQPLKEQPALNDSRYCLSSRLRVSATFWQNPRNHFRCQVQFYGLSENDEWTQDRAKPVTQIVSAEAWGRADCGFTSESYQQGVLSATILYEILLGKATLYAVLVSALVLMAMVKRKDSRGRAKRSGSGATNFSLLKQAGDVEENPGPSRGGIHTMATYEVLCEVARKLGTDDREVVLFLLNVFIPQPTLAQLIGALRALKEEGRLTFPLLAECLFRAGRRDLLRDLLHLDPRFLERHLAGTMSYFSPYQLTVLHVDGELCARDIRSLIFLSKDTIGSRSTPQTFLHWVYCMENLDLLGPTDVDALMSMLRSLSRVDLQRQVQTLMGLHLSGPSHSQHYRHTP

SEQ ID NO: 14687 - protein, 987 aa, Artificial Sequence
  Synthetic Polypeptide
MALPVTALLLPLALLLHAARPNAGVTQTPKFQVLKTGQSMTLQCAQDMNHEYMSWYRQDPGMGLRLIHYSVAIQTTDQGEVPNGYNVSRSTIEDFPLRLLSAAPSQTSVYFCASSYLGNTGELFFGEGSRLTVLEDLKNVFPPEVAVFEPSEAEISHTQKATLVCLATGFYPDHVELSWWVNGKEVHSGVSTDPQPLKEQPALNDSRYCLSSRLRVSATFWQNPRNHFRCQVQFYGLSENDEWTQDRAKPVTQIVSAEAWGRADCGFTSESYQQGVLSATILYEILLGKATLYAVLVSALVLMAMVKRKDSRGRAKRSGSGATNFSLLKQAGDVEENPGPTSMDWIWRILFLVGAATGAHSGPQVQLQESGGGLAQAGGSLRLSCAASGRTFSMGWFRQAPGKEREFVAAITYSGGSPYYASSVRGRFTISRDNAKNTVYLQMNSLKPEDTAVYYCAANPTYGSDWNAENWGQGTQVTVSSGSGGGGSGGGGSGGGGSFEQEVTQIPAALSVPEGENLVLNCSFTDSAIYNLQWFRQDPGKGLTSLLLIQSSQREQTSGRLNASLDKSSGRSTLYIAASQPGDSATYLCAVRPTSGGSYIPTFGRGTSLIVHPYIQNPDPAVYQLRDSKSSDKSVCLFTDFDSQTNVSQSKDSDVYITDKTVLDMRSMDFKSNSAVAWSNKSDFACANAFNNSIIPEDTFFPSPESSCDVKLVEKSFETDTNLNFQNLSVIGFRILLLKVAGFNLLMTLRLWSSRAKRSGSGVKQTLNFDLLKLAGDVESNPGPSRGHMTEYKPTVRLATRDDVPRAVRTLAAAFADYPATRHTVDPDRHIERVTELQELFLTRVGLDIGKVWVADDGAAVAVWTTPESVEAGAVFAEIGPRMAELSGSRLAAQQQMEGLLAPHRPKEPAWFLATVGVSPDHQGKGLGSAVVLPGVEAAERAGVPAFLETSAPRNLPFYERLGFTVTADVEVPEGPRTWCMTRKPGA

SEQ ID NO: 14688 - protein, 1069 aa, Artificial Sequence
  Synthetic Polypeptide
MALPVTALLLPLALLLHAARPNAGVTQTPKFQVLKTGQSMTLQCAQDMNHEYMSWYRQDPGMGLRLIHYSVAIQTTDQGEVPNGYNVSRSTIEDFPLRLLSAAPSQTSVYFCASSYLGNTGELFFGEGSRLTVLEDLKNVFPPEVAVFEPSEAEISHTQKATLVCLATGFYPDHVELSWWVNGKEVHSGVSTDPQPLKEQPALNDSRYCLSSRLRVSATFWQNPRNHFRCQVQFYGLSENDEWTQDRAKPVTQIVSAEAWGRADCGFTSESYQQGVLSATILYEILLGKATLYAVLVSALVLMAMVKRKDSRGRAKRSGSGATNFSLLKQAGDVEENPGPTSMDWIWRILFLVGAATGAHSGPQVQLQESGGGLAQAGGSLRLSCAASGRTFSMGWFRQAPGKEREFVAAITYSGGSPYYASSVRGRFTISRDNAKNTVYLQMNSLKPEDTAVYYCAANPTYGSDWNAENWGQGTQVTVSSGSGGGGSGGGGSGGGGSFEQEVTQIPAALSVPEGENLVLNCSFTDSAIYNLQWFRQDPGKGLTSLLLIQSSQREQTSGRLNASLDKSSGRSTLYIAASQPGDSATYLCAVRPTSGGSYIPTFGRGTSLIVHPYEQKLISEEDGSGTPFPSLAPPIMLLVDGKQQMVVVCLVLDVAPPGLDSPIWFSAGNGSALDAFTYGPSPATDGTWTNLAHLSLPSEELASWEPLVCHTGPGAEGHSRSTQPMHLSGEASTARTCPQEPLRGTPGGALWLGVLRLLLFKLLLFDLLLTCSCLCDPAGPLPSPATTTRLRALGSHRLHPATETGGREATSSPRPQPRDRRWGDTPPGRKPGSPVRAKRSGSGVKQTLNFDLLKLAGDVESNPGPSRGHMTEYKPTVRLATRDDVPRAVRTLAAAFADYPATRHTVDPDRHIERVTELQELFLTRVGLDIGKVWVADDGAAVAVWTTPESVEAGAVFAEIGPRMAELSGSRLAAQQQMEGLLAPHRPKEPAWFLATVGVSPDHQGKGLGSAVVLPGVEAAERAGVPAFLETSAPRNLPFYERLGFTVTADVEVPEGPRTWCMTRKPGA

SEQ ID NO: 14689 - protein, 1024 aa, Artificial Sequence
  Synthetic Polypeptide
MALPVTALLLPLALLLHAARPNAGVTQTPKFQVLKTGQSMTLQCAQDMNHEYMSWYRQDPGMGLRLIHYSVAIQTTDQGEVPNGYNVSRSTIEDFPLRLLSAAPSQTSVYFCASSYLGNTGELFFGEGSRLTVLEGKPIPNPLLGLDSTGSGDKQLDADVSPKPTIFLPSIAETKLQKAGTYLCLLEKFFPDVIKIHWQEKKSNTILGSQEGNTMKTNDTYMKFSWLTVPEKSLDKEHRCIVRHENNKNGVDQEIIFPPIKTDVITMDPKDNCSKDANDTLLLQLTNTSAYYMYLLLLLKSVVYFAIITCCLLRRTAFCCNGEKSRAKRSGSGATNFSLLKQAGDVEENPGPTSMDWIWRILFLVGAATGAHSGPQVQLQESGGGLAQAGGSLRLSCAASGRTFSMGWFRQAPGKEREFVAAITYSGGSPYYASSVRGRFTISRDNAKNTVYLQMNSLKPEDTAVYYCAANPTYGSDWNAENWGQGTQVTVSSGSGGGGSGGGGSGGGGSFEQEVTQIPAALSVPEGENLVLNCSFTDSAIYNLQWFRQDPGKGLTSLLLIQSSQREQTSGRLNASLDKSSGRSTLYIAASQPGDSATYLCAVRPTSGGSYIPTFGRGTSLIVHPYEQKLISEEDGSGSQPHTKPSVFVMKNGTNVACLVKEFYPKDIRINLVSSKKITEFDPAIVISPSGKYNAVKLGKYEDSNSVTCSVQHDNKTVHSTDFEVKTDSTDHVKPKETENTKQPSKSCHKPKAIVHTEKVNMMSLTVLGLRMLFAKTVAVNFLLTAKLFFLRAKRSGSGVKQTLNFDLLKLAGDVESNPGPSRGHMTEYKPTVRLATRDDVPRAVRTLAAAFADYPATRHTVDPDRHIERVTELQELFLTRVGLDIGKVWVADDGAAVAVWTTPESVEAGAVFAEIGPRMAELSGSRLAAQQQMEGLLAPHRPKEPAWFLATVGVSPDHQGKGLGSAVVLPGVEAAERAGVPAFLETSAPRNLPFYERLGFTVTADVEVPEGPRTWCMTRKPGA

SEQ ID NO: 14690 - protein, 762 aa, Artificial Sequence
  Synthetic Polypeptide
MALPVTALLLPLALLLHAARPNAGVTQTPKFQVLKTGQSMTLQCAQDMNHEYMSWYRQDPGMGLRLIHYSVAIQTTDQGEVPNGYNVSRSTIEDFPLRLLSAAPSQTSVYFCASSYLGNTGELFFGEGSRLTVLESQPHTKPSVFVMKNGTNVACLVKEFYPKDIRINLVSSKKITEFDPAIVISPSGKYNAVKLGKYEDSNSVTCSVQHDNKTVHSTDFEVKTDSTDHVKPKETENTKQPSKSCHKPKAIVHTEKVNMMSLTVLGLRMLFAKTVAVNFLLTAKLFFLRAKRSGSGATNFSLLKQAGDVEENPGPTSMDWIWRILFLVGAATGAHSGPQVQLQESGGGLAQAGGSLRLSCAASGRTFSMGWFRQAPGKEREFVAAITYSGGSPYYASSVRGRFTISRDNAKNTVYLQMNSLKPEDTAVYYCAANPTYGSDWNAENWGQGTQVTVSSGSGGGGSGGGGSGGGGSFEQEVTQIPAALSVPEGENLVLNCSFTDSAIYNLQWFRQDPGKGLTSLLLIQSSQREQTSGRLNASLDKSSGRSTLYIAASQPGDSATYLCAVRPTSGGSYIPTFGRGTSLIVHPYDKQLDADVSPKPTIFLPSIAETKLQKAGTYLCLLEKFFPDVIKIHWQEKKSNTILGSQEGNTMKTNDTYMKFSWLTVPEKSLDKEHRCIVRHENNKNGVDQEIIFPPIKTDVITMDPKDNCSKDANDTLLLQLTNTSAYYMYLLLLLKSVVYFAIITCCLLRRTAFCCNGEKS

SEQ ID NO: 14691 - protein, 1166 aa, Artificial Sequence
  Synthetic Polypeptide
MALPVTALLLPLALLLHAARPNAGVTQTPKFQVLKTGQSMTLQCAQDMNHEYMSWYRQDPGMGLRLIHYSVAIQTTDQGEVPNGYNVSRSTIEDFPLRLLSAAPSQTSVYFCASSYLGNTGELFFGEGSRLTVGQPKANPTVTLFPPSSEELQANKATLVCLISDFYPGAVTVAWKADGSPVKAGVETTKPSKQSNNKYAASSYLSLTPEQWKSHRSYSCQVTHEGSTVEKTVAPTECSGSQSFGLLDPKLCYLLDGILFIYGVILTALFLRVKFSRSADAPAYQQGQNQLYNELNLGRREEYDVLDKRRGRDPEMGGKPQRRKNPQEGLYNELQKDKMAEAYSEIGMKGERRRGKGHDGLYQGLSTATKDTYDALHMQALPPRRAKRSGSGATNFSLLKQAGDVEENPGPTSMDWIWRILFLVGAATGAHSGPQVQLQESGGGLAQAGGSLRLSCAASGRTFSMGWFRQAPGKEREFVAAITYSGGSPYYASSVRGRFTISRDNAKNTVYLQMNSLKPEDTAVYYCAANPTYGSDWNAENWGQGTQVTVSSGSGGGGSGGGGSGGGGSFEQEVTQIPAALSVPEGENLVLNCSFTDSAIYNLQWFRQDPGKGLTSLLLIQSSQREQTSGRLNASLDKSSGRSTLYIAASQPGDSATYLCAVRPTSGGSYIPTFGRGTSLIVHPYASTKGPSVFPLAPSSKSTSGGTAALGCLVKDYFPEPVTVSWNSGALTSGVHTFPAVLQSSGLYSLSSVVTVPSSSLGTQTYICNVNHKPSNTKVDKRVEPKSCGTQSFGLLDPKLCYLLDGILFIYGVILTALFLRVKFSRSADAPAYQQGQNQLYNELNLGRREEYDVLDKRRGRDPEMGGKPQRRKNPQEGLYNELQKDKMAEAYSEIGMKGERRRGKGHDGLYQGLSTATKDTYDALHMQALPPRRAKRSGSGVKQTLNFDLLKLAGDVESNPGPSRGHMTEYKPTVRLATRDDVPRAVRTLAAAFADYPATRHTVDPDRHIERVTELQELFLTRVGLDIGKVWVADDGAAVAVWTTPESVEAGAVFAEIGPRMAELSGSRLAAQQQMEGLLAPHRPKEPAWFLATVGVSPDHQGKGLGSAVVLPGVEAAERAGVPAFLETSAPRNLPFYERLGFTVTADVEVPEGPRTWCMTRKPGA

SEQ ID NO: 14692 - protein, 950 aa, Artificial Sequence
  Synthetic Polypeptide
MALPVTALLLPLALLLHAARPNAGVTQTPKFQVLKTGQSMTLQCAQDMNHEYMSWYRQDPGMGLRLIHYSVAIQTTDQGEVPNGYNVSRSTIEDFPLRLLSAAPSQTSVYFCASSYLGNTGELFFGEGSRLTVLEDLKNVFPPEVAVFEPSEAEISHTQKATLVCLATGFYPDHVELSWWVNGKEVHSGVSTDPQPLKEQPALNDSRYCLSSRLRVSATFWQNPRNHFRCQVQFYGLSENDEWTQDRAKPVTQIVSAEAWGRADCGSQSFGLLDPKLCYLLDGILFIYGVILTALFLRVKFSRSADAPAYQQGQNQLYNELNLGRREEYDVLDKRRGRDPEMGGKPQRRKNPQEGLYNELQKDKMAEAYSEIGMKGERRRGKGHDGLYQGLSTATKDTYDALHMQALPPRRAKRSGSGATNFSLLKQAGDVEENPGPTSMDWIWRILFLVGAATGAHSGPQVQLQESGGGLAQAGGSLRLSCAASGRTFSMGWFRQAPGKEREFVAAITYSGGSPYYASSVRGRFTISRDNAKNTVYLQMNSLKPEDTAVYYCAANPTYGSDWNAENWGQGTQVTVSSGSGGGGSGGGGSGGGGSFEQEVTQIPAALSVPEGENLVLNCSFTDSAIYNLQWFRQDPGKGLTSLLLIQSSQREQTSGRLNASLDKSSGRSTLYIAASQPGDSATYLCAVRPTSGGSYIPTFGRGTSLIVHPYIQNPDPAVYQLRDSKSSDKSVCLFTDFDSQTNVSQSKDSDVYITDKTVLDMRSMDFKSNSAVAWSNKSDFACANAFNNSIIPEDTFFPSPESSCGTQSFGLLDPKLCYLLDGILFIYGVILTALFLRVKFSRSADAPAYQQGQNQLYNELNLGRREEYDVLDKRRGRDPEMGGKPQRRKNPQEGLYNELQKDKMAEAYSEIGMKGERRRGKGHDGLYQGLSTATKDTYDALHMQALPPR

SEQ ID NO: 14693 - protein, 950 aa, Artificial Sequence
  Synthetic Polypeptide
MALPVTALLLPLALLLHAARPNAGVTQTPKFQVLKTGQSMTLQCAQDMNHEYMSWYRQDPGMGLRLIHYSVAIQTTDQGEVPNGYNVSRSTIEDFPLRLLSAAPSQTSVYFCASSYLGNTGELFFGEGSRLTVLEDLKNVFPPEVAVFEPSKAEIAHTQKATLVCLATGFYPDHVELSWWVNGKEVHSGVCTDPQPLKEQPALNDSRYCLSSRLRVSATFWQNPRNHFRCQVQFYGLSENDEWTQDRAKPVTQIVSAEAWGRADCGSQSFGLLDPKLCYLLDGILFIYGVILTALFLRVKFSRSADAPAYQQGQNQLYNELNLGRREEYDVLDKRRGRDPEMGGKPQRRKNPQEGLYNELQKDKMAEAYSEIGMKGERRRGKGHDGLYQGLSTATKDTYDALHMQALPPRRAKRSGSGATNFSLLKQAGDVEENPGPTSMDWIWRILFLVGAATGAHSGPQVQLQESGGGLAQAGGSLRLSCAASGRTFSMGWFRQAPGKEREFVAAITYSGGSPYYASSVRGRFTISRDNAKNTVYLQMNSLKPEDTAVYYCAANPTYGSDWNAENWGQGTQVTVSSGSGGGGSGGGGSGGGGSFEQEVTQIPAALSVPEGENLVLNCSFTDSAIYNLQWFRQDPGKGLTSLLLIQSSQREQTSGRLNASLDKSSGRSTLYIAASQPGDSATYLCAVRPTSGGSYIPTFGRGTSLIVHPYIQNPDPAVYQLRDSKSSDKSVCLFTDFDSQTNVSQSKDSDVYITDKCVLDMRSMDFKSNSAVAWSNKSDFACANAFNNSIIPEDTFFPSSDVPCGTQSFGLLDPKLCYLLDGILFIYGVILTALFLRVKFSRSADAPAYQQGQNQLYNELNLGRREEYDVLDKRRGRDPEMGGKPQRRKNPQEGLYNELQKDKMAEAYSEIGMKGERRRGKGHDGLYQGLSTATKDTYDALHMQALPPR

SEQ ID NO: 14694 - protein, 1021 aa, Artificial Sequence
  Synthetic Polypeptide
MALPVTALLLPLALLLHAARPNAGVTQTPKFQVLKTGQSMTLQCAQDMNHEYMSWYRQDPGMGLRLIHYSVAIQTTDQGEVPNGYNVSRSTIEDFPLRLLSAAPSQTSVYFCASSYLGNTGELFFGEGSRLTVLEGKPIPNPLLGLDSTGSGEDLKNVFPPEVAVFEPSEAEISHTQKATLVCLATGFYPDHVELSWWVNGKEVHSGVSTDPQPLKEQPALNDSRYCLSSRLRVSATFWQNPRNHFRCQVQFYGLSENDEWTQDRAKPVTQIVSAEAWGRADCGSQSFGLLDPKLCYLLDGILFIYGVILTALFLRVKFSRSADAPAYQQGQNQLYNELNLGRREEYDVLDKRRGRDPEMGGKPQRRKNPQEGLYNELQKDKMAEAYSEIGMKGERRRGKGHDGLYQGLSTATKDTYDALHMQALPPRRAKRSGSGATNFSLLKQAGDVEENPGPTSMDWIWRILFLVGAATGAHSGPQVQLQESGGGLAQAGGSLRLSCAASGRTFSMGWFRQAPGKEREFVAAITYSGGSPYYASSVRGRFTISRDNAKNTVYLQMNSLKPEDTAVYYCAANPTYGSDWNAENWGQGTQVTVSSGSGGGGSGGGGSGGGGSFEQEVTQIPAALSVPEGENLVLNCSFTDSAIYNLQWFRQDPGKGLTSLLLIQSSQREQTSGRLNASLDKSSGRSTLYIAASQPGDSATYLCAVRPTSGGSYIPTFGRGTSLIVHPYEQKLISEEDGSGIQNPDPAVYQLRDSKSSDKSVCLFTDFDSQTNVSQSKDSDVYITDKTVLDMRSMDFKSNSAVAWSNKSDFACANAFNNSIIPEDTFFPSPESSCGTQSFGLLDPKLCYLLDGILFIYGVILTALFLRSKRSRLLHSDYMNMTPRRPGPTRKHYQPYAPPRDFAAYRSRVKFSRSADAPAYQQGQNQLYNELNLGRREEYDVLDKRRGRDPEMGGKPQRRKNPQEGLYNELQKDKMAEAYSEIGMKGERRRGKGHDGLYQGLSTATKDTYDALHMQALPPR

SEQ ID NO: 14695 - protein, 1062 aa, Artificial Sequence
  Synthetic Polypeptide
MALPVTALLLPLALLLHAARPNAGVTQTPKFQVLKTGQSMTLQCAQDMNHEYMSWYRQDPGMGLRLIHYSVAIQTTDQGEVPNGYNVSRSTIEDFPLRLLSAAPSQTSVYFCASSYLGNTGELFFGEGSRLTVLEGKPIPNPLLGLDSTGSGEDLKNVFPPEVAVFEPSEAEISHTQKATLVCLATGFYPDHVELSWWVNGKEVHSGVSTDPQPLKEQPALNDSRYCLSSRLRVSATFWQNPRNHFRCQVQFYGLSENDEWTQDRAKPVTQIVSAEAWGRADCGSQSFGLLDPKLCYLLDGILFIYGVILTALFLRSKRSRLLHSDYMNMTPRRPGPTRKHYQPYAPPRDFAAYRSRVKFSRSADAPAYQQGQNQLYNELNLGRREEYDVLDKRRGRDPEMGGKPQRRKNPQEGLYNELQKDKMAEAYSEIGMKGERRRGKGHDGLYQGLSTATKDTYDALHMQALPPRRAKRSGSGATNFSLLKQAGDVEENPGPTSMDWIWRILFLVGAATGAHSGPQVQLQESGGGLAQAGGSLRLSCAASGRTFSMGWFRQAPGKEREFVAAITYSGGSPYYASSVRGRFTISRDNAKNTVYLQMNSLKPEDTAVYYCAANPTYGSDWNAENWGQGTQVTVSSGSGGGGSGGGGSGGGGSFEQEVTQIPAALSVPEGENLVLNCSFTDSAIYNLQWFRQDPGKGLTSLLLIQSSQREQTSGRLNASLDKSSGRSTLYIAASQPGDSATYLCAVRPTSGGSYIPTFGRGTSLIVHPYEQKLISEEDGSGIQNPDPAVYQLRDSKSSDKSVCLFTDFDSQTNVSQSKDSDVYITDKTVLDMRSMDFKSNSAVAWSNKSDFACANAFNNSIIPEDTFFPSPESSCGTQSFGLLDPKLCYLLDGILFIYGVILTALFLRSKRSRLLHSDYMNMTPRRPGPTRKHYQPYAPPRDFAAYRSRVKFSRSADAPAYQQGQNQLYNELNLGRREEYDVLDKRRGRDPEMGGKPQRRKNPQEGLYNELQKDKMAEAYSEIGMKGERRRGKGHDGLYQGLSTATKDTYDALHMQALPPR

SEQ ID NO: 14696 - protein, 1023 aa, Artificial Sequence
  Synthetic Polypeptide
MALPVTALLLPLALLLHAARPNAGVTQTPKFQVLKTGQSMTLQCAQDMNHEYMSWYRQDPGMGLRLIHYSVAIQTTDQGEVPNGYNVSRSTIEDFPLRLLSAAPSQTSVYFCASSYLGNTGELFFGEGSRLTVLEGKPIPNPLLGLDSTGSGEDLKNVFPPEVAVFEPSEAEISHTQKATLVCLATGFYPDHVELSWWVNGKEVHSGVSTDPQPLKEQPALNDSRYCLSSRLRVSATFWQNPRNHFRCQVQFYGLSENDEWTQDRAKPVTQIVSAEAWGRADCGSQSFGLLDPKLCYLLDGILFIYGVILTALFLRVKFSRSADAPAYQQGQNQLYNELNLGRREEYDVLDKRRGRDPEMGGKPQRRKNPQEGLYNELQKDKMAEAYSEIGMKGERRRGKGHDGLYQGLSTATKDTYDALHMQALPPRRAKRSGSGATNFSLLKQAGDVEENPGPTSMDWIWRILFLVGAATGAHSGPQVQLQESGGGLAQAGGSLRLSCAASGRTFSMGWFRQAPGKEREFVAAITYSGGSPYYASSVRGRFTISRDNAKNTVYLQMNSLKPEDTAVYYCAANPTYGSDWNAENWGQGTQVTVSSGSGGGGSGGGGSGGGGSFEQEVTQIPAALSVPEGENLVLNCSFTDSAIYNLQWFRQDPGKGLTSLLLIQSSQREQTSGRLNASLDKSSGRSTLYIAASQPGDSATYLCAVRPTSGGSYIPTFGRGTSLIVHPYEQKLISEEDLGSGIQNPDPAVYQLRDSKSSDKSVCLFTDFDSQTNVSQSKDSDVYITDKTVLDMRSMDFKSNSAVAWSNKSDFACANAFNNSIIPEDTFFPSPESSCGTQSFGLLDPKLCYLLDGILFIYGVILTALFLKRGRKKLLYIFKQPFMRPVQTTQEEDGCSCRFPEEEEGGCELRVKFSRSADAPAYQQGQNQLYNELNLGRREEYDVLDKRRGRDPEMGGKPQRRKNPQEGLYNELQKDKMAEAYSEIGMKGERRRGKGHDGLYQGLSTATKDTYDALHMQALPPR

SEQ ID NO: 14697 - protein, 1065 aa, Artificial Sequence
  Synthetic Polypeptide
MALPVTALLLPLALLLHAARPNAGVTQTPKFQVLKTGQSMTLQCAQDMNHEYMSWYRQDPGMGLRLIHYSVAIQTTDQGEVPNGYNVSRSTIEDFPLRLLSAAPSQTSVYFCASSYLGNTGELFFGEGSRLTVLEGKPIPNPLLGLDSTGSGEDLKNVFPPEVAVFEPSEAEISHTQKATLVCLATGFYPDHVELSWWVNGKEVHSGVSTDPQPLKEQPALNDSRYCLSSRLRVSATFWQNPRNHFRCQVQFYGLSENDEWTQDRAKPVTQIVSAEAWGRADCGSQSFGLLDPKLCYLLDGILFIYGVILTALFLKRGRKKLLYIFKQPFMRPVQTTQEEDGCSCRFPEEEEGGCELRVKFSRSADAPAYQQGQNQLYNELNLGRREEYDVLDKRRGRDPEMGGKPQRRKNPQEGLYNELQKDKMAEAYSEIGMKGERRRGKGHDGLYQGLSTATKDTYDALHMQALPPRRAKRSGSGATNFSLLKQAGDVEENPGPTSMDWIWRILFLVGAATGAHSGPQVQLQESGGGLAQAGGSLRLSCAASGRTFSMGWFRQAPGKEREFVAAITYSGGSPYYASSVRGRFTISRDNAKNTVYLQMNSLKPEDTAVYYCAANPTYGSDWNAENWGQGTQVTVSSGSGGGGSGGGGSGGGGSFEQEVTQIPAALSVPEGENLVLNCSFTDSAIYNLQWFRQDPGKGLTSLLLIQSSQREQTSGRLNASLDKSSGRSTLYIAASQPGDSATYLCAVRPTSGGSYIPTFGRGTSLIVHPYEQKLISEEDLGSGIQNPDPAVYQLRDSKSSDKSVCLFTDFDSQTNVSQSKDSDVYITDKTVLDMRSMDFKSNSAVAWSNKSDFACANAFNNSIIPEDTFFPSPESSCGTQSFGLLDPKLCYLLDGILFIYGVILTALFLKRGRKKLLYIFKQPFMRPVQTTQEEDGCSCRFPEEEEGGCELRVKFSRSADAPAYQQGQNQLYNELNLGRREEYDVLDKRRGRDPEMGGKPQRRKNPQEGLYNELQKDKMAEAYSEIGMKGERRRGKGHDGLYQGLSTATKDTYDALHMQALPPR

SEQ ID NO: 14698 - protein, 955 aa, Artificial Sequence
  Synthetic Polypeptide
MALPVTALLLPLALLLHAARPNAGVTQTPKFQVLKTGQSMTLQCAQDMNHEYMSWYRQDPGMGLRLIHYSVAIQTTDQGEVPNGYNVSRSTIEDFPLRLLSAAPSQTSVYFCASSYLGNTGELFFGEGSRLTVLEQSFGLLDPKLCYLLDGILFIYGVILTALFLRVKFSRSADAPAYQQGQNQLYNELNLGRREEYDVLDKRRGRDPEMGGKPQRRKNPQEGLYNELQKDKMAEAYSEIGMKGERRRGKGHDGLYQGLSTATKDTYDALHMQALPPRRAKRSGSGATNFSLLKQAGDVEENPGPTSMDWIWRILFLVGAATGAHSGPQVQLQESGGGLAQAGGSLRLSCAASGRTFSMGWFRQAPGKEREFVAAITYSGGSPYYASSVRGRFTISRDNAKNTVYLQMNSLKPEDTAVYYCAANPTYGSDWNAENWGQGTQVTVSSGSGGGGSGGGGSGGGGSFEQEVTQIPAALSVPEGENLVLNCSFTDSAIYNLQWFRQDPGKGLTSLLLIQSSQREQTSGRLNASLDKSSGRSTLYIAASQPGDSATYLCAVRPTSGGSYIPTFGRGTSLIVHPYQSFGLLDPKLCYLLDGILFIYGVILTALFLRVKFSRSADAPAYQQGQNQLYNELNLGRREEYDVLDKRRGRDPEMGGKPQRRKNPQEGLYNELQKDKMAEAYSEIGMKGERRRGKGHDGLYQGLSTATKDTYDALHMQALPPRRAKRSGSGVKQTLNFDLLKLAGDVESNPGPSRGHMTEYKPTVRLATRDDVPRAVRTLAAAFADYPATRHTVDPDRHIERVTELQELFLTRVGLDIGKVWVADDGAAVAVWTTPESVEAGAVFAEIGPRMAELSGSRLAAQQQMEGLLAPHRPKEPAWFLATVGVSPDHQGKGLGSAVVLPGVEAAERAGVPAFLETSAPRNLPFYERLGFTVTADVEVPEGPRTWCMTRKPGA

SEQ ID NO: 14699 - protein, 780 aa, Artificial Sequence
  Synthetic Polypeptide
MALPVTALLLPLALLLHAARPNAGVTQTPKFQVLKTGQSMTLQCAQDMNHEYMSWYRQDPGMGLRLIHYSVAIQTTDQGEVPNGYNVSRSTIEDFPLRLLSAAPSQTSVYFCASSYLGNTGELFFGEGSRLTVLEGQPKANPTVTLFPPSSEELQANKATLVCLISDFYPGAVTVAWKADGSPVKAGVETTKPSKQSNNKYAASSYLSLTPEQWKSHRSYSCQVTHEGSTVEKTVAPTECSPIKTDVITMDPKDNCSKDANDTLLLQLTNTSAYYMYLLLLLKSVVYFAIITCCLLRRTAFCCNGEKSRAKRSGSGATNFSLLKQAGDVEENPGPTSMDWIWRILFLVGAATGAHSGPQVQLQESGGGLAQAGGSLRLSCAASGRTFSMGWFRQAPGKEREFVAAITYSGGSPYYASSVRGRFTISRDNAKNTVYLQMNSLKPEDTAVYYCAANPTYGSDWNAENWGQGTQVTVSSGSGGGGSGGGGSGGGGSFEQEVTQIPAALSVPEGENLVLNCSFTDSAIYNLQWFRQDPGKGLTSLLLIQSSQREQTSGRLNASLDKSSGRSTLYIAASQPGDSATYLCAVRPTSGGSYIPTFGRGTSLIVHPYASTKGPSVFPLAPSSKSTSGGTAALGCLVKDYFPEPVTVSWNSGALTSGVHTFPAVLQSSGLYSLSSVVTVPSSSLGTQTYICNVNHKPSNTKVDKRVEPKSCEVKTDSTDHVKPKETENTKQPSKSCHKPKAIVHTEKVNMMSLTVLGLRMLFAKTVAVNFLLTAKLFFL

SEQ ID NO: 14700 - protein, 758 aa, Artificial Sequence
  Synthetic Polypeptide
MALPVTALLLPLALLLHAARPNAGVTQTPKFQVLKTGQSMTLQCAQDMNHEYMSWYRQDPGMGLRLIHYSVAIQTTDQGEVPNGYNVSRSTIEDFPLRLLSAAPSQTSVYFCASSYLGNTGELFFGEGSRLTVLEGQPKANPTVTLFPPSSEELQANKATLVCLISDFYPGAVTVAWKADGSPVKAGVETTKPSKQSNNKYAASSYLSLTPEQWKSHRSYSCQVTHEGSTVEKTVAPTECSGRADCGITSASYHQGVLSATILYEILLGKATLYAVLVSALVLMAMVKRKDSRGRAKRSGSGATNFSLLKQAGDVEENPGPTSMDWIWRILFLVGAATGAHSGPQVQLQESGGGLAQAGGSLRLSCAASGRTFSMGWFRQAPGKEREFVAAITYSGGSPYYASSVRGRFTISRDNAKNTVYLQMNSLKPEDTAVYYCAANPTYGSDWNAENWGQGTQVTVSSGSGGGGSGGGGSGGGGSFEQEVTQIPAALSVPEGENLVLNCSFTDSAIYNLQWFRQDPGKGLTSLLLIQSSQREQTSGRLNASLDKSSGRSTLYIAASQPGDSATYLCAVRPTSGGSYIPTFGRGTSLIVHPYASTKGPSVFPLAPSSKSTSGGTAALGCLVKDYFPEPVTVSWNSGALTSGVHTFPAVLQSSGLYSLSSVVTVPSSSLGTQTYICNVNHKPSNTKVDKRVEPKSCIPEDTFFPSSDVPCDVKLVEKSFETDTNLNFQNLSVIGFRILLLKVAGFNLLMTLRLWSS

SEQ ID NO: 14701 - protein, 758 aa, Artificial Sequence
  Synthetic Polypeptide
MALPVTALLLPLALLLHAARPNAGVTQTPKFQVLKTGQSMTLQCAQDMNHEYMSWYRQDPGMGLRLIHYSVAIQTTDQGEVPNGYNVSRSTIEDFPLRLLSAAPSQTSVYFCASSYLGNTGELFFGEGSRLTVLEGQPKANPTVTLFPPSSEELQANKATLVCLISDFYPGAVTVAWKADGSPVKAGVETTKPSKQSNNKYAASSYLSLTPEQWKSHRSYSCQVTHEGSTVEKTVAPTECSGRADCGFTSESYQQGVLSATILYEILLGKATLYAVLVSALVLMAMVKRKDSRGRAKRSGSGATNFSLLKQAGDVEENPGPTSMDWIWRILFLVGAATGAHSGPQVQLQESGGGLAQAGGSLRLSCAASGRTFSMGWFRQAPGKEREFVAAITYSGGSPYYASSVRGRFTISRDNAKNTVYLQMNSLKPEDTAVYYCAANPTYGSDWNAENWGQGTQVTVSSGSGGGGSGGGGSGGGGSFEQEVTQIPAALSVPEGENLVLNCSFTDSAIYNLQWFRQDPGKGLTSLLLIQSSQREQTSGRLNASLDKSSGRSTLYIAASQPGDSATYLCAVRPTSGGSYIPTFGRGTSLIVHPYASTKGPSVFPLAPSSKSTSGGTAALGCLVKDYFPEPVTVSWNSGALTSGVHTFPAVLQSSGLYSLSSVVTVPSSSLGTQTYICNVNHKPSNTKVDKRVEPKSCIPEDTFFPSPESSCDVKLVEKSFETDTNLNFQNLSVIGFRILLLKVAGFNLLMTLRLWSS

SEQ ID NO: 14702 - protein, 588 aa, Artificial Sequence
  Synthetic Polypeptide
MDWIWRILFLVGAATGAHSGPQVQLQESGGGLAQAGGSLRLSCAASGRTFSMGWFRQAPGKEREFVAAITYSGGSPYYASSVRGRFTISRDNAKNTVYLQMNSLKPEDTAVYYCAANPTYGSDWNAENWGQGTQVTVSSGSGGGGSGGGGSGGGGSFEQEVTQIPAALSVPEGENLVLNCSFTDSAIYNLQWFRQDPGKGLTSLLLIQSSQREQTSGRLNASLDKSSGRSTLYIAASQPGDSATYLCAVRPTSGGSYIPTFGRGTSLIVHPYGGGGSGGGGSGGGGSNAGVTQTPKFQVLKTGQSMTLQCAQDMNHEYMSWYRQDPGMGLRLIHYSVAIQTTDQGEVPNGYNVSRSTIEDFPLRLLSAAPSQTSVYFCASSYLGNTGELFFGEGSRLTVGGGSDGNEEMGGITQTPYKVSISGTTVILTCPQYPGSEILWQHNDKNIGGDEDDKNIGSDEDHLSLKEFSELEQSGYYVCYPRGSKPEDANFYLYLRARVCENCMEMDVMSVATIVIVDICITGGLLLLVYYWSKNRKAKAKPVTRGAGAGGRQRGQNKERPPPVPNPDYEPIRKGQRDLYSGLNQRRI

SEQ ID NO: 14703 - protein, 553 aa, Artificial Sequence
  Synthetic Polypeptide
MDWIWRILFLVGAATGAHSGPQVQLQESGGGLAQAGGSLRLSCAASGRTFSMGWFRQAPGKEREFVAAITYSGGSPYYASSVRGRFTISRDNAKNTVYLQMNSLKPEDTAVYYCAANPTYGSDWNAENWGQGTQVTVSSGSGGGGSGGGGSGGGGSFEQEVTQIPAALSVPEGENLVLNCSFTDSAIYNLQWFRQDPGKGLTSLLLIQSSQREQTSGRLNASLDKSSGRSTLYIAASQPGDSATYLCAVRPTSGGSYIPTFGRGTSLIVHPYGGGGSGGGGSGGGGSNAGVTQTPKFQVLKTGQSMTLQCAQDMNHEYMSWYRQDPGMGLRLIHYSVAIQTTDQGEVPNGYNVSRSTIEDFPLRLLSAAPSQTSVYFCASSYLGNTGELFFGEGSRLTVGGGSFKIPIEELEDRVFVNCNTSITWVEGTVGTLLSDITRLDLGKRILDPRGIYRCNGTDIYKDKESTVQVHYRMCQSCVELDPATVAGIIVTDVIATLLLALGVFCFAGHETGRLSGAADTQALLRNDQVYQPLRDRDDAQYSHLGGNWARNK

SEQ ID NO: 14704 - protein, 563 aa, Artificial Sequence
  Synthetic Polypeptide
MDWIWRILFLVGAATGAHSGPQVQLQESGGGLAQAGGSLRLSCAASGRTFSMGWFRQAPGKEREFVAAITYSGGSPYYASSVRGRFTISRDNAKNTVYLQMNSLKPEDTAVYYCAANPTYGSDWNAENWGQGTQVTVSSGSGGGGSGGGGSGGGGSFEQEVTQIPAALSVPEGENLVLNCSFTDSAIYNLQWFRQDPGKGLTSLLLIQSSQREQTSGRLNASLDKSSGRSTLYIAASQPGDSATYLCAVRPTSGGSYIPTFGRGTSLIVHPYGGGGSGGGGSGGGGSNAGVTQTPKFQVLKTGQSMTLQCAQDMNHEYMSWYRQDPGMGLRLIHYSVAIQTTDQGEVPNGYNVSRSTIEDFPLRLLSAAPSQTSVYFCASSYLGNTGELFFGEGSRLTVGGGSQSIKGNHLVKVYDYQEDGSVLLTCDAEAKNITWFKDGKMIGFLTEDKKKWNLGSNAKDPRGMYQCKGSQNKSKPLQVYYRMCQNCIELNAATISGFLFAEIVSIFVLAVGVYFIAGQDGVRQSRASDKQTLLPNDQLYQPLKDREDDQYSHLQGNQLRRN

SEQ ID NO: 14705 - protein, 546 aa, Artificial Sequence
  Synthetic Polypeptide
MDWIWRILFLVGAATGAHSGPQVQLQESGGGLAQAGGSLRLSCAASGRTFSMGWFRQAPGKEREFVAAITYSGGSPYYASSVRGRFTISRDNAKNTVYLQMNSLKPEDTAVYYCAANPTYGSDWNAENWGQGTQVTVSSGSGGGGSGGGGSGGGGSFEQEVTQIPAALSVPEGENLVLNCSFTDSAIYNLQWFRQDPGKGLTSLLLIQSSQREQTSGRLNASLDKSSGRSTLYIAASQPGDSATYLCAVRPTSGGSYIPTFGRGTSLIVHPYGGGGSGGGGSGGGGSNAGVTQTPKFQVLKTGQSMTLQCAQDMNHEYMSWYRQDPGMGLRLIHYSVAIQTTDQGEVPNGYNVSRSTIEDFPLRLLSAAPSQTSVYFCASSYLGNTGELFFGEGSRLTVGGGSQSFGLLDPKLCYLLDGILFIYGVILTALFLRVKFSRSADAPAYQQGQNQLYNELNLGRREEYDVLDKRRGRDPEMGGKPQRRKNPQEGLYNELQKDKMAEAYSEIGMKGERRRGKGHDGLYQGLSTATKDTYDALHMQALPPR

SEQ ID NO: 14706 - protein, 578 aa, Artificial Sequence
  Synthetic Polypeptide
MDWIWRILFLVGAATGAHSGPQVQLQESGGGLAQAGGSLRLSCAASGRTFSMGWFRQAPGKEREFVAAITYSGGSPYYASSVRGRFTISRDNAKNTVYLQMNSLKPEDTAVYYCAANPTYGSDWNAENWGQGTQVTVSSGSGGGGSGGGGSGGGGSFEQEVTQIPAALSVPEGENLVLNCSFTDSAIYNLQWFRQDPGKGLTSLLLIQSSQREQTSGRLNASLDKSSGRSTLYIAASQPGDSATYLCAVRPTSGGSYIPTFGRGTSLIVHPYIQNPDPAVYQLRDSKSSDKSVCLFTDFDSQTNVSQSKDSDVYITDKTVLDMRSMDFKSNSAVAWSNKSDFACANAFNNSIIPEDTFFPSPESSCDVKLVEKSFETDTNLNFQNLSVIGFRILLLKVAGFNLLMTLRLWSSRAKRSGSGVKQTLNFDLLKLAGDVESNPGPSRGHMAKPLSQEESTLIERATATINSIPISEDYSVASAALSSDGRIFTGVNVYHFTGGPCAELVVLGTAAAAAAGNLTCIVAIGNENRGILSPCGRCRQVLLDLHPGIKAIVKDSDGQPTAVGIRELLPSGYVWEG

SEQ ID NO: 14707 - protein, 412 aa, Artificial Sequence
  Synthetic Polypeptide
MDWIWRILFLVGAATGAHSGPQVQLQESGGGLAQAGGSLRLSCAASGRTFSMGWFRQAPGKEREFVAAITYSGGSPYYASSVRGRFTISRDNAKNTVYLQMNSLKPEDTAVYYCAANPTYGSDWNAENWGQGTQVTVSSGSGGGGSGGGGSGGGGSFEQEVTQIPAALSVPEGENLVLNCSFTDSAIYNLQWFRQDPGKGLTSLLLIQSSQREQTSGRLNASLDKSSGRSTLYIAASQPGDSATYLCAVRPTSGGSYIPTFGRGTSLIVHPYIQNPDPAVYQLRDSKSSDKSVCLFTDFDSQTNVSQSKDSDVYITDKTVLDMRSMDFKSNSAVAWSNKSDFACANAFNNSIIPEDTFFPSPESSCDVKLVEKSFETDTNLNFQNLSVIGFRILLLKVAGFNLLMTLRLWSS

SEQ ID NO: 14708 - protein, 590 aa, Artificial Sequence
  Synthetic Polypeptide
MDWIWRILFLVGAATGAHSGPQVQLQESGGGLAQAGGSLRLSCAASGRTFSMGWFRQAPGKEREFVAAITYSGGSPYYASSVRGRFTISRDNAKNTVYLQMNSLKPEDTAVYYCAANPTYGSDWNAENWGQGTQVTVSSGSGGGGSGGGGSGGGGSFEQEVTQIPAALSVPEGENLVLNCSFTDSAIYNLQWFRQDPGKGLTSLLLIQSSQREQTSGRLNASLDKSSGRSTLYIAASQPGDSATYLCAVRPTSGGSYIPTFGRGTSLIVHPYEQKLISEEDGSGIQNPDPAVYQLRDSKSSDKSVCLFTDFDSQTNVSQSKDSDVYITDKCVLDMRSMDFKSNSAVAWSNKSDFACANAFNNSIIPEDTFFPSPESSCDVKLVEKSFETDTNLNFQNLSVIGFRILLLKVAGFNLLMTLRLWSSRAKRSGSGVKQTLNFDLLKLAGDVESNPGPSRGHMAKPLSQEESTLIERATATINSIPISEDYSVASAALSSDGRIFTGVNVYHFTGGPCAELVVLGTAAAAAAGNLTCIVAIGNENRGILSPCGRCRQVLLDLHPGIKAIVKDSDGQPTAVGIRELLPSGYVWEG

SEQ ID NO: 14709 - protein, 424 aa, Artificial Sequence
  Synthetic Polypeptide
MDWIWRILFLVGAATGAHSGPQVQLQESGGGLAQAGGSLRLSCAASGRTFSMGWFRQAPGKEREFVAAITYSGGSPYYASSVRGRFTISRDNAKNTVYLQMNSLKPEDTAVYYCAANPTYGSDWNAENWGQGTQVTVSSGSGGGGSGGGGSGGGGSFEQEVTQIPAALSVPEGENLVLNCSFTDSAIYNLQWFRQDPGKGLTSLLLIQSSQREQTSGRLNASLDKSSGRSTLYIAASQPGDSATYLCAVRPTSGGSYIPTFGRGTSLIVHPYEQKLISEEDGSGIQNPDPAVYQLRDSKSSDKSVCLFTDFDSQTNVSQSKDSDVYITDKCVLDMRSMDFKSNSAVAWSNKSDFACANAFNNSIIPEDTFFPSPESSCDVKLVEKSFETDTNLNFQNLSVIGFRILLLKVAGFNLLMTLRLWSS

SEQ ID NO: 14710 - protein, 636 aa, Artificial Sequence
  Synthetic Polypeptide
MALPVTALLLPLALLLHAARPACQVQLVESGGGLVQAGDSVTLSCTASGRTFSSYALAWFRQRPGKEREFVAGLRWGGPTNYADSVKDRFTISGDSAKHTMYLQMNSLKPEDTAVYYCGYNPGGWAVPSQYEYDSWGQGTQVTVSSGTGGGGSGGGGSGGGGSEFNAGVTQTPKFQVLKTGQSMTLQCAQDMNHEYMSWYRQDPGMGLRLIHYSVAIQTTDQGEVPNGYNVSRSTIEDFPLRLLSAAPSQTSVYFCASSYLGNTGELFFGEGSRLTVGGGGSGGGGSGGGGSQEVTQIPAALSVPEGENLVLNCSFTDSAIYNLQWFRQDPGKGLTSLLLIQSSQREQTSGRLNASLDKSSGRSTLYIAASQPGDSATYLCAVRPTSGGSYIPTFGRGTSLIVHPYEQKLISEEDLKIEVMYPPPYLDNEKSNGTIIHVKGKHLCPSPLFPGPSKPFWVLVVVGGVLACYSLLVTVAFIIFWVRSKRSRLLHSDYMNMTPRRPGPTRKHYQPYAPPRDFAAYRSRVKFSRSADAPAYQQGQNQLYNELNLGRREEYDVLDKRRGRDPEMGGKPRRKNPQEGLYNELQKDKMAEAYSEIGMKGERRRGKGHDGLYQGLSTATKDTYDALHMQALPPR

SEQ ID NO: 14711 - protein, 642 aa, Artificial Sequence
  Synthetic Polypeptide
MALPVTALLLPLALLLHAARPACQVQLVESGGGLVQAGDSVTLSCTASGRTFSSYALAWFRQRPGKEREFVAGLRWGGPTNYADSVKDRFTISGDSAKHTMYLQMNSLKPEDTAVYYCGYNPGGWAVPSQYEYDSWGQGTQVTVSSGTGGGGSGGGGSGGGGSEFNAGVTQTPKFQVLKTGQSMTLQCAQDMNHEYMSWYRQDPGMGLRLIHYSVAIQTTDQGEVPNGYNVSRSTIEDFPLRLLSAAPSQTSVYFCASSYLGNTGELFFGEGSRLTVGGGGSGGGGSGGGGSQEVTQIPAALSVPEGENLVLNCSFTDSAIYNLQWFRQDPGKGLTSLLLIQSSQREQTSGRLNASLDKSSGRSTLYIAASQPGDSATYLCAVRPTSGGSYIPTFGRGTSLIVHPYEQKLISEEDLAKPTTTPAPRPPTPAPTIASQPLSLRPEACRPAAGGAVHTRGLDFACDIYIWAPLAGTCGVLLLSLVITLYCKRGRKKLLYIFKQPFMRPVQTTQEEDGCSCRFPEEEEGGCELRVKFSRSADAPAYQQGQNQLYNELNLGRREEYDVLDKRRGRDPEMGGKPRRKNPQEGLYNELQKDKMAEAYSEIGMKGERRRGKGHDGLYQGLSTATKDTYDALHMQALPPR

SEQ ID NO: 14712 - protein, 1055 aa, Artificial Sequence
  Synthetic Polypeptide
MALPVTALLLPLALLLHAARPACQVQLVESGGGLVQAGDSVTLSCTASGRTFSSYALAWFRQRPGKEREFVAGLRWGGPTNYADSVKDRFTISGDSAKHTMYLQMNSLKPEDTAVYYCGYNPGGWAVPSQYEYDSWGQGTQVTVSSGTGGGGSGGGGSGGGGSEFNAGVTQTPKFQVLKTGQSMTLQCAQDMNHEYMSWYRQDPGMGLRLIHYSVAIQTTDQGEVPNGYNVSRSTIEDFPLRLLSAAPSQTSVYFCASSYLGNTGELFFGEGSRLTVGGGGSGGGGSGGGGSQEVTQIPAALSVPEGENLVLNCSFTDSAIYNLQWFRQDPGKGLTSLLLIQSSQREQTSGRLNASLDKSSGRSTLYIAASQPGDSATYLCAVRPTSGGSYIPTFGRGTSLIVHPYEQKLISEEDLAKPTTTPAPRPPTPAPTIASQPLSLRPEACRPAAGGAVHTRGLDFACDIYIWAPLAGTCGVLLLSLVITLYCGRARVKFSRSADAPAYQQGQNQLYNELNLGRREEYDVLDKRRGRDPEMGGKPRRKNPQEGLYNELQKDKMAEAYSEIGMKGERRRGKGHDGLYQGLSTATKDTYDALHMQALPPRSRGSGATNFSLLKQAGDVEENPGPGIHMATYEVLCEVARKLGTDDREVVLFLLNVFIPQPTLAQLIGALRALKEEGRLTFPLLAECLFRAGRRDLLRDLLHLDPRFLERHLAGTMSYFSPYQLTVLHVDGELCARDIRSLIFLSKDTIGSRSTPQTFLHWVYCMENLDLLGPTDVDALMSMLRSLSRVDLQRQVQTLMGLHLSGPSHSQHYRHTPLETDFYDYKDDDDKTSGSGEGRGSLLTCGDVEENPGPHMTEYKPTVRLATRDDVPRAVRTLAAAFADYPATRHTVDPDRHIERVTELQELFLTRVGLDIGKVWVADDGAAVAVWTTPESVEAGAVFAEIGPRMAELSGSRLAAQQQMEGLLAPHRPKEPAWFLATVGVSPDHQGKGLGSAVVLPGVEAAERAGVPAFLETSAPRNLPFYERLGFTVTADVEVPEGPRTWCMTRKPGA

SEQ ID NO: 14713 - protein, 995 aa, Artificial Sequence
  Synthetic Polypeptide
MALPVTALLLPLALLLHAARPACQVQLVESGGGLVQAGDSVTLSCTASGRTFSSYALAWFRQRPGKEREFVAGLRWGGPTNYADSVKDRFTISGDSAKHTMYLQMNSLKPEDTAVYYCGYNPGGWAVPSQYEYDSWGQGTQVTVSSGTGGGGSGGGGSGGGGSEFNAGVTQTPKFQVLKTGQSMTLQCAQDMNHEYMSWYRQDPGMGLRLIHYSVAIQTTDQGEVPNGYNVSRSTIEDFPLRLLSAAPSQTSVYFCASSYLGNTGELFFGEGSRLTVLEIQNPDPAVYQLRDSKSSDKSVCLFTDFDSQTNVSQSKDSDVYITDKCVLDMRSMDFKSNSAVAWSNKSDFACANAFNNSIIPEDTFFPSSDVPCDVKLVEKSFETDTNLNFQNLSVIGFRILLLKVAGFNLLMTLRLWSSRAKRSGSGVKQTLNFDLLKLAGDVESNPGPTSMDWIWRILFLVGAATGAHSFEQEVTQIPAALSVPEGENLVLNCSFTDSAIYNLQWFRQDPGKGLTSLLLIQSSQREQTSGRLNASLDKSSGRSTLYIAASQPGDSATYLCAVRPTSGGSYIPTFGRGTSLIVHPYEDLKNVFPPEVAVFEPSKAEIAHTQKATLVCLATGFYPDHVELSWWVNGKEVHSGVCTDPQPLKEQPALNDSRYCLSSRLRVSATFWQNPRNHFRCQVQFYGLSENDEWTQDRAKPVTQIVSAEAWGRADCGITSASYHQGVLSATILYEILLGKATLYAVLVSALVLMAMVKRKDSRGRAKRSGSGATNFSLLKQAGDVEENPGPSRGHMTEYKPTVRLATRDDVPRAVRTLAAAFADYPATRHTVDPDRHIERVTELQELFLTRVGLDIGKVWVADDGAAVAVWTTPESVEAGAVFAEIGPRMAELSGSRLAAQQQMEGLLAPHRPKEPAWFLATVGVSPDHQGKGLGSAVVLPGVEAAERAGVPAFLETSAPRNLPFYERLGFTVTADVEVPEGPRTWCMTRKPGA

SEQ ID NO: 14714 - protein, 994 aa, Artificial Sequence
  Synthetic Polypeptide
MALPVTALLLPLALLLHAARPACQVQLVESGGGLVQAGDSVTLSCTASGRTFSSYALAWFRQRPGKEREFVAGLRWGGPTNYADSVKDRFTISGDSAKHTMYLQMNSLKPEDTAVYYCGYNPGGWAVPSQYEYDSWGQGTQVTVSSGTGGGGSGGGGSGGGGSEFNAGVTQTPKFQVLKTGQSMTLQCAQDMNHEYMSWYRQDPGMGLRLIHYSVAIQTTDQGEVPNGYNVSRSTIEDFPLRLLSAAPSQTSVYFCASSYLGNTGELFFGEGSRLTVLEDLKNVFPPEVAVFEPSKAEIAHTQKATLVCLATGFYPDHVELSWWVNGKEVHSGVCTDPQPLKEQPALNDSRYCLSSRLRVSATFWQNPRNHFRCQVQFYGLSENDEWTQDRAKPVTQIVSAEAWGRADCGITSASYHQGVLSATILYEILLGKATLYAVLVSALVLMAMVKRKDSRGRAKRSGSGATNFSLLKQAGDVEENPGPTSMDWIWRILFLVGAATGAHSFEQEVTQIPAALSVPEGENLVLNCSFTDSAIYNLQWFRQDPGKGLTSLLLIQSSQREQTSGRLNASLDKSSGRSTLYIAASQPGDSATYLCAVRPTSGGSYIPTFGRGTSLIVHPYIQNPDPAVYQLRDSKSSDKSVCLFTDFDSQTNVSQSKDSDVYITDKCVLDMRSMDFKSNSAVAWSNKSDFACANAFNNSIIPEDTFFPSSDVPCDVKLVEKSFETDTNLNFQNLSVIGFRILLLKVAGFNLLMTLRLWSSRAKRSGSGVKQTLNFDLLKLAGDVESNPGPSRGHMTEYKPTVRLATRDDVPRAVRTLAAAFADYPATRHTVDPDRHIERVTELQELFLTRVGLDIGKVWVADDGAAVAVWTTPESVEAGAVFAEIGPRMAELSGSRLAAQQQMEGLLAPHRPKEPAWFLATVGVSPDHQGKGLGSAVVLPGVEAAERAGVPAFLETSAPRNLPFYERLGFTVTADVEVPEGPRTWCMTRKPGA

SEQ ID NO: 14715 - protein, 761 aa, Artificial Sequence
  Synthetic Polypeptide
MALPVTALLLPLALLLHAARPACQVQLVESGGGLVQAGDSVTLSCTASGRTFSSYALAWFRQRPGKEREFVAGLRWGGPTNYADSVKDRFTISGDSAKHTMYLQMNSLKPEDTAVYYCGYNPGGWAVPSQYEYDSWGQGTQVTVSSGTGGGGSGGGGSGGGGSEFNAGVTQTPKFQVLKTGQSMTLQCAQDMNHEYMSWYRQDPGMGLRLIHYSVAIQTTDQGEVPNGYNVSRSTIEDFPLRLLSAAPSQTSVYFCASSYLGNTGELFFGEGSRLTVLEDLKNVFPPEVAVFEPSEAEISHTQKATLVCLATGFYPDHVELSWWVNGKEVHSGVCTDPQPLKEQPALNDSRYCLSSRLRVSATFWQNPRNHFRCQVQFYGLSENDEWTQDRAKPVTQIVSAEAWGRADCGFTSESYQQGVLSATILYEILLGKATLYAVLVSALVLMAMVKRKDSRGRAKRSGSGATNFSLLKQAGDVEENPGPTSMDWIWRILFLVGAATGAHSFEQEVTQIPAALSVPEGENLVLNCSFTDSAIYNLQWFRQDPGKGLTSLLLIQSSQREQTSGRLNASLDKSSGRSTLYIAASQPGDSATYLCAVRPTSGGSYIPTFGRGTSLIVHPYIQNPDPAVYQLRDSKSSDKSVCLFTDFDSQTNVSQSKDSDVYITDKCVLDMRSMDFKSNSAVAWSNKSDFACANAFNNSIIPEDTFFPSPESSCDVKLVEKSFETDTNLNFQNLSVIGFRILLLKVAGFNLLMTLRLWSS

SEQ ID NO: 14716 - protein, 986 aa, Artificial Sequence
  Synthetic Polypeptide
MALPVTALLLPLALLLHAARPACQVQLVESGGGLVQAGDSVTLSCTASGRTFSSYALAWFRQRPGKEREFVAGLRWGGPTNYADSVKDRFTISGDSAKHTMYLQMNSLKPEDTAVYYCGYNPGGWAVPSQYEYDSWGQGTQVTVSSGTGGGGSGGGGSGGGGSEFNAGVTQTPKFQVLKTGQSMTLQCAQDMNHEYMSWYRQDPGMGLRLIHYSVAIQTTDQGEVPNGYNVSRSTIEDFPLRLLSAAPSQTSVYFCASSYLGNTGELFFGEGSRLTVLEDLKNVFPPEVAVFEPSEAEISHTQKATLVCLATGFYPDHVELSWWVNGKEVHSGVCTDPQPLKEQPALNDSRYCLSSRLRVSATFWQNPRNHFRCQVQFYGLSENDEWTQDRAKPVTQIVSAEAWGRADCGFTSESYQQGVLSATILYEILLGKATLYAVLVSALVLMAMVKRKDSRGRAKRSGSGATNFSLLKQAGDVEENPGPTSMDWIWRILFLVGAATGAHSFEQEVTQIPAALSVPEGENLVLNCSFTDSAIYNLQWFRQDPGKGLTSLLLIQSSQREQTSGRLNASLDKSSGRSTLYIAASQPGDSATYLCAVRPTSGGSYIPTFGRGTSLIVHPYIQNPDPAVYQLRDSKSSDKSVCLFTDFDSQTNVSQSKDSDVYITDKCVLDMRSMDFKSNSAVAWSNKSDFACANAFNNSIIPEDTFFPSPESSCDVKLVEKSFETDTNLNFQNLSVIGFRILLLKVAGFNLLMTLRLWSSRAKRSGSGVKQTLNFDLLKLAGDVESNPGPSRGGIHTMATYEVLCEVARKLGTDDREVVLFLLNVFIPQPTLAQLIGALRALKEEGRLTFPLLAECLFRAGRRDLLRDLLHLDPRFLERHLAGTMSYFSPYQLTVLHVDGELCARDIRSLIFLSKDTIGSRSTPQTFLHWVYCMENLDLLGPTDVDALMSMLRSLSRVDLQRQVQTLMGLHLSGPSHSQHYRHTP

SEQ ID NO: 14717 - protein, 765 aa, Artificial Sequence
  Synthetic Polypeptide
MALPVTALLLPLALLLHAARPACQVQLVESGGGLVQAGDSVTLSCTASGRTFSSYALAWFRQRPGKEREFVAGLRWGGPTNYADSVKDRFTISGDSAKHTMYLQMNSLKPEDTAVYYCGYNPGGWAVPSQYEYDSWGQGTQVTVSSGTGGGGSGGGGSGGGGSEFNAGVTQTPKFQVLKTGQSMTLQCAQDMNHEYMSWYRQDPGMGLRLIHYSVAIQTTDQGEVPNGYNVSRSTIEDFPLRLLSAAPSQTSVYFCASSYLGNTGELFFGEGSRLTVLEIQNPDPAVYQLRDSKSSDKSVCLFTDFDSQTNVSQSKDSDVYITDKCVLDMRSMDFKSNSAVAWSNKSDFACANAFNNSIIPEDTFFPSPESSCDVKLVEKSFETDTNLNFQNLSVIGFRILLLKVAGFNLLMTLRLWSSRAKRSGSGVKQTLNFDLLKLAGDVESNPGPTSMDWIWRILFLVGAATGAHSFEQEVTQIPAALSVPEGENLVLNCSFTDSAIYNLQWFRQDPGKGLTSLLLIQSSQREQTSGRLNASLDKSSGRSTLYIAASQPGDSATYLCAVRPTSGGSYIPTFGRGTSLIVHPYEDLKNVFPPEVAVFEPSEAEISHTQKATLVCLATGFYPDHVELSWWVNGKEVHSGVCTDPQPLKEQPALNDSRYCLSSRLRVSATFWQNPRNHFRCQVQFYGLSENDEWTQDRAKPVTQIVSAEAWGRADCGFTSESYQQGVLSATILYEILLGKATLYAVLVSALVLMAMVKRKDSRG

SEQ ID NO: 14718 - protein, 987 aa, Artificial Sequence
  Synthetic Polypeptide
MALPVTALLLPLALLLHAARPACQVQLVESGGGLVQAGDSVTLSCTASGRTFSSYALAWFRQRPGKEREFVAGLRWGGPTNYADSVKDRFTISGDSAKHTMYLQMNSLKPEDTAVYYCGYNPGGWAVPSQYEYDSWGQGTQVTVSSGTGGGGSGGGGSGGGGSEFNAGVTQTPKFQVLKTGQSMTLQCAQDMNHEYMSWYRQDPGMGLRLIHYSVAIQTTDQGEVPNGYNVSRSTIEDFPLRLLSAAPSQTSVYFCASSYLGNTGELFFGEGSRLTVLEIQNPDPAVYQLRDSKSSDKSVCLFTDFDSQTNVSQSKDSDVYITDKCVLDMRSMDFKSNSAVAWSNKSDFACANAFNNSIIPEDTFFPSPESSCDVKLVEKSFETDTNLNFQNLSVIGFRILLLKVAGFNLLMTLRLWSSRAKRSGSGVKQTLNFDLLKLAGDVESNPGPTSMDWIWRILFLVGAATGAHSFEQEVTQIPAALSVPEGENLVLNCSFTDSAIYNLQWFRQDPGKGLTSLLLIQSSQREQTSGRLNASLDKSSGRSTLYIAASQPGDSATYLCAVRPTSGGSYIPTFGRGTSLIVHPYEDLKNVFPPEVAVFEPSEAEISHTQKATLVCLATGFYPDHVELSWWVNGKEVHSGVCTDPQPLKEQPALNDSRYCLSSRLRVSATFWQNPRNHFRCQVQFYGLSENDEWTQDRAKPVTQIVSAEAWGRADCGFTSESYQQGVLSATILYEILLGKATLYAVLVSALVLMAMVKRKDSRGRAKRSGSGATNFSLLKQAGDVEENPGPSRGGIHTMATYEVLCEVARKLGTDDREVVLFLLNVFIPQPTLAQLIGALRALKEEGRLTFPLLAECLFRAGRRDLLRDLLHLDPRFLERHLAGTMSYFSPYQLTVLHVDGELCARDIRSLIFLSKDTIGSRSTPQTFLHWVYCMENLDLLGPTDVDALMSMLRSLSRVDLQRQVQTLMGLHLSGPSHSQHYRHTP

SEQ ID NO: 14719 - protein, 1039 aa, Artificial Sequence
  Synthetic Polypeptide
MALPVTALLLPLALLLHAARPLEGKPIPNPLLGLDSTGSGEDLKNVFPPEVAVFEPSKAEIAHTQKATLVCLATGFYPDHVELSWWVNGKEVHSGVCTDPQPLKEQPALNDSRYCLSSRLRVSATFWQNPRNHFRCQVQFYGLSENDEWTQDRAKPVTQIVSAEAWGRADCGITSASYHQGVLSATILYEILLGKATLYAVLVSALVLMAMVKRKDSRGRAKRSGSGATNFSLLKQAGDVEENPGPTSMALPVTALLLPLALLLHAARPACQVQLVESGGGLVQAGDSVTLSCTASGRTFSSYALAWFRQRPGKEREFVAGLRWGGPTNYADSVKDRFTISGDSAKHTMYLQMNSLKPEDTAVYYCGYNPGGWAVPSQYEYDSWGQGTQVTVSSGTGGGGSGGGGSGGGGSEFNAGVTQTPKFQVLKTGQSMTLQCAQDMNHEYMSWYRQDPGMGLRLIHYSVAIQTTDQGEVPNGYNVSRSTIEDFPLRLLSAAPSQTSVYFCASSYLGNTGELFFGEGSRLTVGGGGSGGGGSGGGGSQEVTQIPAALSVPEGENLVLNCSFTDSAIYNLQWFRQDPGKGLTSLLLIQSSQREQTSGRLNASLDKSSGRSTLYIAASQPGDSATYLCAVRPTSGGSYIPTFGRGTSLIVHPYEQKLISEEDGSGIQNPDPAVYQLRDSKSSDKSVCLFTDFDSQTNVSQSKDSDVYITDKCVLDMRSMDFKSNSAVAWSNKSDFACANAFNNSIIPEDTFFPSSDVPCDVKLVEKSFETDTNLNFQNLSVIGFRILLLKVAGFNLLMTLRLWSSRAKRSGSGVKQTLNFDLLKLAGDVESNPGPSRGHMTEYKPTVRLATRDDVPRAVRTLAAAFADYPATRHTVDPDRHIERVTELQELFLTRVGLDIGKVWVADDGAAVAVWTTPESVEAGAVFAEIGPRMAELSGSRLAAQQQMEGLLAPHRPKEPAWFLATVGVSPDHQGKGLGSAVVLPGVEAAERAGVPAFLETSAPRNLPFYERLGFTVTADVEVPEGPRTWCMTRKPGA

SEQ ID NO: 14720 - protein, 1040 aa, Artificial Sequence
  Synthetic Polypeptide
MALPVTALLLPLALLLHAARPLEQKLISEEDLGSGDRPDPAVYQLRDSKSSDKSVCLFTDFDSQTNVSQSKDSDVYITDKCVLDMRSMDFKSNSAVAWSNKSDFACANAFNNSIIPEDTFFPSPESSCDVKLVEKSFETDTNLNFQNLSVIGFRILLLKVAGFNLLMTLRLWSSSSRAKRSGSGVKQTLNFDLLKLAGDVESNPGPTSMALPVTALLLPLALLLHAARPACQVQLVESGGGLVQAGDSVTLSCTASGRTFSSYALAWFRQRPGKEREFVAGLRWGGPTNYADSVKDRFTISGDSAKHTMYLQMNSLKPEDTAVYYCGYNPGGWAVPSQYEYDSWGQGTQVTVSSGTGGGGSGGGGSGGGGSEFNAGVTQTPKFQVLKTGQSMTLQCAQDMNHEYMSWYRQDPGMGLRLIHYSVAIQTTDQGEVPNGYNVSRSTIEDFPLRLLSAAPSQTSVYFCASSYLGNTGELFFGEGSRLTVGGGGSGGGGSGGGGSQEVTQIPAALSVPEGENLVLNCSFTDSAIYNLQWFRQDPGKGLTSLLLIQSSQREQTSGRLNASLDKSSGRSTLYIAASQPGDSATYLCAVRPTSGGSYIPTFGRGTSLIVHPYGKPIPNPLLGLDSTGSGEDLKNVFPPEVAVFEPSEAEISHTQKATLVCLATGFYPDHVELSWWVNGKEVHSGVCTDPQPLKEQPALNDSRYCLSSRLRVSATFWQNPRNHFRCQVQFYGLSENDEWTQDRAKPVTQIVSAEAWGRADCGFTSESYQQGVLSATILYEILLGKATLYAVLVSALVLMAMVKRKDSRGRAKRSGSGATNFSLLKQAGDVEENPGPSRGHMTEYKPTVRLATRDDVPRAVRTLAAAFADYPATRHTVDPDRHIERVTELQELFLTRVGLDIGKVWVADDGAAVAVWTTPESVEAGAVFAEIGPRMAELSGSRLAAQQQMEGLLAPHRPKEPAWFLATVGVSPDHQGKGLGSAVVLPGVEAAERAGVPAFLETSAPRNLPFYERLGFTVTADVEVPEGPRTWCMTRKPGA

SEQ ID NO: 14721 - protein, 994 aa, Artificial Sequence
  Synthetic Polypeptide
MALPVTALLLPLALLLHAARPACQVQLVESGGGLVQAGDSVTLSCTASGRTFSSYALAWFRQRPGKEREFVAGLRWGGPTNYADSVKDRFTISGDSAKHTMYLQMNSLKPEDTAVYYCGYNPGGWAVPSQYEYDSWGQGTQVTVSSGTGGGGSGGGGSGGGGSEFNAGVTQTPKFQVLKTGQSMTLQCAQDMNHEYMSWYRQDPGMGLRLIHYSVAIQTTDQGEVPNGYNVSRSTIEDFPLRLLSAAPSQTSVYFCASSYLGNTGELFFGEGSRLTVLEDLKNVFPPEVAVFEPSEAEISHTQKATLVCLATGFYPDHVELSWWVNGKEVHSGVSTDPQPLKEQPALNDSRYCLSSRLRVSATFWQNPRNHFRCQVQFYGLSENDEWTQDRAKPVTQIVSAEAWGRADCGFTSESYQQGVLSATILYEILLGKATLYAVLVSALVLMAMVKRKDSRGRAKRSGSGATNFSLLKQAGDVEENPGPTSMDWIWRILFLVGAATGAHSFEQEVTQIPAALSVPEGENLVLNCSFTDSAIYNLQWFRQDPGKGLTSLLLIQSSQREQTSGRLNASLDKSSGRSTLYIAASQPGDSATYLCAVRPTSGGSYIPTFGRGTSLIVHPYIQNPDPAVYQLRDSKSSDKSVCLFTDFDSQTNVSQSKDSDVYITDKTVLDMRSMDFKSNSAVAWSNKSDFACANAFNNSIIPEDTFFPSPESSCDVKLVEKSFETDTNLNFQNLSVIGFRILLLKVAGFNLLMTLRLWSSRAKRSGSGVKQTLNFDLLKLAGDVESNPGPSRGHMTEYKPTVRLATRDDVPRAVRTLAAAFADYPATRHTVDPDRHIERVTELQELFLTRVGLDIGKVWVADDGAAVAVWTTPESVEAGAVFAEIGPRMAELSGSRLAAQQQMEGLLAPHRPKEPAWFLATVGVSPDHQGKGLGSAVVLPGVEAAERAGVPAFLETSAPRNLPFYERLGFTVTADVEVPEGPRTWCMTRKPGA

SEQ ID NO: 14722 - protein, 1076 aa, Artificial Sequence
  Synthetic Polypeptide
MALPVTALLLPLALLLHAARPACQVQLVESGGGLVQAGDSVTLSCTASGRTFSSYALAWFRQRPGKEREFVAGLRWGGPTNYADSVKDRFTISGDSAKHTMYLQMNSLKPEDTAVYYCGYNPGGWAVPSQYEYDSWGQGTQVTVSSGTGGGGSGGGGSGGGGSEFNAGVTQTPKFQVLKTGQSMTLQCAQDMNHEYMSWYRQDPGMGLRLIHYSVAIQTTDQGEVPNGYNVSRSTIEDFPLRLLSAAPSQTSVYFCASSYLGNTGELFFGEGSRLTVLEDLKNVFPPEVAVFEPSEAEISHTQKATLVCLATGFYPDHVELSWWVNGKEVHSGVSTDPQPLKEQPALNDSRYCLSSRLRVSATFWQNPRNHFRCQVQFYGLSENDEWTQDRAKPVTQIVSAEAWGRADCGFTSESYQQGVLSATILYEILLGKATLYAVLVSALVLMAMVKRKDSRGRAKRSGSGATNFSLLKQAGDVEENPGPTSMDWIWRILFLVGAATGAHSFEQEVTQIPAALSVPEGENLVLNCSFTDSAIYNLQWFRQDPGKGLTSLLLIQSSQREQTSGRLNASLDKSSGRSTLYIAASQPGDSATYLCAVRPTSGGSYIPTFGRGTSLIVHPYEQKLISEEDGSGTPFPSLAPPIMLLVDGKQQMVVVCLVLDVAPPGLDSPIWFSAGNGSALDAFTYGPSPATDGTWTNLAHLSLPSEELASWEPLVCHTGPGAEGHSRSTQPMHLSGEASTARTCPQEPLRGTPGGALWLGVLRLLLFKLLLFDLLLTCSCLCDPAGPLPSPATTTRLRALGSHRLHPATETGGREATSSPRPQPRDRRWGDTPPGRKPGSPVRAKRSGSGVKQTLNFDLLKLAGDVESNPGPSRGHMTEYKPTVRLATRDDVPRAVRTLAAAFADYPATRHTVDPDRHIERVTELQELFLTRVGLDIGKVWVADDGAAVAVWTTPESVEAGAVFAEIGPRMAELSGSRLAAQQQMEGLLAPHRPKEPAWFLATVGVSPDHQGKGLGSAVVLPGVEAAERAGVPAFLETSAPRNLPFYERLGFTVTADVEVPEGPRTWCMTRKPGA

SEQ ID NO: 14723 - protein, 1094 aa, Artificial Sequence
  Synthetic Polypeptide
MALPVTALLLPLALLLHAARPLEDLKNVFPPEVAVFEPSEAEISHTQKATLVCLATGFYPDHVELSWWVNGKEVHSGVSTDPQPLKEQPALNDSRYCLSSRLRVSATFWQNPRNHFRCQVQFYGLSENDEWTQDRAKPVTQIVSAEAWGRADCGFTSESYQQGVLSATILYEILLGKATLYAVLVSALVLMAMVKRKDSRGRAKRSGSGATNFSLLKQAGDVEENPGPTSMALPVTALLLPLALLLHAARPACQVQLVESGGGLVQAGDSVTLSCTASGRTFSSYALAWFRQRPGKEREFVAGLRWGGPTNYADSVKDRFTISGDSAKHTMYLQMNSLKPEDTAVYYCGYNPGGWAVPSQYEYDSWGQGTQVTVSSGTGGGGSGGGGSGGGGSEFNAGVTQTPKFQVLKTGQSMTLQCAQDMNHEYMSWYRQDPGMGLRLIHYSVAIQTTDQGEVPNGYNVSRSTIEDFPLRLLSAAPSQTSVYFCASSYLGNTGELFFGEGSRLTVGGGGSGGGGSGGGGSQEVTQIPAALSVPEGENLVLNCSFTDSAIYNLQWFRQDPGKGLTSLLLIQSSQREQTSGRLNASLDKSSGRSTLYIAASQPGDSATYLCAVRPTSGGSYIPTFGRGTSLIVHPYEQKLISEEDLGSGTPFPSLAPPIMLLVDGKQQMVVVCLVLDVAPPGLDSPIWFSAGNGSALDAFTYGPSPATDGTWTNLAHLSLPSEELASWEPLVCHTGPGAEGHSRSTQPMHLSGEASTARTCPQEPLRGTPGGALWLGVLRLLLFKLLLFDLLLTCSCLCDPAGPLPSPATTTRLRALGSHRLHPATETGGREATSSPRPQPRDRRWGDTPPGRKPGSPVRAKRSGSGVKQTLNFDLLKLAGDVESNPGPSRSRGHMTEYKPTVRLATRDDVPRAVRTLAAAFADYPATRHTVDPDRHIERVTELQELFLTRVGLDIGKVWVADDGAAVAVWTTPESVEAGAVFAEIGPRMAELSGSRLAAQQQMEGLLAPHRPKEPAWFLATVGVSPDHQGKGLGSAVVLPGVEAAERAGVPAFLETSAPRNLPFYERLGFTVTADVEVPEGPRTWCMTRKPGA

SEQ ID NO: 14724 - protein, 1031 aa, Artificial Sequence
  Synthetic Polypeptide
MALPVTALLLPLALLLHAARPACQVQLVESGGGLVQAGDSVTLSCTASGRTFSSYALAWFRQRPGKEREFVAGLRWGGPTNYADSVKDRFTISGDSAKHTMYLQMNSLKPEDTAVYYCGYNPGGWAVPSQYEYDSWGQGTQVTVSSGTGGGGSGGGGSGGGGSEFNAGVTQTPKFQVLKTGQSMTLQCAQDMNHEYMSWYRQDPGMGLRLIHYSVAIQTTDQGEVPNGYNVSRSTIEDFPLRLLSAAPSQTSVYFCASSYLGNTGELFFGEGSRLTVLEGKPIPNPLLGLDSTGSGDKQLDADVSPKPTIFLPSIAETKLQKAGTYLCLLEKFFPDVIKIHWQEKKSNTILGSQEGNTMKTNDTYMKFSWLTVPEKSLDKEHRCIVRHENNKNGVDQEIIFPPIKTDVITMDPKDNCSKDANDTLLLQLTNTSAYYMYLLLLLKSVVYFAIITCCLLRRTAFCCNGEKSRAKRSGSGATNFSLLKQAGDVEENPGPTSMDWIWRILFLVGAATGAHSFEQEVTQIPAALSVPEGENLVLNCSFTDSAIYNLQWFRQDPGKGLTSLLLIQSSQREQTSGRLNASLDKSSGRSTLYIAASQPGDSATYLCAVRPTSGGSYIPTFGRGTSLIVHPYEQKLISEEDGSGSQPHTKPSVFVMKNGTNVACLVKEFYPKDIRINLVSSKKITEFDPAIVISPSGKYNAVKLGKYEDSNSVTCSVQHDNKTVHSTDFEVKTDSTDHVKPKETENTKQPSKSCHKPKAIVHTEKVNMMSLTVLGLRMLFAKTVAVNFLLTAKLFFLRAKRSGSGVKQTLNFDLLKLAGDVESNPGPSRGHMTEYKPTVRLATRDDVPRAVRTLAAAFADYPATRHTVDPDRHIERVTELQELFLTRVGLDIGKVWVADDGAAVAVWTTPESVEAGAVFAEIGPRMAELSGSRLAAQQQMEGLLAPHRPKEPAWFLATVGVSPDHQGKGLGSAVVLPGVEAAERAGVPAFLETSAPRNLPFYERLGFTVTADVEVPEGPRTWCMTRKPGA

SEQ ID NO: 14725 - protein, 769 aa, Artificial Sequence
  Synthetic Polypeptide
MALPVTALLLPLALLLHAARPACQVQLVESGGGLVQAGDSVTLSCTASGRTFSSYALAWFRQRPGKEREFVAGLRWGGPTNYADSVKDRFTISGDSAKHTMYLQMNSLKPEDTAVYYCGYNPGGWAVPSQYEYDSWGQGTQVTVSSGTGGGGSGGGGSGGGGSEFNAGVTQTPKFQVLKTGQSMTLQCAQDMNHEYMSWYRQDPGMGLRLIHYSVAIQTTDQGEVPNGYNVSRSTIEDFPLRLLSAAPSQTSVYFCASSYLGNTGELFFGEGSRLTVLESQPHTKPSVFVMKNGTNVACLVKEFYPKDIRINLVSSKKITEFDPAIVISPSGKYNAVKLGKYEDSNSVTCSVQHDNKTVHSTDFEVKTDSTDHVKPKETENTKQPSKSCHKPKAIVHTEKVNMMSLTVLGLRMLFAKTVAVNFLLTAKLFFLRAKRSGSGATNFSLLKQAGDVEENPGPTSMDWIWRILFLVGAATGAHSFEQEVTQIPAALSVPEGENLVLNCSFTDSAIYNLQWFRQDPGKGLTSLLLIQSSQREQTSGRLNASLDKSSGRSTLYIAASQPGDSATYLCAVRPTSGGSYIPTFGRGTSLIVHPYDKQLDADVSPKPTIFLPSIAETKLQKAGTYLCLLEKFFPDVIKIHWQEKKSNTILGSQEGNTMKTNDTYMKFSWLTVPEKSLDKEHRCIVRHENNKNGVDQEIIFPPIKTDVITMDPKDNCSKDANDTLLLQLTNTSAYYMYLLLLLKSVVYFAIITCCLLRRTAFCCNGEKS

SEQ ID NO: 14726 - protein, 1046 aa, Artificial Sequence
  Synthetic Polypeptide
MALPVTALLLPLALLLHAARPLEGKPIPNPLLGLDSTGSGDKQLDADVSPKPTIFLPSIAETKLQKAGTYLCLLEKFFPDVIKIHWQEKKSNTILGSQEGNTMKTNDTYMKFSWLTVPEKSLDKEHRCIVRHENNKNGVDQEIIFPPIKTDVITMDPKDNCSKDANDTLLLQLTNTSAYYMYLLLLLKSVVYFAIITCCLLRRTAFCCNGEKSRAKRSGSGATNFSLLKQAGDVEENPGPTSMALPVTALLLPLALLLHAARPACQVQLVESGGGLVQAGDSVTLSCTASGRTFSSYALAWFRQRPGKEREFVAGLRWGGPTNYADSVKDRFTISGDSAKHTMYLQMNSLKPEDTAVYYCGYNPGGWAVPSQYEYDSWGQGTQVTVSSGTGGGGSGGGGSGGGGSEFNAGVTQTPKFQVLKTGQSMTLQCAQDMNHEYMSWYRQDPGMGLRLIHYSVAIQTTDQGEVPNGYNVSRSTIEDFPLRLLSAAPSQTSVYFCASSYLGNTGELFFGEGSRLTVGGGGSGGGGSGGGGSQEVTQIPAALSVPEGENLVLNCSFTDSAIYNLQWFRQDPGKGLTSLLLIQSSQREQTSGRLNASLDKSSGRSTLYIAASQPGDSATYLCAVRPTSGGSYIPTFGRGTSLIVHPYEQKLISEEDGSGSQPHTKPSVFVMKNGTNVACLVKEFYPKDIRINLVSSKKITEFDPAIVISPSGKYNAVKLGKYEDSNSVTCSVQHDNKTVHSTDFEVKTDSTDHVKPKETENTKQPSKSCHKPKAIVHTEKVNMMSLTVLGLRMLFAKTVAVNFLLTAKLFFLRAKRSGSGVKQTLNFDLLKLAGDVESNPGPSRGHMTEYKPTVRLATRDDVPRAVRTLAAAFADYPATRHTVDPDRHIERVTELQELFLTRVGLDIGKVWVADDGAAVAVWTTPESVEAGAVFAEIGPRMAELSGSRLAAQQQMEGLLAPHRPKEPAWFLATVGVSPDHQGKGLGSAVVLPGVEAAERAGVPAFLETSAPRNLPFYERLGFTVTADVEVPEGPRTWCMTRKPGA

SEQ ID NO: 14727 - protein, 1173 aa, Artificial Sequence
  Synthetic Polypeptide
MALPVTALLLPLALLLHAARPACQVQLVESGGGLVQAGDSVTLSCTASGRTFSSYALAWFRQRPGKEREFVAGLRWGGPTNYADSVKDRFTISGDSAKHTMYLQMNSLKPEDTAVYYCGYNPGGWAVPSQYEYDSWGQGTQVTVSSGTGGGGSGGGGSGGGGSEFNAGVTQTPKFQVLKTGQSMTLQCAQDMNHEYMSWYRQDPGMGLRLIHYSVAIQTTDQGEVPNGYNVSRSTIEDFPLRLLSAAPSQTSVYFCASSYLGNTGELFFGEGSRLTVGQPKANPTVTLFPPSSEELQANKATLVCLISDFYPGAVTVAWKADGSPVKAGVETTKPSKQSNNKYAASSYLSLTPEQWKSHRSYSCQVTHEGSTVEKTVAPTECSGSQSFGLLDPKLCYLLDGILFIYGVILTALFLRVKFSRSADAPAYQQGQNQLYNELNLGRREEYDVLDKRRGRDPEMGGKPQRRKNPQEGLYNELQKDKMAEAYSEIGMKGERRRGKGHDGLYQGLSTATKDTYDALHMQALPPRRAKRSGSGATNFSLLKQAGDVEENPGPTSMDWIWRILFLVGAATGAHSFEQEVTQIPAALSVPEGENLVLNCSFTDSAIYNLQWFRQDPGKGLTSLLLIQSSQREQTSGRLNASLDKSSGRSTLYIAASQPGDSATYLCAVRPTSGGSYIPTFGRGTSLIVHPYASTKGPSVFPLAPSSKSTSGGTAALGCLVKDYFPEPVTVSWNSGALTSGVHTFPAVLQSSGLYSLSSVVTVPSSSLGTQTYICNVNHKPSNTKVDKRVEPKSCGTQSFGLLDPKLCYLLDGILFIYGVILTALFLRVKFSRSADAPAYQQGQNQLYNELNLGRREEYDVLDKRRGRDPEMGGKPQRRKNPQEGLYNELQKDKMAEAYSEIGMKGERRRGKGHDGLYQGLSTATKDTYDALHMQALPPRRAKRSGSGVKQTLNFDLLKLAGDVESNPGPSRGHMTEYKPTVRLATRDDVPRAVRTLAAAFADYPATRHTVDPDRHIERVTELQELFLTRVGLDIGKVWVADDGAAVAVWTTPESVEAGAVFAEIGPRMAELSGSRLAAQQQMEGLLAPHRPKEPAWFLATVGVSPDHQGKGLGSAVVLPGVEAAERAGVPAFLETSAPRNLPFYERLGFTVTADVEVPEGPRTWCMTRKPGA

SEQ ID NO: 14728 - protein, 957 aa, Artificial Sequence
  Synthetic Polypeptide
MALPVTALLLPLALLLHAARPACQVQLVESGGGLVQAGDSVTLSCTASGRTFSSYALAWFRQRPGKEREFVAGLRWGGPTNYADSVKDRFTISGDSAKHTMYLQMNSLKPEDTAVYYCGYNPGGWAVPSQYEYDSWGQGTQVTVSSGTGGGGSGGGGSGGGGSEFNAGVTQTPKFQVLKTGQSMTLQCAQDMNHEYMSWYRQDPGMGLRLIHYSVAIQTTDQGEVPNGYNVSRSTIEDFPLRLLSAAPSQTSVYFCASSYLGNTGELFFGEGSRLTVLEDLKNVFPPEVAVFEPSEAEISHTQKATLVCLATGFYPDHVELSWWVNGKEVHSGVSTDPQPLKEQPALNDSRYCLSSRLRVSATFWQNPRNHFRCQVQFYGLSENDEWTQDRAKPVTQIVSAEAWGRADCGSQSFGLLDPKLCYLLDGILFIYGVILTALFLRVKFSRSADAPAYQQGQNQLYNELNLGRREEYDVLDKRRGRDPEMGGKPQRRKNPQEGLYNELQKDKMAEAYSEIGMKGERRRGKGHDGLYQGLSTATKDTYDALHMQALPPRRAKRSGSGATNFSLLKQAGDVEENPGPTSMDWIWRILFLVGAATGAHSFEQEVTQIPAALSVPEGENLVLNCSFTDSAIYNLQWFRQDPGKGLTSLLLIQSSQREQTSGRLNASLDKSSGRSTLYIAASQPGDSATYLCAVRPTSGGSYIPTFGRGTSLIVHPYIQNPDPAVYQLRDSKSSDKSVCLFTDFDSQTNVSQSKDSDVYITDKTVLDMRSMDFKSNSAVAWSNKSDFACANAFNNSIIPEDTFFPSPESSCGTQSFGLLDPKLCYLLDGILFIYGVILTALFLRVKFSRSADAPAYQQGQNQLYNELNLGRREEYDVLDKRRGRDPEMGGKPQRRKNPQEGLYNELQKDKMAEAYSEIGMKGERRRGKGHDGLYQGLSTATKDTYDALHMQALPPR

SEQ ID NO: 14729 - protein, 957 aa, Artificial Sequence
  Synthetic Polypeptide
MALPVTALLLPLALLLHAARPACQVQLVESGGGLVQAGDSVTLSCTASGRTFSSYALAWFRQRPGKEREFVAGLRWGGPTNYADSVKDRFTISGDSAKHTMYLQMNSLKPEDTAVYYCGYNPGGWAVPSQYEYDSWGQGTQVTVSSGTGGGGSGGGGSGGGGSEFNAGVTQTPKFQVLKTGQSMTLQCAQDMNHEYMSWYRQDPGMGLRLIHYSVAIQTTDQGEVPNGYNVSRSTIEDFPLRLLSAAPSQTSVYFCASSYLGNTGELFFGEGSRLTVLEDLKNVFPPEVAVFEPSKAEIAHTQKATLVCLATGFYPDHVELSWWVNGKEVHSGVCTDPQPLKEQPALNDSRYCLSSRLRVSATFWQNPRNHFRCQVQFYGLSENDEWTQDRAKPVTQIVSAEAWGRADCGSQSFGLLDPKLCYLLDGILFIYGVILTALFLRVKFSRSADAPAYQQGQNQLYNELNLGRREEYDVLDKRRGRDPEMGGKPQRRKNPQEGLYNELQKDKMAEAYSEIGMKGERRRGKGHDGLYQGLSTATKDTYDALHMQALPPRRAKRSGSGATNFSLLKQAGDVEENPGPTSMDWIWRILFLVGAATGAHSFEQEVTQIPAALSVPEGENLVLNCSFTDSAIYNLQWFRQDPGKGLTSLLLIQSSQREQTSGRLNASLDKSSGRSTLYIAASQPGDSATYLCAVRPTSGGSYIPTFGRGTSLIVHPYIQNPDPAVYQLRDSKSSDKSVCLFTDFDSQTNVSQSKDSDVYITDKCVLDMRSMDFKSNSAVAWSNKSDFACANAFNNSIIPEDTFFPSSDVPCGTQSFGLLDPKLCYLLDGILFIYGVILTALFLRVKFSRSADAPAYQQGQNQLYNELNLGRREEYDVLDKRRGRDPEMGGKPQRRKNPQEGLYNELQKDKMAEAYSEIGMKGERRRGKGHDGLYQGLSTATKDTYDALHMQALPPR

SEQ ID NO: 14730 - protein, 1028 aa, Artificial Sequence
  Synthetic Polypeptide
MALPVTALLLPLALLLHAARPACQVQLVESGGGLVQAGDSVTLSCTASGRTFSSYALAWFRQRPGKEREFVAGLRWGGPTNYADSVKDRFTISGDSAKHTMYLQMNSLKPEDTAVYYCGYNPGGWAVPSQYEYDSWGQGTQVTVSSGTGGGGSGGGGSGGGGSEFNAGVTQTPKFQVLKTGQSMTLQCAQDMNHEYMSWYRQDPGMGLRLIHYSVAIQTTDQGEVPNGYNVSRSTIEDFPLRLLSAAPSQTSVYFCASSYLGNTGELFFGEGSRLTVLEGKPIPNPLLGLDSTGSGEDLKNVFPPEVAVFEPSEAEISHTQKATLVCLATGFYPDHVELSWWVNGKEVHSGVSTDPQPLKEQPALNDSRYCLSSRLRVSATFWQNPRNHFRCQVQFYGLSENDEWTQDRAKPVTQIVSAEAWGRADCGSQSFGLLDPKLCYLLDGILFIYGVILTALFLRVKFSRSADAPAYQQGQNQLYNELNLGRREEYDVLDKRRGRDPEMGGKPQRRKNPQEGLYNELQKDKMAEAYSEIGMKGERRRGKGHDGLYQGLSTATKDTYDALHMQALPPRRAKRSGSGATNFSLLKQAGDVEENPGPTSMDWIWRILFLVGAATGAHSFEQEVTQIPAALSVPEGENLVLNCSFTDSAIYNLQWFRQDPGKGLTSLLLIQSSQREQTSGRLNASLDKSSGRSTLYIAASQPGDSATYLCAVRPTSGGSYIPTFGRGTSLIVHPYEQKLISEEDGSGIQNPDPAVYQLRDSKSSDKSVCLFTDFDSQTNVSQSKDSDVYITDKTVLDMRSMDFKSNSAVAWSNKSDFACANAFNNSIIPEDTFFPSPESSCGTQSFGLLDPKLCYLLDGILFIYGVILTALFLRSKRSRLLHSDYMNMTPRRPGPTRKHYQPYAPPRDFAAYRSRVKFSRSADAPAYQQGQNQLYNELNLGRREEYDVLDKRRGRDPEMGGKPQRRKNPQEGLYNELQKDKMAEAYSEIGMKGERRRGKGHDGLYQGLSTATKDTYDALHMQALPPR

SEQ ID NO: 14731 - protein, 1069 aa, Artificial Sequence
  Synthetic Polypeptide
MALPVTALLLPLALLLHAARPACQVQLVESGGGLVQAGDSVTLSCTASGRTFSSYALAWFRQRPGKEREFVAGLRWGGPTNYADSVKDRFTISGDSAKHTMYLQMNSLKPEDTAVYYCGYNPGGWAVPSQYEYDSWGQGTQVTVSSGTGGGGSGGGGSGGGGSEFNAGVTQTPKFQVLKTGQSMTLQCAQDMNHEYMSWYRQDPGMGLRLIHYSVAIQTTDQGEVPNGYNVSRSTIEDFPLRLLSAAPSQTSVYFCASSYLGNTGELFFGEGSRLTVLEGKPIPNPLLGLDSTGSGEDLKNVFPPEVAVFEPSEAEISHTQKATLVCLATGFYPDHVELSWWVNGKEVHSGVSTDPQPLKEQPALNDSRYCLSSRLRVSATFWQNPRNHFRCQVQFYGLSENDEWTQDRAKPVTQIVSAEAWGRADCGSQSFGLLDPKLCYLLDGILFIYGVILTALFLRSKRSRLLHSDYMNMTPRRPGPTRKHYQPYAPPRDFAAYRSRVKFSRSADAPAYQQGQNQLYNELNLGRREEYDVLDKRRGRDPEMGGKPQRRKNPQEGLYNELQKDKMAEAYSEIGMKGERRRGKGHDGLYQGLSTATKDTYDALHMQALPPRRAKRSGSGATNFSLLKQAGDVEENPGPTSMDWIWRILFLVGAATGAHSFEQEVTQIPAALSVPEGENLVLNCSFTDSAIYNLQWFRQDPGKGLTSLLLIQSSQREQTSGRLNASLDKSSGRSTLYIAASQPGDSATYLCAVRPTSGGSYIPTFGRGTSLIVHPYEQKLISEEDGSGIQNPDPAVYQLRDSKSSDKSVCLFTDFDSQTNVSQSKDSDVYITDKTVLDMRSMDFKSNSAVAWSNKSDFACANAFNNSIIPEDTFFPSPESSCGTQSFGLLDPKLCYLLDGILFIYGVILTALFLRSKRSRLLHSDYMNMTPRRPGPTRKHYQPYAPPRDFAAYRSRVKFSRSADAPAYQQGQNQLYNELNLGRREEYDVLDKRRGRDPEMGGKPQRRKNPQEGLYNELQKDKMAEAYSEIGMKGERRRGKGHDGLYQGLSTATKDTYDALHMQALPPR

SEQ ID NO: 14732 - protein, 1030 aa, Artificial Sequence
  Synthetic Polypeptide
MALPVTALLLPLALLLHAARPACQVQLVESGGGLVQAGDSVTLSCTASGRTFSSYALAWFRQRPGKEREFVAGLRWGGPTNYADSVKDRFTISGDSAKHTMYLQMNSLKPEDTAVYYCGYNPGGWAVPSQYEYDSWGQGTQVTVSSGTGGGGSGGGGSGGGGSEFNAGVTQTPKFQVLKTGQSMTLQCAQDMNHEYMSWYRQDPGMGLRLIHYSVAIQTTDQGEVPNGYNVSRSTIEDFPLRLLSAAPSQTSVYFCASSYLGNTGELFFGEGSRLTVLEGKPIPNPLLGLDSTGSGEDLKNVFPPEVAVFEPSEAEISHTQKATLVCLATGFYPDHVELSWWVNGKEVHSGVSTDPQPLKEQPALNDSRYCLSSRLRVSATFWQNPRNHFRCQVQFYGLSENDEWTQDRAKPVTQIVSAEAWGRADCGSQSFGLLDPKLCYLLDGILFIYGVILTALFLRVKFSRSADAPAYQQGQNQLYNELNLGRREEYDVLDKRRGRDPEMGGKPQRRKNPQEGLYNELQKDKMAEAYSEIGMKGERRRGKGHDGLYQGLSTATKDTYDALHMQALPPRRAKRSGSGATNFSLLKQAGDVEENPGPTSMDWIWRILFLVGAATGAHSFEQEVTQIPAALSVPEGENLVLNCSFTDSAIYNLQWFRQDPGKGLTSLLLIQSSQREQTSGRLNASLDKSSGRSTLYIAASQPGDSATYLCAVRPTSGGSYIPTFGRGTSLIVHPYEQKLISEEDLGSGIQNPDPAVYQLRDSKSSDKSVCLFTDFDSQTNVSQSKDSDVYITDKTVLDMRSMDFKSNSAVAWSNKSDFACANAFNNSIIPEDTFFPSPESSCGTQSFGLLDPKLCYLLDGILFIYGVILTALFLKRGRKKLLYIFKQPFMRPVQTTQEEDGCSCRFPEEEEGGCELRVKFSRSADAPAYQQGQNQLYNELNLGRREEYDVLDKRRGRDPEMGGKPQRRKNPQEGLYNELQKDKMAEAYSEIGMKGERRRGKGHDGLYQGLSTATKDTYDALHMQALPPR

SEQ ID NO: 14733 - protein, 1072 aa, Artificial Sequence
  Synthetic Polypeptide
MALPVTALLLPLALLLHAARPACQVQLVESGGGLVQAGDSVTLSCTASGRTFSSYALAWFRQRPGKEREFVAGLRWGGPTNYADSVKDRFTISGDSAKHTMYLQMNSLKPEDTAVYYCGYNPGGWAVPSQYEYDSWGQGTQVTVSSGTGGGGSGGGGSGGGGSEFNAGVTQTPKFQVLKTGQSMTLQCAQDMNHEYMSWYRQDPGMGLRLIHYSVAIQTTDQGEVPNGYNVSRSTIEDFPLRLLSAAPSQTSVYFCASSYLGNTGELFFGEGSRLTVLEGKPIPNPLLGLDSTGSGEDLKNVFPPEVAVFEPSEAEISHTQKATLVCLATGFYPDHVELSWWVNGKEVHSGVSTDPQPLKEQPALNDSRYCLSSRLRVSATFWQNPRNHFRCQVQFYGLSENDEWTQDRAKPVTQIVSAEAWGRADCGSQSFGLLDPKLCYLLDGILFIYGVILTALFLKRGRKKLLYIFKQPFMRPVQTTQEEDGCSCRFPEEEEGGCELRVKFSRSADAPAYQQGQNQLYNELNLGRREEYDVLDKRRGRDPEMGGKPQRRKNPQEGLYNELQKDKMAEAYSEIGMKGERRRGKGHDGLYQGLSTATKDTYDALHMQALPPRRAKRSGSGATNFSLLKQAGDVEENPGPTSMDWIWRILFLVGAATGAHSFEQEVTQIPAALSVPEGENLVLNCSFTDSAIYNLQWFRQDPGKGLTSLLLIQSSQREQTSGRLNASLDKSSGRSTLYIAASQPGDSATYLCAVRPTSGGSYIPTFGRGTSLIVHPYEQKLISEEDLGSGIQNPDPAVYQLRDSKSSDKSVCLFTDFDSQTNVSQSKDSDVYITDKTVLDMRSMDFKSNSAVAWSNKSDFACANAFNNSIIPEDTFFPSPESSCGTQSFGLLDPKLCYLLDGILFIYGVILTALFLKRGRKKLLYIFKQPFMRPVQTTQEEDGCSCRFPEEEEGGCELRVKFSRSADAPAYQQGQNQLYNELNLGRREEYDVLDKRRGRDPEMGGKPQRRKNPQEGLYNELQKDKMAEAYSEIGMKGERRRGKGHDGLYQGLSTATKDTYDALHMQALPPR

SEQ ID NO: 14734 - protein, 962 aa, Artificial Sequence
  Synthetic Polypeptide
MALPVTALLLPLALLLHAARPACQVQLVESGGGLVQAGDSVTLSCTASGRTFSSYALAWFRQRPGKEREFVAGLRWGGPTNYADSVKDRFTISGDSAKHTMYLQMNSLKPEDTAVYYCGYNPGGWAVPSQYEYDSWGQGTQVTVSSGTGGGGSGGGGSGGGGSEFNAGVTQTPKFQVLKTGQSMTLQCAQDMNHEYMSWYRQDPGMGLRLIHYSVAIQTTDQGEVPNGYNVSRSTIEDFPLRLLSAAPSQTSVYFCASSYLGNTGELFFGEGSRLTVLEQSFGLLDPKLCYLLDGILFIYGVILTALFLRVKFSRSADAPAYQQGQNQLYNELNLGRREEYDVLDKRRGRDPEMGGKPQRRKNPQEGLYNELQKDKMAEAYSEIGMKGERRRGKGHDGLYQGLSTATKDTYDALHMQALPPRRAKRSGSGATNFSLLKQAGDVEENPGPTSMDWIWRILFLVGAATGAHSFEQEVTQIPAALSVPEGENLVLNCSFTDSAIYNLQWFRQDPGKGLTSLLLIQSSQREQTSGRLNASLDKSSGRSTLYIAASQPGDSATYLCAVRPTSGGSYIPTFGRGTSLIVHPYQSFGLLDPKLCYLLDGILFIYGVILTALFLRVKFSRSADAPAYQQGQNQLYNELNLGRREEYDVLDKRRGRDPEMGGKPQRRKNPQEGLYNELQKDKMAEAYSEIGMKGERRRGKGHDGLYQGLSTATKDTYDALHMQALPPRRAKRSGSGVKQTLNFDLLKLAGDVESNPGPSRGHMTEYKPTVRLATRDDVPRAVRTLAAAFADYPATRHTVDPDRHIERVTELQELFLTRVGLDIGKVWVADDGAAVAVWTTPESVEAGAVFAEIGPRMAELSGSRLAAQQQMEGLLAPHRPKEPAWFLATVGVSPDHQGKGLGSAVVLPGVEAAERAGVPAFLETSAPRNLPFYERLGFTVTADVEVPEGPRTWCMTRKPGA

SEQ ID NO: 14735 - protein, 787 aa, Artificial Sequence
  Synthetic Polypeptide
MALPVTALLLPLALLLHAARPACQVQLVESGGGLVQAGDSVTLSCTASGRTFSSYALAWFRQRPGKEREFVAGLRWGGPTNYADSVKDRFTISGDSAKHTMYLQMNSLKPEDTAVYYCGYNPGGWAVPSQYEYDSWGQGTQVTVSSGTGGGGSGGGGSGGGGSEFNAGVTQTPKFQVLKTGQSMTLQCAQDMNHEYMSWYRQDPGMGLRLIHYSVAIQTTDQGEVPNGYNVSRSTIEDFPLRLLSAAPSQTSVYFCASSYLGNTGELFFGEGSRLTVLEGQPKANPTVTLFPPSSEELQANKATLVCLISDFYPGAVTVAWKADGSPVKAGVETTKPSKQSNNKYAASSYLSLTPEQWKSHRSYSCQVTHEGSTVEKTVAPTECSPIKTDVITMDPKDNCSKDANDTLLLQLTNTSAYYMYLLLLLKSVVYFAIITCCLLRRTAFCCNGEKSRAKRSGSGATNFSLLKQAGDVEENPGPTSMDWIWRILFLVGAATGAHSFEQEVTQIPAALSVPEGENLVLNCSFTDSAIYNLQWFRQDPGKGLTSLLLIQSSQREQTSGRLNASLDKSSGRSTLYIAASQPGDSATYLCAVRPTSGGSYIPTFGRGTSLIVHPYASTKGPSVFPLAPSSKSTSGGTAALGCLVKDYFPEPVTVSWNSGALTSGVHTFPAVLQSSGLYSLSSVVTVPSSSLGTQTYICNVNHKPSNTKVDKRVEPKSCEVKTDSTDHVKPKETENTKQPSKSCHKPKAIVHTEKVNMMSLTVLGLRMLFAKTVAVNFLLTAKLFFL

SEQ ID NO: 14736 - protein, 765 aa, Artificial Sequence
  Synthetic Polypeptide
MALPVTALLLPLALLLHAARPACQVQLVESGGGLVQAGDSVTLSCTASGRTFSSYALAWFRQRPGKEREFVAGLRWGGPTNYADSVKDRFTISGDSAKHTMYLQMNSLKPEDTAVYYCGYNPGGWAVPSQYEYDSWGQGTQVTVSSGTGGGGSGGGGSGGGGSEFNAGVTQTPKFQVLKTGQSMTLQCAQDMNHEYMSWYRQDPGMGLRLIHYSVAIQTTDQGEVPNGYNVSRSTIEDFPLRLLSAAPSQTSVYFCASSYLGNTGELFFGEGSRLTVLEGQPKANPTVTLFPPSSEELQANKATLVCLISDFYPGAVTVAWKADGSPVKAGVETTKPSKQSNNKYAASSYLSLTPEQWKSHRSYSCQVTHEGSTVEKTVAPTECSGRADCGITSASYHQGVLSATILYEILLGKATLYAVLVSALVLMAMVKRKDSRGRAKRSGSGATNFSLLKQAGDVEENPGPTSMDWIWRILFLVGAATGAHSFEQEVTQIPAALSVPEGENLVLNCSFTDSAIYNLQWFRQDPGKGLTSLLLIQSSQREQTSGRLNASLDKSSGRSTLYIAASQPGDSATYLCAVRPTSGGSYIPTFGRGTSLIVHPYASTKGPSVFPLAPSSKSTSGGTAALGCLVKDYFPEPVTVSWNSGALTSGVHTFPAVLQSSGLYSLSSVVTVPSSSLGTQTYICNVNHKPSNTKVDKRVEPKSCIPEDTFFPSSDVPCDVKLVEKSFETDTNLNFQNLSVIGFRILLLKVAGFNLLMTLRLWSS

SEQ ID NO: 14737 - protein, 765 aa, Artificial Sequence
  Synthetic Polypeptide
MALPVTALLLPLALLLHAARPACQVQLVESGGGLVQAGDSVTLSCTASGRTFSSYALAWFRQRPGKEREFVAGLRWGGPTNYADSVKDRFTISGDSAKHTMYLQMNSLKPEDTAVYYCGYNPGGWAVPSQYEYDSWGQGTQVTVSSGTGGGGSGGGGSGGGGSEFNAGVTQTPKFQVLKTGQSMTLQCAQDMNHEYMSWYRQDPGMGLRLIHYSVAIQTTDQGEVPNGYNVSRSTIEDFPLRLLSAAPSQTSVYFCASSYLGNTGELFFGEGSRLTVLEGQPKANPTVTLFPPSSEELQANKATLVCLISDFYPGAVTVAWKADGSPVKAGVETTKPSKQSNNKYAASSYLSLTPEQWKSHRSYSCQVTHEGSTVEKTVAPTECSGRADCGFTSESYQQGVLSATILYEILLGKATLYAVLVSALVLMAMVKRKDSRGRAKRSGSGATNFSLLKQAGDVEENPGPTSMDWIWRILFLVGAATGAHSFEQEVTQIPAALSVPEGENLVLNCSFTDSAIYNLQWFRQDPGKGLTSLLLIQSSQREQTSGRLNASLDKSSGRSTLYIAASQPGDSATYLCAVRPTSGGSYIPTFGRGTSLIVHPYASTKGPSVFPLAPSSKSTSGGTAALGCLVKDYFPEPVTVSWNSGALTSGVHTFPAVLQSSGLYSLSSVVTVPSSSLGTQTYICNVNHKPSNTKVDKRVEPKSCIPEDTFFPSPESSCDVKLVEKSFETDTNLNFQNLSVIGFRILLLKVAGFNLLMTLRLWSS

SEQ ID NO: 14738 - protein, 591 aa, Artificial Sequence
  Synthetic Polypeptide
MALPVTALLLPLALLLHAARPACQVQLVESGGGLVQAGDSVTLSCTASGRTFSSYALAWFRQRPGKEREFVAGLRWGGPTNYADSVKDRFTISGDSAKHTMYLQMNSLKPEDTAVYYCGYNPGGWAVPSQYEYDSWGQGTQVTVSSGTGGGGSGGGGSGGGGSEFNAGVTQTPKFQVLKTGQSMTLQCAQDMNHEYMSWYRQDPGMGLRLIHYSVAIQTTDQGEVPNGYNVSRSTIEDFPLRLLSAAPSQTSVYFCASSYLGNTGELFFGEGSRLTVGGGGSGGGGSGGGGSQEVTQIPAALSVPEGENLVLNCSFTDSAIYNLQWFRQDPGKGLTSLLLIQSSQREQTSGRLNASLDKSSGRSTLYIAASQPGDSATYLCAVRPTSGGSYIPTFGRGTSLIVHPYDGNEEMGGITQTPYKVSISGTTVILTCPQYPGSEILWQHNDKNIGGDEDDKNIGSDEDHLSLKEFSELEQSGYYVCYPRGSKPEDANFYLYLRARVCENCMEMDVMSVATIVIVDICITGGLLLLVYYWSKNRKAKAKPVTRGAGAGGRQRGQNKERPPPVPNPDYEPIRKGQRDLYSGLNQRRI

SEQ ID NO: 14739 - protein, 556 aa, Artificial Sequence
  Synthetic Polypeptide
MALPVTALLLPLALLLHAARPACQVQLVESGGGLVQAGDSVTLSCTASGRTFSSYALAWFRQRPGKEREFVAGLRWGGPTNYADSVKDRFTISGDSAKHTMYLQMNSLKPEDTAVYYCGYNPGGWAVPSQYEYDSWGQGTQVTVSSGTGGGGSGGGGSGGGGSEFNAGVTQTPKFQVLKTGQSMTLQCAQDMNHEYMSWYRQDPGMGLRLIHYSVAIQTTDQGEVPNGYNVSRSTIEDFPLRLLSAAPSQTSVYFCASSYLGNTGELFFGEGSRLTVGGGGSGGGGSGGGGSQEVTQIPAALSVPEGENLVLNCSFTDSAIYNLQWFRQDPGKGLTSLLLIQSSQREQTSGRLNASLDKSSGRSTLYIAASQPGDSATYLCAVRPTSGGSYIPTFGRGTSLIVHPYFKIPIEELEDRVFVNCNTSITWVEGTVGTLLSDITRLDLGKRILDPRGIYRCNGTDIYKDKESTVQVHYRMCQSCVELDPATVAGIIVTDVIATLLLALGVFCFAGHETGRLSGAADTQALLRNDQVYQPLRDRDDAQYSHLGGNWARNK

SEQ ID NO: 14740 - protein, 566 aa, Artificial Sequence
  Synthetic Polypeptide
MALPVTALLLPLALLLHAARPACQVQLVESGGGLVQAGDSVTLSCTASGRTFSSYALAWFRQRPGKEREFVAGLRWGGPTNYADSVKDRFTISGDSAKHTMYLQMNSLKPEDTAVYYCGYNPGGWAVPSQYEYDSWGQGTQVTVSSGTGGGGSGGGGSGGGGSEFNAGVTQTPKFQVLKTGQSMTLQCAQDMNHEYMSWYRQDPGMGLRLIHYSVAIQTTDQGEVPNGYNVSRSTIEDFPLRLLSAAPSQTSVYFCASSYLGNTGELFFGEGSRLTVGGGGSGGGGSGGGGSQEVTQIPAALSVPEGENLVLNCSFTDSAIYNLQWFRQDPGKGLTSLLLIQSSQREQTSGRLNASLDKSSGRSTLYIAASQPGDSATYLCAVRPTSGGSYIPTFGRGTSLIVHPYQSIKGNHLVKVYDYQEDGSVLLTCDAEAKNITWFKDGKMIGFLTEDKKKWNLGSNAKDPRGMYQCKGSQNKSKPLQVYYRMCQNCIELNAATISGFLFAEIVSIFVLAVGVYFIAGQDGVRQSRASDKQTLLPNDQLYQPLKDREDDQYSHLQGNQLRRN

SEQ ID NO: 14741 - protein, 549 aa, Artificial Sequence
  Synthetic Polypeptide
MALPVTALLLPLALLLHAARPACQVQLVESGGGLVQAGDSVTLSCTASGRTFSSYALAWFRQRPGKEREFVAGLRWGGPTNYADSVKDRFTISGDSAKHTMYLQMNSLKPEDTAVYYCGYNPGGWAVPSQYEYDSWGQGTQVTVSSGTGGGGSGGGGSGGGGSEFNAGVTQTPKFQVLKTGQSMTLQCAQDMNHEYMSWYRQDPGMGLRLIHYSVAIQTTDQGEVPNGYNVSRSTIEDFPLRLLSAAPSQTSVYFCASSYLGNTGELFFGEGSRLTVGGGGSGGGGSGGGGSQEVTQIPAALSVPEGENLVLNCSFTDSAIYNLQWFRQDPGKGLTSLLLIQSSQREQTSGRLNASLDKSSGRSTLYIAASQPGDSATYLCAVRPTSGGSYIPTFGRGTSLIVHPYQSFGLLDPKLCYLLDGILFIYGVILTALFLRVKFSRSADAPAYQQGQNQLYNELNLGRREEYDVLDKRRGRDPEMGGKPQRRKNPQEGLYNELQKDKMAEAYSEIGMKGERRRGKGHDGLYQGLSTATKDTYDALHMQALPPR

SEQ ID NO: 14742 - protein, 782 aa, Artificial Sequence
  Synthetic Polypeptide
MALPVTALLLPLALLLHAARPACQVQLVESGGGLVQAGDSVTLSCTASGRTFSSYALAWFRQRPGKEREFVAGLRWGGPTNYADSVKDRFTISGDSAKHTMYLQMNSLKPEDTAVYYCGYNPGGWAVPSQYEYDSWGQGTQVTVSSGTGGGGSGGGGSGGGGSEFNAGVTQTPKFQVLKTGQSMTLQCAQDMNHEYMSWYRQDPGMGLRLIHYSVAIQTTDQGEVPNGYNVSRSTIEDFPLRLLSAAPSQTSVYFCASSYLGNTGELFFGEGSRLTVGGGGSGGGGSGGGGSQEVTQIPAALSVPEGENLVLNCSFTDSAIYNLQWFRQDPGKGLTSLLLIQSSQREQTSGRLNASLDKSSGRSTLYIAASQPGDSATYLCAVRPTSGGSYIPTFGRGTSLIVHPYGSGIQNPDPAVYQLRDSKSSDKSVCLFTDFDSQTNVSQSKDSDVYITDKTVLDMRSMDFKSNSAVAWSNKSDFACANAFNNSIIPEDTFFPSPESSCDVKLVEKSFETDTNLNFQNLSVIGFRILLLKVAGFNLLMTLRLWSSRAKRSGSGVKQTLNFDLLKLAGDVESNPGPSRGHMTEYKPTVRLATRDDVPRAVRTLAAAFADYPATRHTVDPDRHIERVTELQELFLTRVGLDIGKVWVADDGAAVAVWTTPESVEAGAVFAEIGPRMAELSGSRLAAQQQMEGLLAPHRPKEPAWFLATVGVSPDHQGKGLGSAVVLPGVEAAERAGVPAFLETSAPRNLPFYERLGFTVTADVEVPEGPRTWCMTRKPGA

SEQ ID NO: 14743 - protein, 816 aa, Artificial Sequence
  Synthetic Polypeptide
MALPVTALLLPLALLLHAARPACQVQLVESGGGLVQAGDSVTLSCTASGRTFSSYALAWFRQRPGKEREFVAGLRWGGPTNYADSVKDRFTISGDSAKHTMYLQMNSLKPEDTAVYYCGYNPGGWAVPSQYEYDSWGQGTQVTVSSGTGGGGSGGGGSGGGGSEFNAGVTQTPKFQVLKTGQSMTLQCAQDMNHEYMSWYRQDPGMGLRLIHYSVAIQTTDQGEVPNGYNVSRSTIEDFPLRLLSAAPSQTSVYFCASSYLGNTGELFFGEGSRLTVGGGGSGGGGSGGGGSQEVTQIPAALSVPEGENLVLNCSFTDSAIYNLQWFRQDPGKGLTSLLLIQSSQREQTSGRLNASLDKSSGRSTLYIAASQPGDSATYLCAVRPTSGGSYIPTFGRGTSLIVHPYLEDLKNVFPPEVAVFEPSEAEISHTQKATLVCLATGFYPDHVELSWWVNGKEVHSGVSTDPQPLKEQPALNDSRYCLSSRLRVSATFWQNPRNHFRCQVQFYGLSENDEWTQDRAKPVTQIVSAEAWGRADCGFTSESYQQGVLSATILYEILLGKATLYAVLVSALVLMAMVKRKDSRGRAKRSGSGATNFSLLKQAGDVEENPGPTRGHMTEYKPTVRLATRDDVPRAVRTLAAAFADYPATRHTVDPDRHIERVTELQELFLTRVGLDIGKVWVADDGAAVAVWTTPESVEAGAVFAEIGPRMAELSGSRLAAQQQMEGLLAPHRPKEPAWFLATVGVSPDHQGKGLGSAVVLPGVEAAERAGVPAFLETSAPRNLPFYERLGFTVTADVEVPEGPRTWCMTRKPGA

SEQ ID NO: 14744 - protein, 864 aa, Artificial Sequence
  Synthetic Polypeptide
MALPVTALLLPLALLLHAARPACQVQLVESGGGLVQAGDSVTLSCTASGRTFSSYALAWFRQRPGKEREFVAGLRWGGPTNYADSVKDRFTISGDSAKHTMYLQMNSLKPEDTAVYYCGYNPGGWAVPSQYEYDSWGQGTQVTVSSGTGGGGSGGGGSGGGGSEFNAGVTQTPKFQVLKTGQSMTLQCAQDMNHEYMSWYRQDPGMGLRLIHYSVAIQTTDQGEVPNGYNVSRSTIEDFPLRLLSAAPSQTSVYFCASSYLGNTGELFFGEGSRLTVGGGGSGGGGSGGGGSQEVTQIPAALSVPEGENLVLNCSFTDSAIYNLQWFRQDPGKGLTSLLLIQSSQREQTSGRLNASLDKSSGRSTLYIAASQPGDSATYLCAVRPTSGGSYIPTFGRGTSLIVHPYEQKLISEEDLGSGTPFPSLAPPIMLLVDGKQQMVVVCLVLDVAPPGLDSPIWFSAGNGSALDAFTYGPSPATDGTWTNLAHLSLPSEELASWEPLVCHTGPGAEGHSRSTQPMHLSGEASTARTCPQEPLRGTPGGALWLGVLRLLLFKLLLFDLLLTCSCLCDPAGPLPSPATTTRLRALGSHRLHPATETGGREATSSPRPQPRDRRWGDTPPGRKPGSPVRAKRSGSGVKQTLNFDLLKLAGDVESNPGPSRSRGHMTEYKPTVRLATRDDVPRAVRTLAAAFADYPATRHTVDPDRHIERVTELQELFLTRVGLDIGKVWVADDGAAVAVWTTPESVEAGAVFAEIGPRMAELSGSRLAAQQQMEGLLAPHRPKEPAWFLATVGVSPDHQGKGLGSAVVLPGVEAAERAGVPAFLETSAPRNLPFYERLGFTVTADVEVPEGPRTWCMTRKPGA

SEQ ID NO: 14745 - protein, 687 aa, Artificial Sequence
  Synthetic Polypeptide
MALPVTALLLPLALLLHAARPACQVQLVESGGGLVQAGDSVTLSCTASGRTFSSYALAWFRQRPGKEREFVAGLRWGGPTNYADSVKDRFTISGDSAKHTMYLQMNSLKPEDTAVYYCGYNPGGWAVPSQYEYDSWGQGTQVTVSSGTGGGGSGGGGSGGGGSEFNAGVTQTPKFQVLKTGQSMTLQCAQDMNHEYMSWYRQDPGMGLRLIHYSVAIQTTDQGEVPNGYNVSRSTIEDFPLRLLSAAPSQTSVYFCASSYLGNTGELFFGEGSRLTVLEDLKNVFPPEVAVFEPSEAEISHTQKATLVCLATGFYPDHVELSWWVNGKEVHSGVSTDPQPLKEQPALNDSRYCLSSRLRVSATFWQNPRNHFRCQVQFYGLSENDEWTQDRAKPVTQIVSAEAWGRADCGFTSESYQQGVLSATILYEILLGKATLYAVLVSALVLMAMVKRKDSRGRAKRSGSGATNFSLLKQAGDVEENPGPTRGHMTEYKPTVRLATRDDVPRAVRTLAAAFADYPATRHTVDPDRHIERVTELQELFLTRVGLDIGKVWVADDGAAVAVWTTPESVEAGAVFAEIGPRMAELSGSRLAAQQQMEGLLAPHRPKEPAWFLATVGVSPDHQGKGLGSAVVLPGVEAAERAGVPAFLETSAPRNLPFYERLGFTVTADVEVPEGPRTWCMTRKPGA

SEQ ID NO: 14746 - protein, 457 aa, Artificial Sequence
  Synthetic Polypeptide
MALPVTALLLPLALLLHAARPACQVQLVESGGGLVQAGDSVTLSCTASGRTFSSYALAWFRQRPGKEREFVAGLRWGGPTNYADSVKDRFTISGDSAKHTMYLQMNSLKPEDTAVYYCGYNPGGWAVPSQYEYDSWGQGTQVTVSSGTGGGGSGGGGSGGGGSEFNAGVTQTPKFQVLKTGQSMTLQCAQDMNHEYMSWYRQDPGMGLRLIHYSVAIQTTDQGEVPNGYNVSRSTIEDFPLRLLSAAPSQTSVYFCASSYLGNTGELFFGEGSRLTVLEDLKNVFPPEVAVFEPSEAEISHTQKATLVCLATGFYPDHVELSWWVNGKEVHSGVSTDPQPLKEQPALNDSRYCLSSRLRVSATFWQNPRNHFRCQVQFYGLSENDEWTQDRAKPVTQIVSAEAWGRADCGFTSESYQQGVLSATILYEILLGKATLYAVLVSALVLMAMVKRKDSRG

SEQ ID NO: 14747 - protein, 441 aa, Artificial Sequence
  Synthetic Polypeptide
MDWIWRILFLVGAATGAHSFEQEVTQIPAALSVPEGENLVLNCSFTDSAIYNLQWFRQDPGKGLTSLLLIQSSQREQTSGRLNASLDKSSGRSTLYIAASQPGDSATYLCAVRPTSGGSYIPTFGRGTSLIVHPYIQNPDPAVYQLRDSKSSDKSVCLFTDFDSQTNVSQSKDSDVYITDKTVLDMRSMDFKSNSAVAWSNKSDFACANAFNNSIIPEDTFFPSPESSCDVKLVEKSFETDTNLNFQNLSVIGFRILLLKVAGFNLLMTLRLWSSRAKRSGSGVKQTLNFDLLKLAGDVESNPGPSRGHMAKPLSQEESTLIERATATINSIPISEDYSVASAALSSDGRIFTGVNVYHFTGGPCAELVVLGTAAAAAAGNLTCIVAIGNENRGILSPCGRCRQVLLDLHPGIKAIVKDSDGQPTAVGIRELLPSGYVWEG

SEQ ID NO: 14748 - protein, 275 aa, Artificial Sequence
  Synthetic Polypeptide
MDWIWRILFLVGAATGAHSFEQEVTQIPAALSVPEGENLVLNCSFTDSAIYNLQWFRQDPGKGLTSLLLIQSSQREQTSGRLNASLDKSSGRSTLYIAASQPGDSATYLCAVRPTSGGSYIPTFGRGTSLIVHPYIQNPDPAVYQLRDSKSSDKSVCLFTDFDSQTNVSQSKDSDVYITDKTVLDMRSMDFKSNSAVAWSNKSDFACANAFNNSIIPEDTFFPSPESSCDVKLVEKSFETDTNLNFQNLSVIGFRILLLKVAGFNLLMTLRLWSS

SEQ ID NO: 14749 - protein, 705 aa, Artificial Sequence
  Synthetic Polypeptide
MALPVTALLLPLALLLHAARPACQVQLVESGGGLVQAGDSVTLSCTASGRTFSSYALAWFRQRPGKEREFVAGLRWGGPTNYADSVKDRFTISGDSAKHTMYLQMNSLKPEDTAVYYCGYNPGGWAVPSQYEYDSWGQGTQVTVSSGTGGGGSGGGGSGGGGSEFNAGVTQTPKFQVLKTGQSMTLQCAQDMNHEYMSWYRQDPGMGLRLIHYSVAIQTTDQGEVPNGYNVSRSTIEDFPLRLLSAAPSQTSVYFCASSYLGNTGELFFGEGSRLTVLEGKPIPNPLLGLDSTGSGEDLKNVFPPEVAVFEPSEAEISHTQKATLVCLATGFYPDHVELSWWVNGKEVHSGVCTDPQPLKEQPALNDSRYCLSSRLRVSATFWQNPRNHFRCQVQFYGLSENDEWTQDRAKPVTQIVSAEAWGRADCGFTSESYQQGVLSATILYEILLGKATLYAVLVSALVLMAMVKRKDSRGRAKRSGSGATNFSLLKQAGDVEENPGPTRGHMTEYKPTVRLATRDDVPRAVRTLAAAFADYPATRHTVDPDRHIERVTELQELFLTRVGLDIGKVWVADDGAAVAVWTTPESVEAGAVFAEIGPRMAELSGSRLAAQQQMEGLLAPHRPKEPAWFLATVGVSPDHQGKGLGSAVVLPGVEAAERAGVPAFLETSAPRNLPFYERLGFTVTADVEVPEGPRTWCMTRKPGA

SEQ ID NO: 14750 - protein, 475 aa, Artificial Sequence
  Synthetic Polypeptide
MALPVTALLLPLALLLHAARPACQVQLVESGGGLVQAGDSVTLSCTASGRTFSSYALAWFRQRPGKEREFVAGLRWGGPTNYADSVKDRFTISGDSAKHTMYLQMNSLKPEDTAVYYCGYNPGGWAVPSQYEYDSWGQGTQVTVSSGTGGGGSGGGGSGGGGSEFNAGVTQTPKFQVLKTGQSMTLQCAQDMNHEYMSWYRQDPGMGLRLIHYSVAIQTTDQGEVPNGYNVSRSTIEDFPLRLLSAAPSQTSVYFCASSYLGNTGELFFGEGSRLTVLEGKPIPNPLLGLDSTGSGEDLKNVFPPEVAVFEPSEAEISHTQKATLVCLATGFYPDHVELSWWVNGKEVHSGVCTDPQPLKEQPALNDSRYCLSSRLRVSATFWQNPRNHFRCQVQFYGLSENDEWTQDRAKPVTQIVSAEAWGRADCGFTSESYQQGVLSATILYEILLGKATLYAVLVSALVLMAMVKRKDSRG

SEQ ID NO: 14751 - protein, 453 aa, Artificial Sequence
  Synthetic Polypeptide
MDWIWRILFLVGAATGAHSFEQEVTQIPAALSVPEGENLVLNCSFTDSAIYNLQWFRQDPGKGLTSLLLIQSSQREQTSGRLNASLDKSSGRSTLYIAASQPGDSATYLCAVRPTSGGSYIPTFGRGTSLIVHPYEQKLISEEDGSGIQNPDPAVYQLRDSKSSDKSVCLFTDFDSQTNVSQSKDSDVYITDKCVLDMRSMDFKSNSAVAWSNKSDFACANAFNNSIIPEDTFFPSPESSCDVKLVEKSFETDTNLNFQNLSVIGFRILLLKVAGFNLLMTLRLWSSRAKRSGSGVKQTLNFDLLKLAGDVESNPGPSRGHMAKPLSQEESTLIERATATINSIPISEDYSVASAALSSDGRIFTGVNVYHFTGGPCAELVVLGTAAAAAAGNLTCIVAIGNENRGILSPCGRCRQVLLDLHPGIKAIVKDSDGQPTAVGIRELLPSGYVWEG

SEQ ID NO: 14752 - protein, 287 aa, Artificial Sequence
  Synthetic Polypeptide
MDWIWRILFLVGAATGAHSFEQEVTQIPAALSVPEGENLVLNCSFTDSAIYNLQWFRQDPGKGLTSLLLIQSSQREQTSGRLNASLDKSSGRSTLYIAASQPGDSATYLCAVRPTSGGSYIPTFGRGTSLIVHPYEQKLISEEDGSGIQNPDPAVYQLRDSKSSDKSVCLFTDFDSQTNVSQSKDSDVYITDKCVLDMRSMDFKSNSAVAWSNKSDFACANAFNNSIIPEDTFFPSPESSCDVKLVEKSFETDTNLNFQNLSVIGFRILLLKVAGFNLLMTLRLWSS

SEQ ID NO: 14753 - protein, 782 aa, Artificial Sequence
  Synthetic Polypeptide
MALPVTALLLPLALLLHAARPACQVQLVESGGGLVQAGDSVTLSCTASGRTFSSYALAWFRQRPGKEREFVAGLRWGGPTNYADSVKDRFTISGDSAKHTMYLQMNSLKPEDTAVYYCGYNPGGWAVPSQYEYDSWGQGTQVTVSSGTGGGGSGGGGSGGGGSEFNAGVTQTPKFQVLKTGQSMTLQCAQDMNHEYMSWYRQDPGMGLRLIHYSVAIQTTDQGEVPNGYNVSRSTIEDFPLRLLSAAPSQTSVYFCASSYLGNTGELFFGEGSRLTVGGGGSGGGGSGGGGSQEVTQIPAALSVPEGENLVLNCSFTDSAIYNLQWFRQDPGKGLTSLLLIQSSQREQTSGRLNASLDKSSGRSTLYIAASQPGDSATYLCAVRPTSGGSYIPTFGRGTSLIVHPYGSGIQNPDPAVYQLRDSKSSDKSVCLFTDFDSQTNVSQSKDSDVYITDKTVLDMRSMDFKSNSAVAWSNKSDFACANAFNNSIIPEDTFFPSSDVPCDVKLVEKSFETDTNLNFQNLSVIGFRILLLKVAGFNLLMTLRLWSSRAKRSGSGVKQTLNFDLLKLAGDVESNPGPSRGHMTEYKPTVRLATRDDVPRAVRTLAAAFADYPATRHTVDPDRHIERVTELQELFLTRVGLDIGKVWVADDGAAVAVWTTPESVEAGAVFAEIGPRMAELSGSRLAAQQQMEGLLAPHRPKEPAWFLATVGVSPDHQGKGLGSAVVLPGVEAAERAGVPAFLETSAPRNLPFYERLGFTVTADVEVPEGPRTWCMTRKPGA

SEQ ID NO: 14754 - protein, 816 aa, Artificial Sequence
  Synthetic Polypeptide
MALPVTALLLPLALLLHAARPACQVQLVESGGGLVQAGDSVTLSCTASGRTFSSYALAWFRQRPGKEREFVAGLRWGGPTNYADSVKDRFTISGDSAKHTMYLQMNSLKPEDTAVYYCGYNPGGWAVPSQYEYDSWGQGTQVTVSSGTGGGGSGGGGSGGGGSEFNAGVTQTPKFQVLKTGQSMTLQCAQDMNHEYMSWYRQDPGMGLRLIHYSVAIQTTDQGEVPNGYNVSRSTIEDFPLRLLSAAPSQTSVYFCASSYLGNTGELFFGEGSRLTVGGGGSGGGGSGGGGSQEVTQIPAALSVPEGENLVLNCSFTDSAIYNLQWFRQDPGKGLTSLLLIQSSQREQTSGRLNASLDKSSGRSTLYIAASQPGDSATYLCAVRPTSGGSYIPTFGRGTSLIVHPYLEDLKNVFPPEVAVFEPSKAEIAHTQKATLVCLATGFYPDHVELSWWVNGKEVHSGVSTDPQPLKEQPALNDSRYCLSSRLRVSATFWQNPRNHFRCQVQFYGLSENDEWTQDRAKPVTQIVSAEAWGRADCGITSASYHQGVLSATILYEILLGKATLYAVLVSALVLMAMVKRKDSRGRAKRSGSGATNFSLLKQAGDVEENPGPTRGHMTEYKPTVRLATRDDVPRAVRTLAAAFADYPATRHTVDPDRHIERVTELQELFLTRVGLDIGKVWVADDGAAVAVWTTPESVEAGAVFAEIGPRMAELSGSRLAAQQQMEGLLAPHRPKEPAWFLATVGVSPDHQGKGLGSAVVLPGVEAAERAGVPAFLETSAPRNLPFYERLGFTVTADVEVPEGPRTWCMTRKPGA

SEQ ID NO: 14755 - protein, 1132 aa, Artificial Sequence
  Synthetic Polypeptide
MALPVTALLLPLALLLHAARPACQVQLVESGGGLVQAGDSVTLSCTASGRTFSSYALAWFRQRPGKEREFVAGLRWGGPTNYADSVKDRFTISGDSAKHTMYLQMNSLKPEDTAVYYCGYNPGGWAVPSQYEYDSWGQGTQVTVSSGTGGGGSGGGGSGGGGSEFNAGVTQTPKFQVLKTGQSMTLQCAQDMNHEYMSWYRQDPGMGLRLIHYSVAIQTTDQGEVPNGYNVSRSTIEDFPLRLLSAAPSQTSVYFCASSYLGNTGELFFGEGSRLTVLEIQNPDPAVYQLRDSKSSDKSVCLFTDFDSQTNVSQSKDSDVYITDKCVLDMRSMDFKSNSAVAWSNKSDFACANAFNNSIIPEDTFFPSSDVPCDVKLVEKSFETDTNLNFQNLSVIGFRILLLKVAGFNLLMTLRLWSSRAKRSGSGVKQTLNFDLLKLAGDVESNPGPTSMDWIWRILFLVGAATGAHSGPQVQLQESGGGLAQAGGSLRLSCAASGRTFSMGWFRQAPGKEREFVAAITYSGGSPYYASSVRGRFTISRDNAKNTVYLQMNSLKPEDTAVYYCAANPTYGSDWNAENWGQGTQVTVSSGSGGGGSGGGGSGGGGSFEQEVTQIPAALSVPEGENLVLNCSFTDSAIYNLQWFRQDPGKGLTSLLLIQSSQREQTSGRLNASLDKSSGRSTLYIAASQPGDSATYLCAVRPTSGGSYIPTFGRGTSLIVHPYEDLKNVFPPEVAVFEPSKAEIAHTQKATLVCLATGFYPDHVELSWWVNGKEVHSGVCTDPQPLKEQPALNDSRYCLSSRLRVSATFWQNPRNHFRCQVQFYGLSENDEWTQDRAKPVTQIVSAEAWGRADCGITSASYHQGVLSATILYEILLGKATLYAVLVSALVLMAMVKRKDSRGRAKRSGSGATNFSLLKQAGDVEENPGPSRGHMTEYKPTVRLATRDDVPRAVRTLAAAFADYPATRHTVDPDRHIERVTELQELFLTRVGLDIGKVWVADDGAAVAVWTTPESVEAGAVFAEIGPRMAELSGSRLAAQQQMEGLLAPHRPKEPAWFLATVGVSPDHQGKGLGSAVVLPGVEAAERAGVPAFLETSAPRNLPFYERLGFTVTADVEVPEGPRTWCMTRKPGA

SEQ ID NO: 14756 - protein, 1131 aa, Artificial Sequence
  Synthetic Polypeptide
MALPVTALLLPLALLLHAARPACQVQLVESGGGLVQAGDSVTLSCTASGRTFSSYALAWFRQRPGKEREFVAGLRWGGPTNYADSVKDRFTISGDSAKHTMYLQMNSLKPEDTAVYYCGYNPGGWAVPSQYEYDSWGQGTQVTVSSGTGGGGSGGGGSGGGGSEFNAGVTQTPKFQVLKTGQSMTLQCAQDMNHEYMSWYRQDPGMGLRLIHYSVAIQTTDQGEVPNGYNVSRSTIEDFPLRLLSAAPSQTSVYFCASSYLGNTGELFFGEGSRLTVLEDLKNVFPPEVAVFEPSKAEIAHTQKATLVCLATGFYPDHVELSWWVNGKEVHSGVCTDPQPLKEQPALNDSRYCLSSRLRVSATFWQNPRNHFRCQVQFYGLSENDEWTQDRAKPVTQIVSAEAWGRADCGITSASYHQGVLSATILYEILLGKATLYAVLVSALVLMAMVKRKDSRGRAKRSGSGATNFSLLKQAGDVEENPGPTSMDWIWRILFLVGAATGAHSGPQVQLQESGGGLAQAGGSLRLSCAASGRTFSMGWFRQAPGKEREFVAAITYSGGSPYYASSVRGRFTISRDNAKNTVYLQMNSLKPEDTAVYYCAANPTYGSDWNAENWGQGTQVTVSSGSGGGGSGGGGSGGGGSFEQEVTQIPAALSVPEGENLVLNCSFTDSAIYNLQWFRQDPGKGLTSLLLIQSSQREQTSGRLNASLDKSSGRSTLYIAASQPGDSATYLCAVRPTSGGSYIPTFGRGTSLIVHPYIQNPDPAVYQLRDSKSSDKSVCLFTDFDSQTNVSQSKDSDVYITDKCVLDMRSMDFKSNSAVAWSNKSDFACANAFNNSIIPEDTFFPSSDVPCDVKLVEKSFETDTNLNFQNLSVIGFRILLLKVAGFNLLMTLRLWSSRAKRSGSGVKQTLNFDLLKLAGDVESNPGPSRGHMTEYKPTVRLATRDDVPRAVRTLAAAFADYPATRHTVDPDRHIERVTELQELFLTRVGLDIGKVWVADDGAAVAVWTTPESVEAGAVFAEIGPRMAELSGSRLAAQQQMEGLLAPHRPKEPAWFLATVGVSPDHQGKGLGSAVVLPGVEAAERAGVPAFLETSAPRNLPFYERLGFTVTADVEVPEGPRTWCMTRKPGA

SEQ ID NO: 14757 - protein, 1131 aa, Artificial Sequence
  Synthetic Polypeptide
MALPVTALLLPLALLLHAARPACQVQLVESGGGLVQAGDSVTLSCTASGRTFSSYALAWFRQRPGKEREFVAGLRWGGPTNYADSVKDRFTISGDSAKHTMYLQMNSLKPEDTAVYYCGYNPGGWAVPSQYEYDSWGQGTQVTVSSGTGGGGSGGGGSGGGGSEFNAGVTQTPKFQVLKTGQSMTLQCAQDMNHEYMSWYRQDPGMGLRLIHYSVAIQTTDQGEVPNGYNVSRSTIEDFPLRLLSAAPSQTSVYFCASSYLGNTGELFFGEGSRLTVLEDLKNVFPPEVAVFEPSEAEISHTQKATLVCLATGFYPDHVELSWWVNGKEVHSGVCTDPQPLKEQPALNDSRYCLSSRLRVSATFWQNPRNHFRCQVQFYGLSENDEWTQDRAKPVTQIVSAEAWGRADCGFTSESYQQGVLSATILYEILLGKATLYAVLVSALVLMAMVKRKDSRGRAKRSGSGATNFSLLKQAGDVEENPGPTSMDWIWRILFLVGAATGAHSGPQVQLQESGGGLAQAGGSLRLSCAASGRTFSMGWFRQAPGKEREFVAAITYSGGSPYYASSVRGRFTISRDNAKNTVYLQMNSLKPEDTAVYYCAANPTYGSDWNAENWGQGTQVTVSSGSGGGGSGGGGSGGGGSFEQEVTQIPAALSVPEGENLVLNCSFTDSAIYNLQWFRQDPGKGLTSLLLIQSSQREQTSGRLNASLDKSSGRSTLYIAASQPGDSATYLCAVRPTSGGSYIPTFGRGTSLIVHPYIQNPDPAVYQLRDSKSSDKSVCLFTDFDSQTNVSQSKDSDVYITDKCVLDMRSMDFKSNSAVAWSNKSDFACANAFNNSIIPEDTFFPSPESSCDVKLVEKSFETDTNLNFQNLSVIGFRILLLKVAGFNLLMTLRLWSSRAKRSGSGVKQTLNFDLLKLAGDVESNPGPSRGHMTEYKPTVRLATRDDVPRAVRTLAAAFADYPATRHTVDPDRHIERVTELQELFLTRVGLDIGKVWVADDGAAVAVWTTPESVEAGAVFAEIGPRMAELSGSRLAAQQQMEGLLAPHRPKEPAWFLATVGVSPDHQGKGLGSAVVLPGVEAAERAGVPAFLETSAPRNLPFYERLGFTVTADVEVPEGPRTWCMTRKPGA

SEQ ID NO: 14758 - protein, 898 aa, Artificial Sequence
  Synthetic Polypeptide
MALPVTALLLPLALLLHAARPACQVQLVESGGGLVQAGDSVTLSCTASGRTFSSYALAWFRQRPGKEREFVAGLRWGGPTNYADSVKDRFTISGDSAKHTMYLQMNSLKPEDTAVYYCGYNPGGWAVPSQYEYDSWGQGTQVTVSSGTGGGGSGGGGSGGGGSEFNAGVTQTPKFQVLKTGQSMTLQCAQDMNHEYMSWYRQDPGMGLRLIHYSVAIQTTDQGEVPNGYNVSRSTIEDFPLRLLSAAPSQTSVYFCASSYLGNTGELFFGEGSRLTVLEDLKNVFPPEVAVFEPSEAEISHTQKATLVCLATGFYPDHVELSWWVNGKEVHSGVCTDPQPLKEQPALNDSRYCLSSRLRVSATFWQNPRNHFRCQVQFYGLSENDEWTQDRAKPVTQIVSAEAWGRADCGFTSESYQQGVLSATILYEILLGKATLYAVLVSALVLMAMVKRKDSRGRAKRSGSGATNFSLLKQAGDVEENPGPTSMDWIWRILFLVGAATGAHSGPQVQLQESGGGLAQAGGSLRLSCAASGRTFSMGWFRQAPGKEREFVAAITYSGGSPYYASSVRGRFTISRDNAKNTVYLQMNSLKPEDTAVYYCAANPTYGSDWNAENWGQGTQVTVSSGSGGGGSGGGGSGGGGSFEQEVTQIPAALSVPEGENLVLNCSFTDSAIYNLQWFRQDPGKGLTSLLLIQSSQREQTSGRLNASLDKSSGRSTLYIAASQPGDSATYLCAVRPTSGGSYIPTFGRGTSLIVHPYIQNPDPAVYQLRDSKSSDKSVCLFTDFDSQTNVSQSKDSDVYITDKCVLDMRSMDFKSNSAVAWSNKSDFACANAFNNSIIPEDTFFPSPESSCDVKLVEKSFETDTNLNFQNLSVIGFRILLLKVAGFNLLMTLRLWSS

SEQ ID NO: 14759 - protein, 1123 aa, Artificial Sequence
  Synthetic Polypeptide
MALPVTALLLPLALLLHAARPACQVQLVESGGGLVQAGDSVTLSCTASGRTFSSYALAWFRQRPGKEREFVAGLRWGGPTNYADSVKDRFTISGDSAKHTMYLQMNSLKPEDTAVYYCGYNPGGWAVPSQYEYDSWGQGTQVTVSSGTGGGGSGGGGSGGGGSEFNAGVTQTPKFQVLKTGQSMTLQCAQDMNHEYMSWYRQDPGMGLRLIHYSVAIQTTDQGEVPNGYNVSRSTIEDFPLRLLSAAPSQTSVYFCASSYLGNTGELFFGEGSRLTVLEDLKNVFPPEVAVFEPSEAEISHTQKATLVCLATGFYPDHVELSWWVNGKEVHSGVCTDPQPLKEQPALNDSRYCLSSRLRVSATFWQNPRNHFRCQVQFYGLSENDEWTQDRAKPVTQIVSAEAWGRADCGFTSESYQQGVLSATILYEILLGKATLYAVLVSALVLMAMVKRKDSRGRAKRSGSGATNFSLLKQAGDVEENPGPTSMDWIWRILFLVGAATGAHSGPQVQLQESGGGLAQAGGSLRLSCAASGRTFSMGWFRQAPGKEREFVAAITYSGGSPYYASSVRGRFTISRDNAKNTVYLQMNSLKPEDTAVYYCAANPTYGSDWNAENWGQGTQVTVSSGSGGGGSGGGGSGGGGSFEQEVTQIPAALSVPEGENLVLNCSFTDSAIYNLQWFRQDPGKGLTSLLLIQSSQREQTSGRLNASLDKSSGRSTLYIAASQPGDSATYLCAVRPTSGGSYIPTFGRGTSLIVHPYIQNPDPAVYQLRDSKSSDKSVCLFTDFDSQTNVSQSKDSDVYITDKCVLDMRSMDFKSNSAVAWSNKSDFACANAFNNSIIPEDTFFPSPESSCDVKLVEKSFETDTNLNFQNLSVIGFRILLLKVAGFNLLMTLRLWSSRAKRSGSGVKQTLNFDLLKLAGDVESNPGPSRGGIHTMATYEVLCEVARKLGTDDREVVLFLLNVFIPQPTLAQLIGALRALKEEGRLTFPLLAECLFRAGRRDLLRDLLHLDPRFLERHLAGTMSYFSPYQLTVLHVDGELCARDIRSLIFLSKDTIGSRSTPQTFLHWVYCMENLDLLGPTDVDALMSMLRSLSRVDLQRQVQTLMGLHLSGPSHSQHYRHTP

SEQ ID NO: 14760 - protein, 902 aa, Artificial Sequence
  Synthetic Polypeptide
MALPVTALLLPLALLLHAARPACQVQLVESGGGLVQAGDSVTLSCTASGRTFSSYALAWFRQRPGKEREFVAGLRWGGPTNYADSVKDRFTISGDSAKHTMYLQMNSLKPEDTAVYYCGYNPGGWAVPSQYEYDSWGQGTQVTVSSGTGGGGSGGGGSGGGGSEFNAGVTQTPKFQVLKTGQSMTLQCAQDMNHEYMSWYRQDPGMGLRLIHYSVAIQTTDQGEVPNGYNVSRSTIEDFPLRLLSAAPSQTSVYFCASSYLGNTGELFFGEGSRLTVLEIQNPDPAVYQLRDSKSSDKSVCLFTDFDSQTNVSQSKDSDVYITDKCVLDMRSMDFKSNSAVAWSNKSDFACANAFNNSIIPEDTFFPSPESSCDVKLVEKSFETDTNLNFQNLSVIGFRILLLKVAGFNLLMTLRLWSSRAKRSGSGVKQTLNFDLLKLAGDVESNPGPTSMDWIWRILFLVGAATGAHSGPQVQLQESGGGLAQAGGSLRLSCAASGRTFSMGWFRQAPGKEREFVAAITYSGGSPYYASSVRGRFTISRDNAKNTVYLQMNSLKPEDTAVYYCAANPTYGSDWNAENWGQGTQVTVSSGSGGGGSGGGGSGGGGSFEQEVTQIPAALSVPEGENLVLNCSFTDSAIYNLQWFRQDPGKGLTSLLLIQSSQREQTSGRLNASLDKSSGRSTLYIAASQPGDSATYLCAVRPTSGGSYIPTFGRGTSLIVHPYEDLKNVFPPEVAVFEPSEAEISHTQKATLVCLATGFYPDHVELSWWVNGKEVHSGVCTDPQPLKEQPALNDSRYCLSSRLRVSATFWQNPRNHFRCQVQFYGLSENDEWTQDRAKPVTQIVSAEAWGRADCGFTSESYQQGVLSATILYEILLGKATLYAVLVSALVLMAMVKRKDSRG

SEQ ID NO: 14761 - protein, 1124 aa, Artificial Sequence
  Synthetic Polypeptide
MALPVTALLLPLALLLHAARPACQVQLVESGGGLVQAGDSVTLSCTASGRTFSSYALAWFRQRPGKEREFVAGLRWGGPTNYADSVKDRFTISGDSAKHTMYLQMNSLKPEDTAVYYCGYNPGGWAVPSQYEYDSWGQGTQVTVSSGTGGGGSGGGGSGGGGSEFNAGVTQTPKFQVLKTGQSMTLQCAQDMNHEYMSWYRQDPGMGLRLIHYSVAIQTTDQGEVPNGYNVSRSTIEDFPLRLLSAAPSQTSVYFCASSYLGNTGELFFGEGSRLTVLEIQNPDPAVYQLRDSKSSDKSVCLFTDFDSQTNVSQSKDSDVYITDKCVLDMRSMDFKSNSAVAWSNKSDFACANAFNNSIIPEDTFFPSPESSCDVKLVEKSFETDTNLNFQNLSVIGFRILLLKVAGFNLLMTLRLWSSRAKRSGSGVKQTLNFDLLKLAGDVESNPGPTSMDWIWRILFLVGAATGAHSGPQVQLQESGGGLAQAGGSLRLSCAASGRTFSMGWFRQAPGKEREFVAAITYSGGSPYYASSVRGRFTISRDNAKNTVYLQMNSLKPEDTAVYYCAANPTYGSDWNAENWGQGTQVTVSSGSGGGGSGGGGSGGGGSFEQEVTQIPAALSVPEGENLVLNCSFTDSAIYNLQWFRQDPGKGLTSLLLIQSSQREQTSGRLNASLDKSSGRSTLYIAASQPGDSATYLCAVRPTSGGSYIPTFGRGTSLIVHPYEDLKNVFPPEVAVFEPSEAEISHTQKATLVCLATGFYPDHVELSWWVNGKEVHSGVCTDPQPLKEQPALNDSRYCLSSRLRVSATFWQNPRNHFRCQVQFYGLSENDEWTQDRAKPVTQIVSAEAWGRADCGFTSESYQQGVLSATILYEILLGKATLYAVLVSALVLMAMVKRKDSRGRAKRSGSGATNFSLLKQAGDVEENPGPSRGGIHTMATYEVLCEVARKLGTDDREVVLFLLNVFIPQPTLAQLIGALRALKEEGRLTFPLLAECLFRAGRRDLLRDLLHLDPRFLERHLAGTMSYFSPYQLTVLHVDGELCARDIRSLIFLSKDTIGSRSTPQTFLHWVYCMENLDLLGPTDVDALMSMLRSLSRVDLQRQVQTLMGLHLSGPSHSQHYRHTP

SEQ ID NO: 14762 - protein, 1131 aa, Artificial Sequence
  Synthetic Polypeptide
MALPVTALLLPLALLLHAARPACQVQLVESGGGLVQAGDSVTLSCTASGRTFSSYALAWFRQRPGKEREFVAGLRWGGPTNYADSVKDRFTISGDSAKHTMYLQMNSLKPEDTAVYYCGYNPGGWAVPSQYEYDSWGQGTQVTVSSGTGGGGSGGGGSGGGGSEFNAGVTQTPKFQVLKTGQSMTLQCAQDMNHEYMSWYRQDPGMGLRLIHYSVAIQTTDQGEVPNGYNVSRSTIEDFPLRLLSAAPSQTSVYFCASSYLGNTGELFFGEGSRLTVLEDLKNVFPPEVAVFEPSEAEISHTQKATLVCLATGFYPDHVELSWWVNGKEVHSGVSTDPQPLKEQPALNDSRYCLSSRLRVSATFWQNPRNHFRCQVQFYGLSENDEWTQDRAKPVTQIVSAEAWGRADCGFTSESYQQGVLSATILYEILLGKATLYAVLVSALVLMAMVKRKDSRGRAKRSGSGATNFSLLKQAGDVEENPGPTSMDWIWRILFLVGAATGAHSGPQVQLQESGGGLAQAGGSLRLSCAASGRTFSMGWFRQAPGKEREFVAAITYSGGSPYYASSVRGRFTISRDNAKNTVYLQMNSLKPEDTAVYYCAANPTYGSDWNAENWGQGTQVTVSSGSGGGGSGGGGSGGGGSFEQEVTQIPAALSVPEGENLVLNCSFTDSAIYNLQWFRQDPGKGLTSLLLIQSSQREQTSGRLNASLDKSSGRSTLYIAASQPGDSATYLCAVRPTSGGSYIPTFGRGTSLIVHPYIQNPDPAVYQLRDSKSSDKSVCLFTDFDSQTNVSQSKDSDVYITDKTVLDMRSMDFKSNSAVAWSNKSDFACANAFNNSIIPEDTFFPSPESSCDVKLVEKSFETDTNLNFQNLSVIGFRILLLKVAGFNLLMTLRLWSSRAKRSGSGVKQTLNFDLLKLAGDVESNPGPSRGHMTEYKPTVRLATRDDVPRAVRTLAAAFADYPATRHTVDPDRHIERVTELQELFLTRVGLDIGKVWVADDGAAVAVWTTPESVEAGAVFAEIGPRMAELSGSRLAAQQQMEGLLAPHRPKEPAWFLATVGVSPDHQGKGLGSAVVLPGVEAAERAGVPAFLETSAPRNLPFYERLGFTVTADVEVPEGPRTWCMTRKPGA

SEQ ID NO: 14763 - protein, 1213 aa, Artificial Sequence
  Synthetic Polypeptide
MALPVTALLLPLALLLHAARPACQVQLVESGGGLVQAGDSVTLSCTASGRTFSSYALAWFRQRPGKEREFVAGLRWGGPTNYADSVKDRFTISGDSAKHTMYLQMNSLKPEDTAVYYCGYNPGGWAVPSQYEYDSWGQGTQVTVSSGTGGGGSGGGGSGGGGSEFNAGVTQTPKFQVLKTGQSMTLQCAQDMNHEYMSWYRQDPGMGLRLIHYSVAIQTTDQGEVPNGYNVSRSTIEDFPLRLLSAAPSQTSVYFCASSYLGNTGELFFGEGSRLTVLEDLKNVFPPEVAVFEPSEAEISHTQKATLVCLATGFYPDHVELSWWVNGKEVHSGVSTDPQPLKEQPALNDSRYCLSSRLRVSATFWQNPRNHFRCQVQFYGLSENDEWTQDRAKPVTQIVSAEAWGRADCGFTSESYQQGVLSATILYEILLGKATLYAVLVSALVLMAMVKRKDSRGRAKRSGSGATNFSLLKQAGDVEENPGPTSMDWIWRILFLVGAATGAHSGPQVQLQESGGGLAQAGGSLRLSCAASGRTFSMGWFRQAPGKEREFVAAITYSGGSPYYASSVRGRFTISRDNAKNTVYLQMNSLKPEDTAVYYCAANPTYGSDWNAENWGQGTQVTVSSGSGGGGSGGGGSGGGGSFEQEVTQIPAALSVPEGENLVLNCSFTDSAIYNLQWFRQDPGKGLTSLLLIQSSQREQTSGRLNASLDKSSGRSTLYIAASQPGDSATYLCAVRPTSGGSYIPTFGRGTSLIVHPYEQKLISEEDGSGTPFPSLAPPIMLLVDGKQQMVVVCLVLDVAPPGLDSPIWFSAGNGSALDAFTYGPSPATDGTWTNLAHLSLPSEELASWEPLVCHTGPGAEGHSRSTQPMHLSGEASTARTCPQEPLRGTPGGALWLGVLRLLLFKLLLFDLLLTCSCLCDPAGPLPSPATTTRLRALGSHRLHPATETGGREATSSPRPQPRDRRWGDTPPGRKPGSPVRAKRSGSGVKQTLNFDLLKLAGDVESNPGPSRGHMTEYKPTVRLATRDDVPRAVRTLAAAFADYPATRHTVDPDRHIERVTELQELFLTRVGLDIGKVWVADDGAAVAVWTTPESVEAGAVFAEIGPRMAELSGSRLAAQQQMEGLLAPHRPKEPAWFLATVGVSPDHQGKGLGSAVVLPGVEAAERAGVPAFLETSAPRNLPFYERLGFTVTADVEVPEGPRTWCMTRKPGA

SEQ ID NO: 14764 - protein, 1168 aa, Artificial Sequence
  Synthetic Polypeptide
MALPVTALLLPLALLLHAARPACQVQLVESGGGLVQAGDSVTLSCTASGRTFSSYALAWFRQRPGKEREFVAGLRWGGPTNYADSVKDRFTISGDSAKHTMYLQMNSLKPEDTAVYYCGYNPGGWAVPSQYEYDSWGQGTQVTVSSGTGGGGSGGGGSGGGGSEFNAGVTQTPKFQVLKTGQSMTLQCAQDMNHEYMSWYRQDPGMGLRLIHYSVAIQTTDQGEVPNGYNVSRSTIEDFPLRLLSAAPSQTSVYFCASSYLGNTGELFFGEGSRLTVLEGKPIPNPLLGLDSTGSGDKQLDADVSPKPTIFLPSIAETKLQKAGTYLCLLEKFFPDVIKIHWQEKKSNTILGSQEGNTMKTNDTYMKFSWLTVPEKSLDKEHRCIVRHENNKNGVDQEIIFPPIKTDVITMDPKDNCSKDANDTLLLQLTNTSAYYMYLLLLLKSVVYFAIITCCLLRRTAFCCNGEKSRAKRSGSGATNFSLLKQAGDVEENPGPTSMDWIWRILFLVGAATGAHSGPQVQLQESGGGLAQAGGSLRLSCAASGRTFSMGWFRQAPGKEREFVAAITYSGGSPYYASSVRGRFTISRDNAKNTVYLQMNSLKPEDTAVYYCAANPTYGSDWNAENWGQGTQVTVSSGSGGGGSGGGGSGGGGSFEQEVTQIPAALSVPEGENLVLNCSFTDSAIYNLQWFRQDPGKGLTSLLLIQSSQREQTSGRLNASLDKSSGRSTLYIAASQPGDSATYLCAVRPTSGGSYIPTFGRGTSLIVHPYEQKLISEEDGSGSQPHTKPSVFVMKNGTNVACLVKEFYPKDIRINLVSSKKITEFDPAIVISPSGKYNAVKLGKYEDSNSVTCSVQHDNKTVHSTDFEVKTDSTDHVKPKETENTKQPSKSCHKPKAIVHTEKVNMMSLTVLGLRMLFAKTVAVNFLLTAKLFFLRAKRSGSGVKQTLNFDLLKLAGDVESNPGPSRGHMTEYKPTVRLATRDDVPRAVRTLAAAFADYPATRHTVDPDRHIERVTELQELFLTRVGLDIGKVWVADDGAAVAVWTTPESVEAGAVFAEIGPRMAELSGSRLAAQQQMEGLLAPHRPKEPAWFLATVGVSPDHQGKGLGSAVVLPGVEAAERAGVPAFLETSAPRNLPFYERLGFTVTADVEVPEGPRTWCMTRKPGA

SEQ ID NO: 14765 - protein, 906 aa, Artificial Sequence
  Synthetic Polypeptide
MALPVTALLLPLALLLHAARPACQVQLVESGGGLVQAGDSVTLSCTASGRTFSSYALAWFRQRPGKEREFVAGLRWGGPTNYADSVKDRFTISGDSAKHTMYLQMNSLKPEDTAVYYCGYNPGGWAVPSQYEYDSWGQGTQVTVSSGTGGGGSGGGGSGGGGSEFNAGVTQTPKFQVLKTGQSMTLQCAQDMNHEYMSWYRQDPGMGLRLIHYSVAIQTTDQGEVPNGYNVSRSTIEDFPLRLLSAAPSQTSVYFCASSYLGNTGELFFGEGSRLTVLESQPHTKPSVFVMKNGTNVACLVKEFYPKDIRINLVSSKKITEFDPAIVISPSGKYNAVKLGKYEDSNSVTCSVQHDNKTVHSTDFEVKTDSTDHVKPKETENTKQPSKSCHKPKAIVHTEKVNMMSLTVLGLRMLFAKTVAVNFLLTAKLFFLRAKRSGSGATNFSLLKQAGDVEENPGPTSMDWIWRILFLVGAATGAHSGPQVQLQESGGGLAQAGGSLRLSCAASGRTFSMGWFRQAPGKEREFVAAITYSGGSPYYASSVRGRFTISRDNAKNTVYLQMNSLKPEDTAVYYCAANPTYGSDWNAENWGQGTQVTVSSGSGGGGSGGGGSGGGGSFEQEVTQIPAALSVPEGENLVLNCSFTDSAIYNLQWFRQDPGKGLTSLLLIQSSQREQTSGRLNASLDKSSGRSTLYIAASQPGDSATYLCAVRPTSGGSYIPTFGRGTSLIVHPYDKQLDADVSPKPTIFLPSIAETKLQKAGTYLCLLEKFFPDVIKIHWQEKKSNTILGSQEGNTMKTNDTYMKFSWLTVPEKSLDKEHRCIVRHENNKNGVDQEIIFPPIKTDVITMDPKDNCSKDANDTLLLQLTNTSAYYMYLLLLLKSVVYFAIITCCLLRRTAFCCNGEKS

SEQ ID NO: 14766 - protein, 1310 aa, Artificial Sequence
  Synthetic Polypeptide
MALPVTALLLPLALLLHAARPACQVQLVESGGGLVQAGDSVTLSCTASGRTFSSYALAWFRQRPGKEREFVAGLRWGGPTNYADSVKDRFTISGDSAKHTMYLQMNSLKPEDTAVYYCGYNPGGWAVPSQYEYDSWGQGTQVTVSSGTGGGGSGGGGSGGGGSEFNAGVTQTPKFQVLKTGQSMTLQCAQDMNHEYMSWYRQDPGMGLRLIHYSVAIQTTDQGEVPNGYNVSRSTIEDFPLRLLSAAPSQTSVYFCASSYLGNTGELFFGEGSRLTVGQPKANPTVTLFPPSSEELQANKATLVCLISDFYPGAVTVAWKADGSPVKAGVETTKPSKQSNNKYAASSYLSLTPEQWKSHRSYSCQVTHEGSTVEKTVAPTECSGSQSFGLLDPKLCYLLDGILFIYGVILTALFLRVKFSRSADAPAYQQGQNQLYNELNLGRREEYDVLDKRRGRDPEMGGKPQRRKNPQEGLYNELQKDKMAEAYSEIGMKGERRRGKGHDGLYQGLSTATKDTYDALHMQALPPRRAKRSGSGATNFSLLKQAGDVEENPGPTSMDWIWRILFLVGAATGAHSGPQVQLQESGGGLAQAGGSLRLSCAASGRTFSMGWFRQAPGKEREFVAAITYSGGSPYYASSVRGRFTISRDNAKNTVYLQMNSLKPEDTAVYYCAANPTYGSDWNAENWGQGTQVTVSSGSGGGGSGGGGSGGGGSFEQEVTQIPAALSVPEGENLVLNCSFTDSAIYNLQWFRQDPGKGLTSLLLIQSSQREQTSGRLNASLDKSSGRSTLYIAASQPGDSATYLCAVRPTSGGSYIPTFGRGTSLIVHPYASTKGPSVFPLAPSSKSTSGGTAALGCLVKDYFPEPVTVSWNSGALTSGVHTFPAVLQSSGLYSLSSVVTVPSSSLGTQTYICNVNHKPSNTKVDKRVEPKSCGTQSFGLLDPKLCYLLDGILFIYGVILTALFLRVKFSRSADAPAYQQGQNQLYNELNLGRREEYDVLDKRRGRDPEMGGKPQRRKNPQEGLYNELQKDKMAEAYSEIGMKGERRRGKGHDGLYQGLSTATKDTYDALHMQALPPRRAKRSGSGVKQTLNFDLLKLAGDVESNPGPSRGHMTEYKPTVRLATRDDVPRAVRTLAAAFADYPATRHTVDPDRHIERVTELQELFLTRVGLDIGKVWVADDGAAVAVWTTPESVEAGAVFAEIGPRMAELSGSRLAAQQQMEGLLAPHRPKEPAWFLATVGVSPDHQGKGLGSAVVLPGVEAAERAGVPAFLETSAPRNLPFYERLGFTVTADVEVPEGPRTWCMTRKPGA

SEQ ID NO: 14767 - protein, 1094 aa, Artificial Sequence
  Synthetic Polypeptide
MALPVTALLLPLALLLHAARPACQVQLVESGGGLVQAGDSVTLSCTASGRTFSSYALAWFRQRPGKEREFVAGLRWGGPTNYADSVKDRFTISGDSAKHTMYLQMNSLKPEDTAVYYCGYNPGGWAVPSQYEYDSWGQGTQVTVSSGTGGGGSGGGGSGGGGSEFNAGVTQTPKFQVLKTGQSMTLQCAQDMNHEYMSWYRQDPGMGLRLIHYSVAIQTTDQGEVPNGYNVSRSTIEDFPLRLLSAAPSQTSVYFCASSYLGNTGELFFGEGSRLTVLEDLKNVFPPEVAVFEPSEAEISHTQKATLVCLATGFYPDHVELSWWVNGKEVHSGVSTDPQPLKEQPALNDSRYCLSSRLRVSATFWQNPRNHFRCQVQFYGLSENDEWTQDRAKPVTQIVSAEAWGRADCGSQSFGLLDPKLCYLLDGILFIYGVILTALFLRVKFSRSADAPAYQQGQNQLYNELNLGRREEYDVLDKRRGRDPEMGGKPQRRKNPQEGLYNELQKDKMAEAYSEIGMKGERRRGKGHDGLYQGLSTATKDTYDALHMQALPPRRAKRSGSGATNFSLLKQAGDVEENPGPTSMDWIWRILFLVGAATGAHSGPQVQLQESGGGLAQAGGSLRLSCAASGRTFSMGWFRQAPGKEREFVAAITYSGGSPYYASSVRGRFTISRDNAKNTVYLQMNSLKPEDTAVYYCAANPTYGSDWNAENWGQGTQVTVSSGSGGGGSGGGGSGGGGSFEQEVTQIPAALSVPEGENLVLNCSFTDSAIYNLQWFRQDPGKGLTSLLLIQSSQREQTSGRLNASLDKSSGRSTLYIAASQPGDSATYLCAVRPTSGGSYIPTFGRGTSLIVHPYIQNPDPAVYQLRDSKSSDKSVCLFTDFDSQTNVSQSKDSDVYITDKTVLDMRSMDFKSNSAVAWSNKSDFACANAFNNSIIPEDTFFPSPESSCGTQSFGLLDPKLCYLLDGILFIYGVILTALFLRVKFSRSADAPAYQQGQNQLYNELNLGRREEYDVLDKRRGRDPEMGGKPQRRKNPQEGLYNELQKDKMAEAYSEIGMKGERRRGKGHDGLYQGLSTATKDTYDALHMQALPPR

SEQ ID NO: 14768 - protein, 1094 aa, Artificial Sequence
  Synthetic Polypeptide
MALPVTALLLPLALLLHAARPACQVQLVESGGGLVQAGDSVTLSCTASGRTFSSYALAWFRQRPGKEREFVAGLRWGGPTNYADSVKDRFTISGDSAKHTMYLQMNSLKPEDTAVYYCGYNPGGWAVPSQYEYDSWGQGTQVTVSSGTGGGGSGGGGSGGGGSEFNAGVTQTPKFQVLKTGQSMTLQCAQDMNHEYMSWYRQDPGMGLRLIHYSVAIQTTDQGEVPNGYNVSRSTIEDFPLRLLSAAPSQTSVYFCASSYLGNTGELFFGEGSRLTVLEDLKNVFPPEVAVFEPSKAEIAHTQKATLVCLATGFYPDHVELSWWVNGKEVHSGVCTDPQPLKEQPALNDSRYCLSSRLRVSATFWQNPRNHFRCQVQFYGLSENDEWTQDRAKPVTQIVSAEAWGRADCGSQSFGLLDPKLCYLLDGILFIYGVILTALFLRVKFSRSADAPAYQQGQNQLYNELNLGRREEYDVLDKRRGRDPEMGGKPQRRKNPQEGLYNELQKDKMAEAYSEIGMKGERRRGKGHDGLYQGLSTATKDTYDALHMQALPPRRAKRSGSGATNFSLLKQAGDVEENPGPTSMDWIWRILFLVGAATGAHSGPQVQLQESGGGLAQAGGSLRLSCAASGRTFSMGWFRQAPGKEREFVAAITYSGGSPYYASSVRGRFTISRDNAKNTVYLQMNSLKPEDTAVYYCAANPTYGSDWNAENWGQGTQVTVSSGSGGGGSGGGGSGGGGSFEQEVTQIPAALSVPEGENLVLNCSFTDSAIYNLQWFRQDPGKGLTSLLLIQSSQREQTSGRLNASLDKSSGRSTLYIAASQPGDSATYLCAVRPTSGGSYIPTFGRGTSLIVHPYIQNPDPAVYQLRDSKSSDKSVCLFTDFDSQTNVSQSKDSDVYITDKCVLDMRSMDFKSNSAVAWSNKSDFACANAFNNSIIPEDTFFPSSDVPCGTQSFGLLDPKLCYLLDGILFIYGVILTALFLRVKFSRSADAPAYQQGQNQLYNELNLGRREEYDVLDKRRGRDPEMGGKPQRRKNPQEGLYNELQKDKMAEAYSEIGMKGERRRGKGHDGLYQGLSTATKDTYDALHMQALPPR

SEQ ID NO: 14769 - protein, 1165 aa, Artificial Sequence
  Synthetic Polypeptide
MALPVTALLLPLALLLHAARPACQVQLVESGGGLVQAGDSVTLSCTASGRTFSSYALAWFRQRPGKEREFVAGLRWGGPTNYADSVKDRFTISGDSAKHTMYLQMNSLKPEDTAVYYCGYNPGGWAVPSQYEYDSWGQGTQVTVSSGTGGGGSGGGGSGGGGSEFNAGVTQTPKFQVLKTGQSMTLQCAQDMNHEYMSWYRQDPGMGLRLIHYSVAIQTTDQGEVPNGYNVSRSTIEDFPLRLLSAAPSQTSVYFCASSYLGNTGELFFGEGSRLTVLEGKPIPNPLLGLDSTGSGEDLKNVFPPEVAVFEPSEAEISHTQKATLVCLATGFYPDHVELSWWVNGKEVHSGVSTDPQPLKEQPALNDSRYCLSSRLRVSATFWQNPRNHFRCQVQFYGLSENDEWTQDRAKPVTQIVSAEAWGRADCGSQSFGLLDPKLCYLLDGILFIYGVILTALFLRVKFSRSADAPAYQQGQNQLYNELNLGRREEYDVLDKRRGRDPEMGGKPQRRKNPQEGLYNELQKDKMAEAYSEIGMKGERRRGKGHDGLYQGLSTATKDTYDALHMQALPPRRAKRSGSGATNFSLLKQAGDVEENPGPTSMDWIWRILFLVGAATGAHSGPQVQLQESGGGLAQAGGSLRLSCAASGRTFSMGWFRQAPGKEREFVAAITYSGGSPYYASSVRGRFTISRDNAKNTVYLQMNSLKPEDTAVYYCAANPTYGSDWNAENWGQGTQVTVSSGSGGGGSGGGGSGGGGSFEQEVTQIPAALSVPEGENLVLNCSFTDSAIYNLQWFRQDPGKGLTSLLLIQSSQREQTSGRLNASLDKSSGRSTLYIAASQPGDSATYLCAVRPTSGGSYIPTFGRGTSLIVHPYEQKLISEEDGSGIQNPDPAVYQLRDSKSSDKSVCLFTDFDSQTNVSQSKDSDVYITDKTVLDMRSMDFKSNSAVAWSNKSDFACANAFNNSIIPEDTFFPSPESSCGTQSFGLLDPKLCYLLDGILFIYGVILTALFLRSKRSRLLHSDYMNMTPRRPGPTRKHYQPYAPPRDFAAYRSRVKFSRSADAPAYQQGQNQLYNELNLGRREEYDVLDKRRGRDPEMGGKPQRRKNPQEGLYNELQKDKMAEAYSEIGMKGERRRGKGHDGLYQGLSTATKDTYDALHMQALPPR

SEQ ID NO: 14770 - protein, 1206 aa, Artificial Sequence
  Synthetic Polypeptide
MALPVTALLLPLALLLHAARPACQVQLVESGGGLVQAGDSVTLSCTASGRTFSSYALAWFRQRPGKEREFVAGLRWGGPTNYADSVKDRFTISGDSAKHTMYLQMNSLKPEDTAVYYCGYNPGGWAVPSQYEYDSWGQGTQVTVSSGTGGGGSGGGGSGGGGSEFNAGVTQTPKFQVLKTGQSMTLQCAQDMNHEYMSWYRQDPGMGLRLIHYSVAIQTTDQGEVPNGYNVSRSTIEDFPLRLLSAAPSQTSVYFCASSYLGNTGELFFGEGSRLTVLEGKPIPNPLLGLDSTGSGEDLKNVFPPEVAVFEPSEAEISHTQKATLVCLATGFYPDHVELSWWVNGKEVHSGVSTDPQPLKEQPALNDSRYCLSSRLRVSATFWQNPRNHFRCQVQFYGLSENDEWTQDRAKPVTQIVSAEAWGRADCGSQSFGLLDPKLCYLLDGILFIYGVILTALFLRSKRSRLLHSDYMNMTPRRPGPTRKHYQPYAPPRDFAAYRSRVKFSRSADAPAYQQGQNQLYNELNLGRREEYDVLDKRRGRDPEMGGKPQRRKNPQEGLYNELQKDKMAEAYSEIGMKGERRRGKGHDGLYQGLSTATKDTYDALHMQALPPRRAKRSGSGATNFSLLKQAGDVEENPGPTSMDWIWRILFLVGAATGAHSGPQVQLQESGGGLAQAGGSLRLSCAASGRTFSMGWFRQAPGKEREFVAAITYSGGSPYYASSVRGRFTISRDNAKNTVYLQMNSLKPEDTAVYYCAANPTYGSDWNAENWGQGTQVTVSSGSGGGGSGGGGSGGGGSFEQEVTQIPAALSVPEGENLVLNCSFTDSAIYNLQWFRQDPGKGLTSLLLIQSSQREQTSGRLNASLDKSSGRSTLYIAASQPGDSATYLCAVRPTSGGSYIPTFGRGTSLIVHPYEQKLISEEDGSGIQNPDPAVYQLRDSKSSDKSVCLFTDFDSQTNVSQSKDSDVYITDKTVLDMRSMDFKSNSAVAWSNKSDFACANAFNNSIIPEDTFFPSPESSCGTQSFGLLDPKLCYLLDGILFIYGVILTALFLRSKRSRLLHSDYMNMTPRRPGPTRKHYQPYAPPRDFAAYRSRVKFSRSADAPAYQQGQNQLYNELNLGRREEYDVLDKRRGRDPEMGGKPQRRKNPQEGLYNELQKDKMAEAYSEIGMKGERRRGKGHDGLYQGLSTATKDTYDALHMQALPPR

SEQ ID NO: 14771 - protein, 1167 aa, Artificial Sequence
  Synthetic Polypeptide
MALPVTALLLPLALLLHAARPACQVQLVESGGGLVQAGDSVTLSCTASGRTFSSYALAWFRQRPGKEREFVAGLRWGGPTNYADSVKDRFTISGDSAKHTMYLQMNSLKPEDTAVYYCGYNPGGWAVPSQYEYDSWGQGTQVTVSSGTGGGGSGGGGSGGGGSEFNAGVTQTPKFQVLKTGQSMTLQCAQDMNHEYMSWYRQDPGMGLRLIHYSVAIQTTDQGEVPNGYNVSRSTIEDFPLRLLSAAPSQTSVYFCASSYLGNTGELFFGEGSRLTVLEGKPIPNPLLGLDSTGSGEDLKNVFPPEVAVFEPSEAEISHTQKATLVCLATGFYPDHVELSWWVNGKEVHSGVSTDPQPLKEQPALNDSRYCLSSRLRVSATFWQNPRNHFRCQVQFYGLSENDEWTQDRAKPVTQIVSAEAWGRADCGSQSFGLLDPKLCYLLDGILFIYGVILTALFLRVKFSRSADAPAYQQGQNQLYNELNLGRREEYDVLDKRRGRDPEMGGKPQRRKNPQEGLYNELQKDKMAEAYSEIGMKGERRRGKGHDGLYQGLSTATKDTYDALHMQALPPRRAKRSGSGATNFSLLKQAGDVEENPGPTSMDWIWRILFLVGAATGAHSGPQVQLQESGGGLAQAGGSLRLSCAASGRTFSMGWFRQAPGKEREFVAAITYSGGSPYYASSVRGRFTISRDNAKNTVYLQMNSLKPEDTAVYYCAANPTYGSDWNAENWGQGTQVTVSSGSGGGGSGGGGSGGGGSFEQEVTQIPAALSVPEGENLVLNCSFTDSAIYNLQWFRQDPGKGLTSLLLIQSSQREQTSGRLNASLDKSSGRSTLYIAASQPGDSATYLCAVRPTSGGSYIPTFGRGTSLIVHPYEQKLISEEDLGSGIQNPDPAVYQLRDSKSSDKSVCLFTDFDSQTNVSQSKDSDVYITDKTVLDMRSMDFKSNSAVAWSNKSDFACANAFNNSIIPEDTFFPSPESSCGTQSFGLLDPKLCYLLDGILFIYGVILTALFLKRGRKKLLYIFKQPFMRPVQTTQEEDGCSCRFPEEEEGGCELRVKFSRSADAPAYQQGQNQLYNELNLGRREEYDVLDKRRGRDPEMGGKPQRRKNPQEGLYNELQKDKMAEAYSEIGMKGERRRGKGHDGLYQGLSTATKDTYDALHMQALPPR

SEQ ID NO: 14772 - protein, 1209 aa, Artificial Sequence
  Synthetic Polypeptide
MALPVTALLLPLALLLHAARPACQVQLVESGGGLVQAGDSVTLSCTASGRTFSSYALAWFRQRPGKEREFVAGLRWGGPTNYADSVKDRFTISGDSAKHTMYLQMNSLKPEDTAVYYCGYNPGGWAVPSQYEYDSWGQGTQVTVSSGTGGGGSGGGGSGGGGSEFNAGVTQTPKFQVLKTGQSMTLQCAQDMNHEYMSWYRQDPGMGLRLIHYSVAIQTTDQGEVPNGYNVSRSTIEDFPLRLLSAAPSQTSVYFCASSYLGNTGELFFGEGSRLTVLEGKPIPNPLLGLDSTGSGEDLKNVFPPEVAVFEPSEAEISHTQKATLVCLATGFYPDHVELSWWVNGKEVHSGVSTDPQPLKEQPALNDSRYCLSSRLRVSATFWQNPRNHFRCQVQFYGLSENDEWTQDRAKPVTQIVSAEAWGRADCGSQSFGLLDPKLCYLLDGILFIYGVILTALFLKRGRKKLLYIFKQPFMRPVQTTQEEDGCSCRFPEEEEGGCELRVKFSRSADAPAYQQGQNQLYNELNLGRREEYDVLDKRRGRDPEMGGKPQRRKNPQEGLYNELQKDKMAEAYSEIGMKGERRRGKGHDGLYQGLSTATKDTYDALHMQALPPRRAKRSGSGATNFSLLKQAGDVEENPGPTSMDWIWRILFLVGAATGAHSGPQVQLQESGGGLAQAGGSLRLSCAASGRTFSMGWFRQAPGKEREFVAAITYSGGSPYYASSVRGRFTISRDNAKNTVYLQMNSLKPEDTAVYYCAANPTYGSDWNAENWGQGTQVTVSSGSGGGGSGGGGSGGGGSFEQEVTQIPAALSVPEGENLVLNCSFTDSAIYNLQWFRQDPGKGLTSLLLIQSSQREQTSGRLNASLDKSSGRSTLYIAASQPGDSATYLCAVRPTSGGSYIPTFGRGTSLIVHPYEQKLISEEDLGSGIQNPDPAVYQLRDSKSSDKSVCLFTDFDSQTNVSQSKDSDVYITDKTVLDMRSMDFKSNSAVAWSNKSDFACANAFNNSIIPEDTFFPSPESSCGTQSFGLLDPKLCYLLDGILFIYGVILTALFLKRGRKKLLYIFKQPFMRPVQTTQEEDGCSCRFPEEEEGGCELRVKFSRSADAPAYQQGQNQLYNELNLGRREEYDVLDKRRGRDPEMGGKPQRRKNPQEGLYNELQKDKMAEAYSEIGMKGERRRGKGHDGLYQGLSTATKDTYDALHMQALPPR

SEQ ID NO: 14773 - protein, 1099 aa, Artificial Sequence
  Synthetic Polypeptide
MALPVTALLLPLALLLHAARPACQVQLVESGGGLVQAGDSVTLSCTASGRTFSSYALAWFRQRPGKEREFVAGLRWGGPTNYADSVKDRFTISGDSAKHTMYLQMNSLKPEDTAVYYCGYNPGGWAVPSQYEYDSWGQGTQVTVSSGTGGGGSGGGGSGGGGSEFNAGVTQTPKFQVLKTGQSMTLQCAQDMNHEYMSWYRQDPGMGLRLIHYSVAIQTTDQGEVPNGYNVSRSTIEDFPLRLLSAAPSQTSVYFCASSYLGNTGELFFGEGSRLTVLEQSFGLLDPKLCYLLDGILFIYGVILTALFLRVKFSRSADAPAYQQGQNQLYNELNLGRREEYDVLDKRRGRDPEMGGKPQRRKNPQEGLYNELQKDKMAEAYSEIGMKGERRRGKGHDGLYQGLSTATKDTYDALHMQALPPRRAKRSGSGATNFSLLKQAGDVEENPGPTSMDWIWRILFLVGAATGAHSGPQVQLQESGGGLAQAGGSLRLSCAASGRTFSMGWFRQAPGKEREFVAAITYSGGSPYYASSVRGRFTISRDNAKNTVYLQMNSLKPEDTAVYYCAANPTYGSDWNAENWGQGTQVTVSSGSGGGGSGGGGSGGGGSFEQEVTQIPAALSVPEGENLVLNCSFTDSAIYNLQWFRQDPGKGLTSLLLIQSSQREQTSGRLNASLDKSSGRSTLYIAASQPGDSATYLCAVRPTSGGSYIPTFGRGTSLIVHPYQSFGLLDPKLCYLLDGILFIYGVILTALFLRVKFSRSADAPAYQQGQNQLYNELNLGRREEYDVLDKRRGRDPEMGGKPQRRKNPQEGLYNELQKDKMAEAYSEIGMKGERRRGKGHDGLYQGLSTATKDTYDALHMQALPPRRAKRSGSGVKQTLNFDLLKLAGDVESNPGPSRGHMTEYKPTVRLATRDDVPRAVRTLAAAFADYPATRHTVDPDRHIERVTELQELFLTRVGLDIGKVWVADDGAAVAVWTTPESVEAGAVFAEIGPRMAELSGSRLAAQQQMEGLLAPHRPKEPAWFLATVGVSPDHQGKGLGSAVVLPGVEAAERAGVPAFLETSAPRNLPFYERLGFTVTADVEVPEGPRTWCMTRKPGA

SEQ ID NO: 14774 - protein, 924 aa, Artificial Sequence
  Synthetic Polypeptide
MALPVTALLLPLALLLHAARPACQVQLVESGGGLVQAGDSVTLSCTASGRTFSSYALAWFRQRPGKEREFVAGLRWGGPTNYADSVKDRFTISGDSAKHTMYLQMNSLKPEDTAVYYCGYNPGGWAVPSQYEYDSWGQGTQVTVSSGTGGGGSGGGGSGGGGSEFNAGVTQTPKFQVLKTGQSMTLQCAQDMNHEYMSWYRQDPGMGLRLIHYSVAIQTTDQGEVPNGYNVSRSTIEDFPLRLLSAAPSQTSVYFCASSYLGNTGELFFGEGSRLTVLEGQPKANPTVTLFPPSSEELQANKATLVCLISDFYPGAVTVAWKADGSPVKAGVETTKPSKQSNNKYAASSYLSLTPEQWKSHRSYSCQVTHEGSTVEKTVAPTECSPIKTDVITMDPKDNCSKDANDTLLLQLTNTSAYYMYLLLLLKSVVYFAIITCCLLRRTAFCCNGEKSRAKRSGSGATNFSLLKQAGDVEENPGPTSMDWIWRILFLVGAATGAHSGPQVQLQESGGGLAQAGGSLRLSCAASGRTFSMGWFRQAPGKEREFVAAITYSGGSPYYASSVRGRFTISRDNAKNTVYLQMNSLKPEDTAVYYCAANPTYGSDWNAENWGQGTQVTVSSGSGGGGSGGGGSGGGGSFEQEVTQIPAALSVPEGENLVLNCSFTDSAIYNLQWFRQDPGKGLTSLLLIQSSQREQTSGRLNASLDKSSGRSTLYIAASQPGDSATYLCAVRPTSGGSYIPTFGRGTSLIVHPYASTKGPSVFPLAPSSKSTSGGTAALGCLVKDYFPEPVTVSWNSGALTSGVHTFPAVLQSSGLYSLSSVVTVPSSSLGTQTYICNVNHKPSNTKVDKRVEPKSCEVKTDSTDHVKPKETENTKQPSKSCHKPKAIVHTEKVNMMSLTVLGLRMLFAKTVAVNFLLTAKLFFL

SEQ ID NO: 14775 - protein, 902 aa, Artificial Sequence
  Synthetic Polypeptide
MALPVTALLLPLALLLHAARPACQVQLVESGGGLVQAGDSVTLSCTASGRTFSSYALAWFRQRPGKEREFVAGLRWGGPTNYADSVKDRFTISGDSAKHTMYLQMNSLKPEDTAVYYCGYNPGGWAVPSQYEYDSWGQGTQVTVSSGTGGGGSGGGGSGGGGSEFNAGVTQTPKFQVLKTGQSMTLQCAQDMNHEYMSWYRQDPGMGLRLIHYSVAIQTTDQGEVPNGYNVSRSTIEDFPLRLLSAAPSQTSVYFCASSYLGNTGELFFGEGSRLTVLEGQPKANPTVTLFPPSSEELQANKATLVCLISDFYPGAVTVAWKADGSPVKAGVETTKPSKQSNNKYAASSYLSLTPEQWKSHRSYSCQVTHEGSTVEKTVAPTECSGRADCGITSASYHQGVLSATILYEILLGKATLYAVLVSALVLMAMVKRKDSRGRAKRSGSGATNFSLLKQAGDVEENPGPTSMDWIWRILFLVGAATGAHSGPQVQLQESGGGLAQAGGSLRLSCAASGRTFSMGWFRQAPGKEREFVAAITYSGGSPYYASSVRGRFTISRDNAKNTVYLQMNSLKPEDTAVYYCAANPTYGSDWNAENWGQGTQVTVSSGSGGGGSGGGGSGGGGSFEQEVTQIPAALSVPEGENLVLNCSFTDSAIYNLQWFRQDPGKGLTSLLLIQSSQREQTSGRLNASLDKSSGRSTLYIAASQPGDSATYLCAVRPTSGGSYIPTFGRGTSLIVHPYASTKGPSVFPLAPSSKSTSGGTAALGCLVKDYFPEPVTVSWNSGALTSGVHTFPAVLQSSGLYSLSSVVTVPSSSLGTQTYICNVNHKPSNTKVDKRVEPKSCIPEDTFFPSSDVPCDVKLVEKSFETDTNLNFQNLSVIGFRILLLKVAGFNLLMTLRLWSS

SEQ ID NO: 14776 - protein, 902 aa, Artificial Sequence
  Synthetic Polypeptide
MALPVTALLLPLALLLHAARPACQVQLVESGGGLVQAGDSVTLSCTASGRTFSSYALAWFRQRPGKEREFVAGLRWGGPTNYADSVKDRFTISGDSAKHTMYLQMNSLKPEDTAVYYCGYNPGGWAVPSQYEYDSWGQGTQVTVSSGTGGGGSGGGGSGGGGSEFNAGVTQTPKFQVLKTGQSMTLQCAQDMNHEYMSWYRQDPGMGLRLIHYSVAIQTTDQGEVPNGYNVSRSTIEDFPLRLLSAAPSQTSVYFCASSYLGNTGELFFGEGSRLTVLEGQPKANPTVTLFPPSSEELQANKATLVCLISDFYPGAVTVAWKADGSPVKAGVETTKPSKQSNNKYAASSYLSLTPEQWKSHRSYSCQVTHEGSTVEKTVAPTECSGRADCGFTSESYQQGVLSATILYEILLGKATLYAVLVSALVLMAMVKRKDSRGRAKRSGSGATNFSLLKQAGDVEENPGPTSMDWIWRILFLVGAATGAHSGPQVQLQESGGGLAQAGGSLRLSCAASGRTFSMGWFRQAPGKEREFVAAITYSGGSPYYASSVRGRFTISRDNAKNTVYLQMNSLKPEDTAVYYCAANPTYGSDWNAENWGQGTQVTVSSGSGGGGSGGGGSGGGGSFEQEVTQIPAALSVPEGENLVLNCSFTDSAIYNLQWFRQDPGKGLTSLLLIQSSQREQTSGRLNASLDKSSGRSTLYIAASQPGDSATYLCAVRPTSGGSYIPTFGRGTSLIVHPYASTKGPSVFPLAPSSKSTSGGTAALGCLVKDYFPEPVTVSWNSGALTSGVHTFPAVLQSSGLYSLSSVVTVPSSSLGTQTYICNVNHKPSNTKVDKRVEPKSCIPEDTFFPSPESSCDVKLVEKSFETDTNLNFQNLSVIGFRILLLKVAGFNLLMTLRLWSS

SEQ ID NO: 14777 - protein, 640 aa, Artificial Sequence
  Synthetic Polypeptide
MDWIWRILFLVGAATGAHSGPQVQLQESGGGLAQAGGSLRLSCAASGRTFSMGWFRQAPGKEREFVAAITYSGGSPYYASSVRGRFTISRDNAKNTVYLQMNSLKPEDTAVYYCAANPTYGSDWNAENWGQGTQVTVSSGSGGGGSGGGGSGGGGSFEQVQLQQPGAELVKPGASVKMSCKASGYAFSSYWINWMKQKPGQGLEWIGQIYPGDGDTNYNGKFKGRATLTADTSSSTAYMQLSSLTSEDSAVYFCARSITTVVGCAMDYWGQGTSVTVSSGGGGSGGGGSGGGGSDIQMTQSPSSLSASVGDRVTITCKASDHINNWLAWYQQKPGQAPKLLIYGATTLETGVPSRFSGSGSGTDYTLTISSLQPEDFATYYCQQSWNTPWTFGQGTKLEIKRTREQKLISEEDLAKPTTTPAPRPPTPAPTIASQPLSLRPEACRPAAGGAVHTRGLDFACDIYIWAPLAGTCGVLLLSLVITLYCKRGRKKLLYIFKQPFMRPVQTTQEEDGCSCRFPEEEEGGCELRVKFSRSADAPAYQQGQNQLYNELNLGRREEYDVLDKRRGRDPEMGGKPRRKNPQEGLYNELQKDKMAEAYSEIGMKGERRRGKGHDGLYQGLSTATKDTYDALHMQALPPR

SEQ ID NO: 14778 - protein, 993 aa, Artificial Sequence
  Synthetic Polypeptide
MALPVTALLLPLALLLHAARPDIQMTQSPSSLSASVGDRVTITCKASDHINNWLAWYQQKPGQAPKLLIYGATTLETGVPSRFSGSGSGTDYTLTISSLQPEDFATYYCQQSWNTPWTFGQGTKLEIKRLEIQNPDPAVYQLRDSKSSDKSVCLFTDFDSQTNVSQSKDSDVYITDKCVLDMRSMDFKSNSAVAWSNKSDFACANAFNNSIIPEDTFFPSSDVPCDVKLVEKSFETDTNLNFQNLSVIGFRILLLKVAGFNLLMTLRLWSSRAKRSGSGVKQTLNFDLLKLAGDVESNPGPTSMDWIWRILFLVGAATGAHSGPQVQLQESGGGLAQAGGSLRLSCAASGRTFSMGWFRQAPGKEREFVAAITYSGGSPYYASSVRGRFTISRDNAKNTVYLQMNSLKPEDTAVYYCAANPTYGSDWNAENWGQGTQVTVSSGSGGGGSGGGGSGGGGSFEQVQLQQPGAELVKPGASVKMSCKASGYAFSSYWINWMKQKPGQGLEWIGQIYPGDGDTNYNGKFKGRATLTADTSSSTAYMQLSSLTSEDSAVYFCARSITTVVGCAMDYWGQGTSVTVSSTREDLKNVFPPEVAVFEPSKAEIAHTQKATLVCLATGFYPDHVELSWWVNGKEVHSGVCTDPQPLKEQPALNDSRYCLSSRLRVSATFWQNPRNHFRCQVQFYGLSENDEWTQDRAKPVTQIVSAEAWGRADCGITSASYHQGVLSATILYEILLGKATLYAVLVSALVLMAMVKRKDSRGRAKRSGSGATNFSLLKQAGDVEENPGPSRGHMTEYKPTVRLATRDDVPRAVRTLAAAFADYPATRHTVDPDRHIERVTELQELFLTRVGLDIGKVWVADDGAAVAVWTTPESVEAGAVFAEIGPRMAELSGSRLAAQQQMEGLLAPHRPKEPAWFLATVGVSPDHQGKGLGSAVVLPGVEAAERAGVPAFLETSAPRNLPFYERLGFTVTADVEVPEGPRTWCMTRKPGA

SEQ ID NO: 14779 - protein, 992 aa, Artificial Sequence
  Synthetic Polypeptide
MALPVTALLLPLALLLHAARPDIQMTQSPSSLSASVGDRVTITCKASDHINNWLAWYQQKPGQAPKLLIYGATTLETGVPSRFSGSGSGTDYTLTISSLQPEDFATYYCQQSWNTPWTFGQGTKLEIKRLEDLKNVFPPEVAVFEPSKAEIAHTQKATLVCLATGFYPDHVELSWWVNGKEVHSGVCTDPQPLKEQPALNDSRYCLSSRLRVSATFWQNPRNHFRCQVQFYGLSENDEWTQDRAKPVTQIVSAEAWGRADCGITSASYHQGVLSATILYEILLGKATLYAVLVSALVLMAMVKRKDSRGRAKRSGSGATNFSLLKQAGDVEENPGPTSMDWIWRILFLVGAATGAHSGPQVQLQESGGGLAQAGGSLRLSCAASGRTFSMGWFRQAPGKEREFVAAITYSGGSPYYASSVRGRFTISRDNAKNTVYLQMNSLKPEDTAVYYCAANPTYGSDWNAENWGQGTQVTVSSGSGGGGSGGGGSGGGGSFEQVQLQQPGAELVKPGASVKMSCKASGYAFSSYWINWMKQKPGQGLEWIGQIYPGDGDTNYNGKFKGRATLTADTSSSTAYMQLSSLTSEDSAVYFCARSITTVVGCAMDYWGQGTSVTVSSTRIQNPDPAVYQLRDSKSSDKSVCLFTDFDSQTNVSQSKDSDVYITDKCVLDMRSMDFKSNSAVAWSNKSDFACANAFNNSIIPEDTFFPSSDVPCDVKLVEKSFETDTNLNFQNLSVIGFRILLLKVAGFNLLMTLRLWSSRAKRSGSGVKQTLNFDLLKLAGDVESNPGPSRGHMTEYKPTVRLATRDDVPRAVRTLAAAFADYPATRHTVDPDRHIERVTELQELFLTRVGLDIGKVWVADDGAAVAVWTTPESVEAGAVFAEIGPRMAELSGSRLAAQQQMEGLLAPHRPKEPAWFLATVGVSPDHQGKGLGSAVVLPGVEAAERAGVPAFLETSAPRNLPFYERLGFTVTADVEVPEGPRTWCMTRKPGA

SEQ ID NO: 14780 - protein, 992 aa, Artificial Sequence
  Synthetic Polypeptide
MALPVTALLLPLALLLHAARPDIQMTQSPSSLSASVGDRVTITCKASDHINNWLAWYQQKPGQAPKLLIYGATTLETGVPSRFSGSGSGTDYTLTISSLQPEDFATYYCQQSWNTPWTFGQGTKLEIKRLEDLKNVFPPEVAVFEPSEAEISHTQKATLVCLATGFYPDHVELSWWVNGKEVHSGVCTDPQPLKEQPALNDSRYCLSSRLRVSATFWQNPRNHFRCQVQFYGLSENDEWTQDRAKPVTQIVSAEAWGRADCGFTSESYQQGVLSATILYEILLGKATLYAVLVSALVLMAMVKRKDSRGRAKRSGSGATNFSLLKQAGDVEENPGPTSMDWIWRILFLVGAATGAHSGPQVQLQESGGGLAQAGGSLRLSCAASGRTFSMGWFRQAPGKEREFVAAITYSGGSPYYASSVRGRFTISRDNAKNTVYLQMNSLKPEDTAVYYCAANPTYGSDWNAENWGQGTQVTVSSGSGGGGSGGGGSGGGGSFEQVQLQQPGAELVKPGASVKMSCKASGYAFSSYWINWMKQKPGQGLEWIGQIYPGDGDTNYNGKFKGRATLTADTSSSTAYMQLSSLTSEDSAVYFCARSITTVVGCAMDYWGQGTSVTVSSTRIQNPDPAVYQLRDSKSSDKSVCLFTDFDSQTNVSQSKDSDVYITDKCVLDMRSMDFKSNSAVAWSNKSDFACANAFNNSIIPEDTFFPSPESSCDVKLVEKSFETDTNLNFQNLSVIGFRILLLKVAGFNLLMTLRLWSSRAKRSGSGVKQTLNFDLLKLAGDVESNPGPSRGHMTEYKPTVRLATRDDVPRAVRTLAAAFADYPATRHTVDPDRHIERVTELQELFLTRVGLDIGKVWVADDGAAVAVWTTPESVEAGAVFAEIGPRMAELSGSRLAAQQQMEGLLAPHRPKEPAWFLATVGVSPDHQGKGLGSAVVLPGVEAAERAGVPAFLETSAPRNLPFYERLGFTVTADVEVPEGPRTWCMTRKPGA

SEQ ID NO: 14781 - protein, 759 aa, Artificial Sequence
  Synthetic Polypeptide
MALPVTALLLPLALLLHAARPDIQMTQSPSSLSASVGDRVTITCKASDHINNWLAWYQQKPGQAPKLLIYGATTLETGVPSRFSGSGSGTDYTLTISSLQPEDFATYYCQQSWNTPWTFGQGTKLEIKRLEDLKNVFPPEVAVFEPSEAEISHTQKATLVCLATGFYPDHVELSWWVNGKEVHSGVCTDPQPLKEQPALNDSRYCLSSRLRVSATFWQNPRNHFRCQVQFYGLSENDEWTQDRAKPVTQIVSAEAWGRADCGFTSESYQQGVLSATILYEILLGKATLYAVLVSALVLMAMVKRKDSRGRAKRSGSGATNFSLLKQAGDVEENPGPTSMDWIWRILFLVGAATGAHSGPQVQLQESGGGLAQAGGSLRLSCAASGRTFSMGWFRQAPGKEREFVAAITYSGGSPYYASSVRGRFTISRDNAKNTVYLQMNSLKPEDTAVYYCAANPTYGSDWNAENWGQGTQVTVSSGSGGGGSGGGGSGGGGSFEQVQLQQPGAELVKPGASVKMSCKASGYAFSSYWINWMKQKPGQGLEWIGQIYPGDGDTNYNGKFKGRATLTADTSSSTAYMQLSSLTSEDSAVYFCARSITTVVGCAMDYWGQGTSVTVSSTRIQNPDPAVYQLRDSKSSDKSVCLFTDFDSQTNVSQSKDSDVYITDKCVLDMRSMDFKSNSAVAWSNKSDFACANAFNNSIIPEDTFFPSPESSCDVKLVEKSFETDTNLNFQNLSVIGFRILLLKVAGFNLLMTLRLWSS

SEQ ID NO: 14782 - protein, 984 aa, Artificial Sequence
  Synthetic Polypeptide
MALPVTALLLPLALLLHAARPDIQMTQSPSSLSASVGDRVTITCKASDHINNWLAWYQQKPGQAPKLLIYGATTLETGVPSRFSGSGSGTDYTLTISSLQPEDFATYYCQQSWNTPWTFGQGTKLEIKRLEDLKNVFPPEVAVFEPSEAEISHTQKATLVCLATGFYPDHVELSWWVNGKEVHSGVCTDPQPLKEQPALNDSRYCLSSRLRVSATFWQNPRNHFRCQVQFYGLSENDEWTQDRAKPVTQIVSAEAWGRADCGFTSESYQQGVLSATILYEILLGKATLYAVLVSALVLMAMVKRKDSRGRAKRSGSGATNFSLLKQAGDVEENPGPTSMDWIWRILFLVGAATGAHSGPQVQLQESGGGLAQAGGSLRLSCAASGRTFSMGWFRQAPGKEREFVAAITYSGGSPYYASSVRGRFTISRDNAKNTVYLQMNSLKPEDTAVYYCAANPTYGSDWNAENWGQGTQVTVSSGSGGGGSGGGGSGGGGSFEQVQLQQPGAELVKPGASVKMSCKASGYAFSSYWINWMKQKPGQGLEWIGQIYPGDGDTNYNGKFKGRATLTADTSSSTAYMQLSSLTSEDSAVYFCARSITTVVGCAMDYWGQGTSVTVSSTRIQNPDPAVYQLRDSKSSDKSVCLFTDFDSQTNVSQSKDSDVYITDKCVLDMRSMDFKSNSAVAWSNKSDFACANAFNNSIIPEDTFFPSPESSCDVKLVEKSFETDTNLNFQNLSVIGFRILLLKVAGFNLLMTLRLWSSRAKRSGSGVKQTLNFDLLKLAGDVESNPGPSRGGIHTMATYEVLCEVARKLGTDDREVVLFLLNVFIPQPTLAQLIGALRALKEEGRLTFPLLAECLFRAGRRDLLRDLLHLDPRFLERHLAGTMSYFSPYQLTVLHVDGELCARDIRSLIFLSKDTIGSRSTPQTFLHWVYCMENLDLLGPTDVDALMSMLRSLSRVDLQRQVQTLMGLHLSGPSHSQHYRHTP

SEQ ID NO: 14783 - protein, 763 aa, Artificial Sequence
  Synthetic Polypeptide
MALPVTALLLPLALLLHAARPDIQMTQSPSSLSASVGDRVTITCKASDHINNWLAWYQQKPGQAPKLLIYGATTLETGVPSRFSGSGSGTDYTLTISSLQPEDFATYYCQQSWNTPWTFGQGTKLEIKRLEIQNPDPAVYQLRDSKSSDKSVCLFTDFDSQTNVSQSKDSDVYITDKCVLDMRSMDFKSNSAVAWSNKSDFACANAFNNSIIPEDTFFPSPESSCDVKLVEKSFETDTNLNFQNLSVIGFRILLLKVAGFNLLMTLRLWSSRAKRSGSGVKQTLNFDLLKLAGDVESNPGPTSMDWIWRILFLVGAATGAHSGPQVQLQESGGGLAQAGGSLRLSCAASGRTFSMGWFRQAPGKEREFVAAITYSGGSPYYASSVRGRFTISRDNAKNTVYLQMNSLKPEDTAVYYCAANPTYGSDWNAENWGQGTQVTVSSGSGGGGSGGGGSGGGGSFEQVQLQQPGAELVKPGASVKMSCKASGYAFSSYWINWMKQKPGQGLEWIGQIYPGDGDTNYNGKFKGRATLTADTSSSTAYMQLSSLTSEDSAVYFCARSITTVVGCAMDYWGQGTSVTVSSTREDLKNVFPPEVAVFEPSEAEISHTQKATLVCLATGFYPDHVELSWWVNGKEVHSGVCTDPQPLKEQPALNDSRYCLSSRLRVSATFWQNPRNHFRCQVQFYGLSENDEWTQDRAKPVTQIVSAEAWGRADCGFTSESYQQGVLSATILYEILLGKATLYAVLVSALVLMAMVKRKDSRG

SEQ ID NO: 14784 - protein, 985 aa, Artificial Sequence
  Synthetic Polypeptide
MALPVTALLLPLALLLHAARPDIQMTQSPSSLSASVGDRVTITCKASDHINNWLAWYQQKPGQAPKLLIYGATTLETGVPSRFSGSGSGTDYTLTISSLQPEDFATYYCQQSWNTPWTFGQGTKLEIKRLEIQNPDPAVYQLRDSKSSDKSVCLFTDFDSQTNVSQSKDSDVYITDKCVLDMRSMDFKSNSAVAWSNKSDFACANAFNNSIIPEDTFFPSPESSCDVKLVEKSFETDTNLNFQNLSVIGFRILLLKVAGFNLLMTLRLWSSRAKRSGSGVKQTLNFDLLKLAGDVESNPGPTSMDWIWRILFLVGAATGAHSGPQVQLQESGGGLAQAGGSLRLSCAASGRTFSMGWFRQAPGKEREFVAAITYSGGSPYYASSVRGRFTISRDNAKNTVYLQMNSLKPEDTAVYYCAANPTYGSDWNAENWGQGTQVTVSSGSGGGGSGGGGSGGGGSFEQVQLQQPGAELVKPGASVKMSCKASGYAFSSYWINWMKQKPGQGLEWIGQIYPGDGDTNYNGKFKGRATLTADTSSSTAYMQLSSLTSEDSAVYFCARSITTVVGCAMDYWGQGTSVTVSSTREDLKNVFPPEVAVFEPSEAEISHTQKATLVCLATGFYPDHVELSWWVNGKEVHSGVCTDPQPLKEQPALNDSRYCLSSRLRVSATFWQNPRNHFRCQVQFYGLSENDEWTQDRAKPVTQIVSAEAWGRADCGFTSESYQQGVLSATILYEILLGKATLYAVLVSALVLMAMVKRKDSRGRAKRSGSGATNFSLLKQAGDVEENPGPSRGGIHTMATYEVLCEVARKLGTDDREVVLFLLNVFIPQPTLAQLIGALRALKEEGRLTFPLLAECLFRAGRRDLLRDLLHLDPRFLERHLAGTMSYFSPYQLTVLHVDGELCARDIRSLIFLSKDTIGSRSTPQTFLHWVYCMENLDLLGPTDVDALMSMLRSLSRVDLQRQVQTLMGLHLSGPSHSQHYRHTP

SEQ ID NO: 14785 - protein, 992 aa, Artificial Sequence
  Synthetic Polypeptide
MALPVTALLLPLALLLHAARPDIQMTQSPSSLSASVGDRVTITCKASDHINNWLAWYQQKPGQAPKLLIYGATTLETGVPSRFSGSGSGTDYTLTISSLQPEDFATYYCQQSWNTPWTFGQGTKLEIKRLEDLKNVFPPEVAVFEPSEAEISHTQKATLVCLATGFYPDHVELSWWVNGKEVHSGVSTDPQPLKEQPALNDSRYCLSSRLRVSATFWQNPRNHFRCQVQFYGLSENDEWTQDRAKPVTQIVSAEAWGRADCGFTSESYQQGVLSATILYEILLGKATLYAVLVSALVLMAMVKRKDSRGRAKRSGSGATNFSLLKQAGDVEENPGPTSMDWIWRILFLVGAATGAHSGPQVQLQESGGGLAQAGGSLRLSCAASGRTFSMGWFRQAPGKEREFVAAITYSGGSPYYASSVRGRFTISRDNAKNTVYLQMNSLKPEDTAVYYCAANPTYGSDWNAENWGQGTQVTVSSGSGGGGSGGGGSGGGGSFEQVQLQQPGAELVKPGASVKMSCKASGYAFSSYWINWMKQKPGQGLEWIGQIYPGDGDTNYNGKFKGRATLTADTSSSTAYMQLSSLTSEDSAVYFCARSITTVVGCAMDYWGQGTSVTVSSTRIQNPDPAVYQLRDSKSSDKSVCLFTDFDSQTNVSQSKDSDVYITDKTVLDMRSMDFKSNSAVAWSNKSDFACANAFNNSIIPEDTFFPSPESSCDVKLVEKSFETDTNLNFQNLSVIGFRILLLKVAGFNLLMTLRLWSSRAKRSGSGVKQTLNFDLLKLAGDVESNPGPSRGHMTEYKPTVRLATRDDVPRAVRTLAAAFADYPATRHTVDPDRHIERVTELQELFLTRVGLDIGKVWVADDGAAVAVWTTPESVEAGAVFAEIGPRMAELSGSRLAAQQQMEGLLAPHRPKEPAWFLATVGVSPDHQGKGLGSAVVLPGVEAAERAGVPAFLETSAPRNLPFYERLGFTVTADVEVPEGPRTWCMTRKPGA

SEQ ID NO: 14786 - protein, 1074 aa, Artificial Sequence
  Synthetic Polypeptide
MALPVTALLLPLALLLHAARPDIQMTQSPSSLSASVGDRVTITCKASDHINNWLAWYQQKPGQAPKLLIYGATTLETGVPSRFSGSGSGTDYTLTISSLQPEDFATYYCQQSWNTPWTFGQGTKLEIKRLEDLKNVFPPEVAVFEPSEAEISHTQKATLVCLATGFYPDHVELSWWVNGKEVHSGVSTDPQPLKEQPALNDSRYCLSSRLRVSATFWQNPRNHFRCQVQFYGLSENDEWTQDRAKPVTQIVSAEAWGRADCGFTSESYQQGVLSATILYEILLGKATLYAVLVSALVLMAMVKRKDSRGRAKRSGSGATNFSLLKQAGDVEENPGPTSMDWIWRILFLVGAATGAHSGPQVQLQESGGGLAQAGGSLRLSCAASGRTFSMGWFRQAPGKEREFVAAITYSGGSPYYASSVRGRFTISRDNAKNTVYLQMNSLKPEDTAVYYCAANPTYGSDWNAENWGQGTQVTVSSGSGGGGSGGGGSGGGGSFEQVQLQQPGAELVKPGASVKMSCKASGYAFSSYWINWMKQKPGQGLEWIGQIYPGDGDTNYNGKFKGRATLTADTSSSTAYMQLSSLTSEDSAVYFCARSITTVVGCAMDYWGQGTSVTVSSTREQKLISEEDGSGTPFPSLAPPIMLLVDGKQQMVVVCLVLDVAPPGLDSPIWFSAGNGSALDAFTYGPSPATDGTWTNLAHLSLPSEELASWEPLVCHTGPGAEGHSRSTQPMHLSGEASTARTCPQEPLRGTPGGALWLGVLRLLLFKLLLFDLLLTCSCLCDPAGPLPSPATTTRLRALGSHRLHPATETGGREATSSPRPQPRDRRWGDTPPGRKPGSPVRAKRSGSGVKQTLNFDLLKLAGDVESNPGPSRGHMTEYKPTVRLATRDDVPRAVRTLAAAFADYPATRHTVDPDRHIERVTELQELFLTRVGLDIGKVWVADDGAAVAVWTTPESVEAGAVFAEIGPRMAELSGSRLAAQQQMEGLLAPHRPKEPAWFLATVGVSPDHQGKGLGSAVVLPGVEAAERAGVPAFLETSAPRNLPFYERLGFTVTADVEVPEGPRTWCMTRKPGA

SEQ ID NO: 14787 - protein, 1029 aa, Artificial Sequence
  Synthetic Polypeptide
MALPVTALLLPLALLLHAARPDIQMTQSPSSLSASVGDRVTITCKASDHINNWLAWYQQKPGQAPKLLIYGATTLETGVPSRFSGSGSGTDYTLTISSLQPEDFATYYCQQSWNTPWTFGQGTKLEIKRLEGKPIPNPLLGLDSTGSGDKQLDADVSPKPTIFLPSIAETKLQKAGTYLCLLEKFFPDVIKIHWQEKKSNTILGSQEGNTMKTNDTYMKFSWLTVPEKSLDKEHRCIVRHENNKNGVDQEIIFPPIKTDVITMDPKDNCSKDANDTLLLQLTNTSAYYMYLLLLLKSVVYFAIITCCLLRRTAFCCNGEKSRAKRSGSGATNFSLLKQAGDVEENPGPTSMDWIWRILFLVGAATGAHSGPQVQLQESGGGLAQAGGSLRLSCAASGRTFSMGWFRQAPGKEREFVAAITYSGGSPYYASSVRGRFTISRDNAKNTVYLQMNSLKPEDTAVYYCAANPTYGSDWNAENWGQGTQVTVSSGSGGGGSGGGGSGGGGSFEQVQLQQPGAELVKPGASVKMSCKASGYAFSSYWINWMKQKPGQGLEWIGQIYPGDGDTNYNGKFKGRATLTADTSSSTAYMQLSSLTSEDSAVYFCARSITTVVGCAMDYWGQGTSVTVSSTREQKLISEEDGSGSQPHTKPSVFVMKNGTNVACLVKEFYPKDIRINLVSSKKITEFDPAIVISPSGKYNAVKLGKYEDSNSVTCSVQHDNKTVHSTDFEVKTDSTDHVKPKETENTKQPSKSCHKPKAIVHTEKVNMMSLTVLGLRMLFAKTVAVNFLLTAKLFFLRAKRSGSGVKQTLNFDLLKLAGDVESNPGPSRGHMTEYKPTVRLATRDDVPRAVRTLAAAFADYPATRHTVDPDRHIERVTELQELFLTRVGLDIGKVWVADDGAAVAVWTTPESVEAGAVFAEIGPRMAELSGSRLAAQQQMEGLLAPHRPKEPAWFLATVGVSPDHQGKGLGSAVVLPGVEAAERAGVPAFLETSAPRNLPFYERLGFTVTADVEVPEGPRTWCMTRKPGA

SEQ ID NO: 14788 - protein, 767 aa, Artificial Sequence
  Synthetic Polypeptide
MALPVTALLLPLALLLHAARPDIQMTQSPSSLSASVGDRVTITCKASDHINNWLAWYQQKPGQAPKLLIYGATTLETGVPSRFSGSGSGTDYTLTISSLQPEDFATYYCQQSWNTPWTFGQGTKLEIKRLESQPHTKPSVFVMKNGTNVACLVKEFYPKDIRINLVSSKKITEFDPAIVISPSGKYNAVKLGKYEDSNSVTCSVQHDNKTVHSTDFEVKTDSTDHVKPKETENTKQPSKSCHKPKAIVHTEKVNMMSLTVLGLRMLFAKTVAVNFLLTAKLFFLRAKRSGSGATNFSLLKQAGDVEENPGPTSMDWIWRILFLVGAATGAHSGPQVQLQESGGGLAQAGGSLRLSCAASGRTFSMGWFRQAPGKEREFVAAITYSGGSPYYASSVRGRFTISRDNAKNTVYLQMNSLKPEDTAVYYCAANPTYGSDWNAENWGQGTQVTVSSGSGGGGSGGGGSGGGGSFEQVQLQQPGAELVKPGASVKMSCKASGYAFSSYWINWMKQKPGQGLEWIGQIYPGDGDTNYNGKFKGRATLTADTSSSTAYMQLSSLTSEDSAVYFCARSITTVVGCAMDYWGQGTSVTVSSTRDKQLDADVSPKPTIFLPSIAETKLQKAGTYLCLLEKFFPDVIKIHWQEKKSNTILGSQEGNTMKTNDTYMKFSWLTVPEKSLDKEHRCIVRHENNKNGVDQEIIFPPIKTDVITMDPKDNCSKDANDTLLLQLTNTSAYYMYLLLLLKSVVYFAIITCCLLRRTAFCCNGEKS

SEQ ID NO: 14789 - protein, 1169 aa, Artificial Sequence
  Synthetic Polypeptide
MALPVTALLLPLALLLHAARPDIQMTQSPSSLSASVGDRVTITCKASDHINNWLAWYQQKPGQAPKLLIYGATTLETGVPSRFSGSGSGTDYTLTISSLQPEDFATYYCQQSWNTPWTFGQGTKLEIKRGQPKANPTVTLFPPSSEELQANKATLVCLISDFYPGAVTVAWKADGSPVKAGVETTKPSKQSNNKYAASSYLSLTPEQWKSHRSYSCQVTHEGSTVEKTVAPTECSGSQSFGLLDPKLCYLLDGILFIYGVILTALFLRVKFSRSADAPAYQQGQNQLYNELNLGRREEYDVLDKRRGRDPEMGGKPQRRKNPQEGLYNELQKDKMAEAYSEIGMKGERRRGKGHDGLYQGLSTATKDTYDALHMQALPPRRAKRSGSGATNFSLLKQAGDVEENPGPTSMDWIWRILFLVGAATGAHSGPQVQLQESGGGLAQAGGSLRLSCAASGRTFSMGWFRQAPGKEREFVAAITYSGGSPYYASSVRGRFTISRDNAKNTVYLQMNSLKPEDTAVYYCAANPTYGSDWNAENWGQGTQVTVSSGSGGGGSGGGGSGGGGSFEQVQLQQPGAELVKPGASVKMSCKASGYAFSSYWINWMKQKPGQGLEWIGQIYPGDGDTNYNGKFKGRATLTADTSSSTAYMQLSSLTSEDSAVYFCARSITTVVGCAMDYWGQGTSVTVSSASTKGPSVFPLAPSSKSTSGGTAALGCLVKDYFPEPVTVSWNSGALTSGVHTFPAVLQSSGLYSLSSVVTVPSSSLGTQTYICNVNHKPSNTKVDKRVEPKSCGTQSFGLLDPKLCYLLDGILFIYGVILTALFLRVKFSRSADAPAYQQGQNQLYNELNLGRREEYDVLDKRRGRDPEMGGKPQRRKNPQEGLYNELQKDKMAEAYSEIGMKGERRRGKGHDGLYQGLSTATKDTYDALHMQALPPRRAKRSGSGVKQTLNFDLLKLAGDVESNPGPSRGHMTEYKPTVRLATRDDVPRAVRTLAAAFADYPATRHTVDPDRHIERVTELQELFLTRVGLDIGKVWVADDGAAVAVWTTPESVEAGAVFAEIGPRMAELSGSRLAAQQQMEGLLAPHRPKEPAWFLATVGVSPDHQGKGLGSAVVLPGVEAAERAGVPAFLETSAPRNLPFYERLGFTVTADVEVPEGPRTWCMTRKPGA

SEQ ID NO: 14790 - protein, 955 aa, Artificial Sequence
  Synthetic Polypeptide
MALPVTALLLPLALLLHAARPDIQMTQSPSSLSASVGDRVTITCKASDHINNWLAWYQQKPGQAPKLLIYGATTLETGVPSRFSGSGSGTDYTLTISSLQPEDFATYYCQQSWNTPWTFGQGTKLEIKRLEDLKNVFPPEVAVFEPSEAEISHTQKATLVCLATGFYPDHVELSWWVNGKEVHSGVSTDPQPLKEQPALNDSRYCLSSRLRVSATFWQNPRNHFRCQVQFYGLSENDEWTQDRAKPVTQIVSAEAWGRADCGSQSFGLLDPKLCYLLDGILFIYGVILTALFLRVKFSRSADAPAYQQGQNQLYNELNLGRREEYDVLDKRRGRDPEMGGKPQRRKNPQEGLYNELQKDKMAEAYSEIGMKGERRRGKGHDGLYQGLSTATKDTYDALHMQALPPRRAKRSGSGATNFSLLKQAGDVEENPGPTSMDWIWRILFLVGAATGAHSGPQVQLQESGGGLAQAGGSLRLSCAASGRTFSMGWFRQAPGKEREFVAAITYSGGSPYYASSVRGRFTISRDNAKNTVYLQMNSLKPEDTAVYYCAANPTYGSDWNAENWGQGTQVTVSSGSGGGGSGGGGSGGGGSFEQVQLQQPGAELVKPGASVKMSCKASGYAFSSYWINWMKQKPGQGLEWIGQIYPGDGDTNYNGKFKGRATLTADTSSSTAYMQLSSLTSEDSAVYFCARSITTVVGCAMDYWGQGTSVTVSSTRIQNPDPAVYQLRDSKSSDKSVCLFTDFDSQTNVSQSKDSDVYITDKTVLDMRSMDFKSNSAVAWSNKSDFACANAFNNSIIPEDTFFPSPESSCGTQSFGLLDPKLCYLLDGILFIYGVILTALFLRVKFSRSADAPAYQQGQNQLYNELNLGRREEYDVLDKRRGRDPEMGGKPQRRKNPQEGLYNELQKDKMAEAYSEIGMKGERRRGKGHDGLYQGLSTATKDTYDALHMQALPPR

SEQ ID NO: 14791 - protein, 955 aa, Artificial Sequence
  Synthetic Polypeptide
MALPVTALLLPLALLLHAARPDIQMTQSPSSLSASVGDRVTITCKASDHINNWLAWYQQKPGQAPKLLIYGATTLETGVPSRFSGSGSGTDYTLTISSLQPEDFATYYCQQSWNTPWTFGQGTKLEIKRLEDLKNVFPPEVAVFEPSKAEIAHTQKATLVCLATGFYPDHVELSWWVNGKEVHSGVCTDPQPLKEQPALNDSRYCLSSRLRVSATFWQNPRNHFRCQVQFYGLSENDEWTQDRAKPVTQIVSAEAWGRADCGSQSFGLLDPKLCYLLDGILFIYGVILTALFLRVKFSRSADAPAYQQGQNQLYNELNLGRREEYDVLDKRRGRDPEMGGKPQRRKNPQEGLYNELQKDKMAEAYSEIGMKGERRRGKGHDGLYQGLSTATKDTYDALHMQALPPRRAKRSGSGATNFSLLKQAGDVEENPGPTSMDWIWRILFLVGAATGAHSGPQVQLQESGGGLAQAGGSLRLSCAASGRTFSMGWFRQAPGKEREFVAAITYSGGSPYYASSVRGRFTISRDNAKNTVYLQMNSLKPEDTAVYYCAANPTYGSDWNAENWGQGTQVTVSSGSGGGGSGGGGSGGGGSFEQVQLQQPGAELVKPGASVKMSCKASGYAFSSYWINWMKQKPGQGLEWIGQIYPGDGDTNYNGKFKGRATLTADTSSSTAYMQLSSLTSEDSAVYFCARSITTVVGCAMDYWGQGTSVTVSSTRIQNPDPAVYQLRDSKSSDKSVCLFTDFDSQTNVSQSKDSDVYITDKCVLDMRSMDFKSNSAVAWSNKSDFACANAFNNSIIPEDTFFPSSDVPCGTQSFGLLDPKLCYLLDGILFIYGVILTALFLRVKFSRSADAPAYQQGQNQLYNELNLGRREEYDVLDKRRGRDPEMGGKPQRRKNPQEGLYNELQKDKMAEAYSEIGMKGERRRGKGHDGLYQGLSTATKDTYDALHMQALPPR

SEQ ID NO: 14792 - protein, 1026 aa, Artificial Sequence
  Synthetic Polypeptide
MALPVTALLLPLALLLHAARPDIQMTQSPSSLSASVGDRVTITCKASDHINNWLAWYQQKPGQAPKLLIYGATTLETGVPSRFSGSGSGTDYTLTISSLQPEDFATYYCQQSWNTPWTFGQGTKLEIKRLEGKPIPNPLLGLDSTGSGEDLKNVFPPEVAVFEPSEAEISHTQKATLVCLATGFYPDHVELSWWVNGKEVHSGVSTDPQPLKEQPALNDSRYCLSSRLRVSATFWQNPRNHFRCQVQFYGLSENDEWTQDRAKPVTQIVSAEAWGRADCGSQSFGLLDPKLCYLLDGILFIYGVILTALFLRVKFSRSADAPAYQQGQNQLYNELNLGRREEYDVLDKRRGRDPEMGGKPQRRKNPQEGLYNELQKDKMAEAYSEIGMKGERRRGKGHDGLYQGLSTATKDTYDALHMQALPPRRAKRSGSGATNFSLLKQAGDVEENPGPTSMDWIWRILFLVGAATGAHSGPQVQLQESGGGLAQAGGSLRLSCAASGRTFSMGWFRQAPGKEREFVAAITYSGGSPYYASSVRGRFTISRDNAKNTVYLQMNSLKPEDTAVYYCAANPTYGSDWNAENWGQGTQVTVSSGSGGGGSGGGGSGGGGSFEQVQLQQPGAELVKPGASVKMSCKASGYAFSSYWINWMKQKPGQGLEWIGQIYPGDGDTNYNGKFKGRATLTADTSSSTAYMQLSSLTSEDSAVYFCARSITTVVGCAMDYWGQGTSVTVSSTREQKLISEEDGSGIQNPDPAVYQLRDSKSSDKSVCLFTDFDSQTNVSQSKDSDVYITDKTVLDMRSMDFKSNSAVAWSNKSDFACANAFNNSIIPEDTFFPSPESSCGTQSFGLLDPKLCYLLDGILFIYGVILTALFLRSKRSRLLHSDYMNMTPRRPGPTRKHYQPYAPPRDFAAYRSRVKFSRSADAPAYQQGQNQLYNELNLGRREEYDVLDKRRGRDPEMGGKPQRRKNPQEGLYNELQKDKMAEAYSEIGMKGERRRGKGHDGLYQGLSTATKDTYDALHMQALPPR

SEQ ID NO: 14793 - protein, 1067 aa, Artificial Sequence
  Synthetic Polypeptide
MALPVTALLLPLALLLHAARPDIQMTQSPSSLSASVGDRVTITCKASDHINNWLAWYQQKPGQAPKLLIYGATTLETGVPSRFSGSGSGTDYTLTISSLQPEDFATYYCQQSWNTPWTFGQGTKLEIKRLEGKPIPNPLLGLDSTGSGEDLKNVFPPEVAVFEPSEAEISHTQKATLVCLATGFYPDHVELSWWVNGKEVHSGVSTDPQPLKEQPALNDSRYCLSSRLRVSATFWQNPRNHFRCQVQFYGLSENDEWTQDRAKPVTQIVSAEAWGRADCGSQSFGLLDPKLCYLLDGILFIYGVILTALFLRSKRSRLLHSDYMNMTPRRPGPTRKHYQPYAPPRDFAAYRSRVKFSRSADAPAYQQGQNQLYNELNLGRREEYDVLDKRRGRDPEMGGKPQRRKNPQEGLYNELQKDKMAEAYSEIGMKGERRRGKGHDGLYQGLSTATKDTYDALHMQALPPRRAKRSGSGATNFSLLKQAGDVEENPGPTSMDWIWRILFLVGAATGAHSGPQVQLQESGGGLAQAGGSLRLSCAASGRTFSMGWFRQAPGKEREFVAAITYSGGSPYYASSVRGRFTISRDNAKNTVYLQMNSLKPEDTAVYYCAANPTYGSDWNAENWGQGTQVTVSSGSGGGGSGGGGSGGGGSFEQVQLQQPGAELVKPGASVKMSCKASGYAFSSYWINWMKQKPGQGLEWIGQIYPGDGDTNYNGKFKGRATLTADTSSSTAYMQLSSLTSEDSAVYFCARSITTVVGCAMDYWGQGTSVTVSSTREQKLISEEDGSGIQNPDPAVYQLRDSKSSDKSVCLFTDFDSQTNVSQSKDSDVYITDKTVLDMRSMDFKSNSAVAWSNKSDFACANAFNNSIIPEDTFFPSPESSCGTQSFGLLDPKLCYLLDGILFIYGVILTALFLRSKRSRLLHSDYMNMTPRRPGPTRKHYQPYAPPRDFAAYRSRVKFSRSADAPAYQQGQNQLYNELNLGRREEYDVLDKRRGRDPEMGGKPQRRKNPQEGLYNELQKDKMAEAYSEIGMKGERRRGKGHDGLYQGLSTATKDTYDALHMQALPPR

SEQ ID NO: 14794 - protein, 1028 aa, Artificial Sequence
  Synthetic Polypeptide
MALPVTALLLPLALLLHAARPDIQMTQSPSSLSASVGDRVTITCKASDHINNWLAWYQQKPGQAPKLLIYGATTLETGVPSRFSGSGSGTDYTLTISSLQPEDFATYYCQQSWNTPWTFGQGTKLEIKRLEGKPIPNPLLGLDSTGSGEDLKNVFPPEVAVFEPSEAEISHTQKATLVCLATGFYPDHVELSWWVNGKEVHSGVSTDPQPLKEQPALNDSRYCLSSRLRVSATFWQNPRNHFRCQVQFYGLSENDEWTQDRAKPVTQIVSAEAWGRADCGSQSFGLLDPKLCYLLDGILFIYGVILTALFLRVKFSRSADAPAYQQGQNQLYNELNLGRREEYDVLDKRRGRDPEMGGKPQRRKNPQEGLYNELQKDKMAEAYSEIGMKGERRRGKGHDGLYQGLSTATKDTYDALHMQALPPRRAKRSGSGATNFSLLKQAGDVEENPGPTSMDWIWRILFLVGAATGAHSGPQVQLQESGGGLAQAGGSLRLSCAASGRTFSMGWFRQAPGKEREFVAAITYSGGSPYYASSVRGRFTISRDNAKNTVYLQMNSLKPEDTAVYYCAANPTYGSDWNAENWGQGTQVTVSSGSGGGGSGGGGSGGGGSFEQVQLQQPGAELVKPGASVKMSCKASGYAFSSYWINWMKQKPGQGLEWIGQIYPGDGDTNYNGKFKGRATLTADTSSSTAYMQLSSLTSEDSAVYFCARSITTVVGCAMDYWGQGTSVTVSSTREQKLISEEDLGSGIQNPDPAVYQLRDSKSSDKSVCLFTDFDSQTNVSQSKDSDVYITDKTVLDMRSMDFKSNSAVAWSNKSDFACANAFNNSIIPEDTFFPSPESSCGTQSFGLLDPKLCYLLDGILFIYGVILTALFLKRGRKKLLYIFKQPFMRPVQTTQEEDGCSCRFPEEEEGGCELRVKFSRSADAPAYQQGQNQLYNELNLGRREEYDVLDKRRGRDPEMGGKPQRRKNPQEGLYNELQKDKMAEAYSEIGMKGERRRGKGHDGLYQGLSTATKDTYDALHMQALPPR

SEQ ID NO: 14795 - protein, 1070 aa, Artificial Sequence
  Synthetic Polypeptide
MALPVTALLLPLALLLHAARPDIQMTQSPSSLSASVGDRVTITCKASDHINNWLAWYQQKPGQAPKLLIYGATTLETGVPSRFSGSGSGTDYTLTISSLQPEDFATYYCQQSWNTPWTFGQGTKLEIKRLEGKPIPNPLLGLDSTGSGEDLKNVFPPEVAVFEPSEAEISHTQKATLVCLATGFYPDHVELSWWVNGKEVHSGVSTDPQPLKEQPALNDSRYCLSSRLRVSATFWQNPRNHFRCQVQFYGLSENDEWTQDRAKPVTQIVSAEAWGRADCGSQSFGLLDPKLCYLLDGILFIYGVILTALFLKRGRKKLLYIFKQPFMRPVQTTQEEDGCSCRFPEEEEGGCELRVKFSRSADAPAYQQGQNQLYNELNLGRREEYDVLDKRRGRDPEMGGKPQRRKNPQEGLYNELQKDKMAEAYSEIGMKGERRRGKGHDGLYQGLSTATKDTYDALHMQALPPRRAKRSGSGATNFSLLKQAGDVEENPGPTSMDWIWRILFLVGAATGAHSGPQVQLQESGGGLAQAGGSLRLSCAASGRTFSMGWFRQAPGKEREFVAAITYSGGSPYYASSVRGRFTISRDNAKNTVYLQMNSLKPEDTAVYYCAANPTYGSDWNAENWGQGTQVTVSSGSGGGGSGGGGSGGGGSFEQVQLQQPGAELVKPGASVKMSCKASGYAFSSYWINWMKQKPGQGLEWIGQIYPGDGDTNYNGKFKGRATLTADTSSSTAYMQLSSLTSEDSAVYFCARSITTVVGCAMDYWGQGTSVTVSSTREQKLISEEDLGSGIQNPDPAVYQLRDSKSSDKSVCLFTDFDSQTNVSQSKDSDVYITDKTVLDMRSMDFKSNSAVAWSNKSDFACANAFNNSIIPEDTFFPSPESSCGTQSFGLLDPKLCYLLDGILFIYGVILTALFLKRGRKKLLYIFKQPFMRPVQTTQEEDGCSCRFPEEEEGGCELRVKFSRSADAPAYQQGQNQLYNELNLGRREEYDVLDKRRGRDPEMGGKPQRRKNPQEGLYNELQKDKMAEAYSEIGMKGERRRGKGHDGLYQGLSTATKDTYDALHMQALPPR

SEQ ID NO: 14796 - protein, 960 aa, Artificial Sequence
  Synthetic Polypeptide
MALPVTALLLPLALLLHAARPDIQMTQSPSSLSASVGDRVTITCKASDHINNWLAWYQQKPGQAPKLLIYGATTLETGVPSRFSGSGSGTDYTLTISSLQPEDFATYYCQQSWNTPWTFGQGTKLEIKRLEQSFGLLDPKLCYLLDGILFIYGVILTALFLRVKFSRSADAPAYQQGQNQLYNELNLGRREEYDVLDKRRGRDPEMGGKPQRRKNPQEGLYNELQKDKMAEAYSEIGMKGERRRGKGHDGLYQGLSTATKDTYDALHMQALPPRRAKRSGSGATNFSLLKQAGDVEENPGPTSMDWIWRILFLVGAATGAHSGPQVQLQESGGGLAQAGGSLRLSCAASGRTFSMGWFRQAPGKEREFVAAITYSGGSPYYASSVRGRFTISRDNAKNTVYLQMNSLKPEDTAVYYCAANPTYGSDWNAENWGQGTQVTVSSGSGGGGSGGGGSGGGGSFEQVQLQQPGAELVKPGASVKMSCKASGYAFSSYWINWMKQKPGQGLEWIGQIYPGDGDTNYNGKFKGRATLTADTSSSTAYMQLSSLTSEDSAVYFCARSITTVVGCAMDYWGQGTSVTVSSTRQSFGLLDPKLCYLLDGILFIYGVILTALFLRVKFSRSADAPAYQQGQNQLYNELNLGRREEYDVLDKRRGRDPEMGGKPQRRKNPQEGLYNELQKDKMAEAYSEIGMKGERRRGKGHDGLYQGLSTATKDTYDALHMQALPPRRAKRSGSGVKQTLNFDLLKLAGDVESNPGPSRGHMTEYKPTVRLATRDDVPRAVRTLAAAFADYPATRHTVDPDRHIERVTELQELFLTRVGLDIGKVWVADDGAAVAVWTTPESVEAGAVFAEIGPRMAELSGSRLAAQQQMEGLLAPHRPKEPAWFLATVGVSPDHQGKGLGSAVVLPGVEAAERAGVPAFLETSAPRNLPFYERLGFTVTADVEVPEGPRTWCMTRKPGA

SEQ ID NO: 14797 - protein, 785 aa, Artificial Sequence
  Synthetic Polypeptide
MALPVTALLLPLALLLHAARPDIQMTQSPSSLSASVGDRVTITCKASDHINNWLAWYQQKPGQAPKLLIYGATTLETGVPSRFSGSGSGTDYTLTISSLQPEDFATYYCQQSWNTPWTFGQGTKLEIKRLEGQPKANPTVTLFPPSSEELQANKATLVCLISDFYPGAVTVAWKADGSPVKAGVETTKPSKQSNNKYAASSYLSLTPEQWKSHRSYSCQVTHEGSTVEKTVAPTECSPIKTDVITMDPKDNCSKDANDTLLLQLTNTSAYYMYLLLLLKSVVYFAIITCCLLRRTAFCCNGEKSRAKRSGSGATNFSLLKQAGDVEENPGPTSMDWIWRILFLVGAATGAHSGPQVQLQESGGGLAQAGGSLRLSCAASGRTFSMGWFRQAPGKEREFVAAITYSGGSPYYASSVRGRFTISRDNAKNTVYLQMNSLKPEDTAVYYCAANPTYGSDWNAENWGQGTQVTVSSGSGGGGSGGGGSGGGGSFEQVQLQQPGAELVKPGASVKMSCKASGYAFSSYWINWMKQKPGQGLEWIGQIYPGDGDTNYNGKFKGRATLTADTSSSTAYMQLSSLTSEDSAVYFCARSITTVVGCAMDYWGQGTSVTVSSTRASTKGPSVFPLAPSSKSTSGGTAALGCLVKDYFPEPVTVSWNSGALTSGVHTFPAVLQSSGLYSLSSVVTVPSSSLGTQTYICNVNHKPSNTKVDKRVEPKSCEVKTDSTDHVKPKETENTKQPSKSCHKPKAIVHTEKVNMMSLTVLGLRMLFAKTVAVNFLLTAKLFFL

SEQ ID NO: 14798 - protein, 763 aa, Artificial Sequence
  Synthetic Polypeptide
MALPVTALLLPLALLLHAARPDIQMTQSPSSLSASVGDRVTITCKASDHINNWLAWYQQKPGQAPKLLIYGATTLETGVPSRFSGSGSGTDYTLTISSLQPEDFATYYCQQSWNTPWTFGQGTKLEIKRLEGQPKANPTVTLFPPSSEELQANKATLVCLISDFYPGAVTVAWKADGSPVKAGVETTKPSKQSNNKYAASSYLSLTPEQWKSHRSYSCQVTHEGSTVEKTVAPTECSGRADCGITSASYHQGVLSATILYEILLGKATLYAVLVSALVLMAMVKRKDSRGRAKRSGSGATNFSLLKQAGDVEENPGPTSMDWIWRILFLVGAATGAHSGPQVQLQESGGGLAQAGGSLRLSCAASGRTFSMGWFRQAPGKEREFVAAITYSGGSPYYASSVRGRFTISRDNAKNTVYLQMNSLKPEDTAVYYCAANPTYGSDWNAENWGQGTQVTVSSGSGGGGSGGGGSGGGGSFEQVQLQQPGAELVKPGASVKMSCKASGYAFSSYWINWMKQKPGQGLEWIGQIYPGDGDTNYNGKFKGRATLTADTSSSTAYMQLSSLTSEDSAVYFCARSITTVVGCAMDYWGQGTSVTVSSTRASTKGPSVFPLAPSSKSTSGGTAALGCLVKDYFPEPVTVSWNSGALTSGVHTFPAVLQSSGLYSLSSVVTVPSSSLGTQTYICNVNHKPSNTKVDKRVEPKSCIPEDTFFPSSDVPCDVKLVEKSFETDTNLNFQNLSVIGFRILLLKVAGFNLLMTLRLWSS

SEQ ID NO: 14799 - protein, 763 aa, Artificial Sequence
  Synthetic Polypeptide
MALPVTALLLPLALLLHAARPDIQMTQSPSSLSASVGDRVTITCKASDHINNWLAWYQQKPGQAPKLLIYGATTLETGVPSRFSGSGSGTDYTLTISSLQPEDFATYYCQQSWNTPWTFGQGTKLEIKRLEGQPKANPTVTLFPPSSEELQANKATLVCLISDFYPGAVTVAWKADGSPVKAGVETTKPSKQSNNKYAASSYLSLTPEQWKSHRSYSCQVTHEGSTVEKTVAPTECSGRADCGFTSESYQQGVLSATILYEILLGKATLYAVLVSALVLMAMVKRKDSRGRAKRSGSGATNFSLLKQAGDVEENPGPTSMDWIWRILFLVGAATGAHSGPQVQLQESGGGLAQAGGSLRLSCAASGRTFSMGWFRQAPGKEREFVAAITYSGGSPYYASSVRGRFTISRDNAKNTVYLQMNSLKPEDTAVYYCAANPTYGSDWNAENWGQGTQVTVSSGSGGGGSGGGGSGGGGSFEQVQLQQPGAELVKPGASVKMSCKASGYAFSSYWINWMKQKPGQGLEWIGQIYPGDGDTNYNGKFKGRATLTADTSSSTAYMQLSSLTSEDSAVYFCARSITTVVGCAMDYWGQGTSVTVSSTRASTKGPSVFPLAPSSKSTSGGTAALGCLVKDYFPEPVTVSWNSGALTSGVHTFPAVLQSSGLYSLSSVVTVPSSSLGTQTYICNVNHKPSNTKVDKRVEPKSCIPEDTFFPSPESSCDVKLVEKSFETDTNLNFQNLSVIGFRILLLKVAGFNLLMTLRLWSS

SEQ ID NO: 14800 - protein, 593 aa, Artificial Sequence
  Synthetic Polypeptide
MDWIWRILFLVGAATGAHSGPQVQLQESGGGLAQAGGSLRLSCAASGRTFSMGWFRQAPGKEREFVAAITYSGGSPYYASSVRGRFTISRDNAKNTVYLQMNSLKPEDTAVYYCAANPTYGSDWNAENWGQGTQVTVSSGSGGGGSGGGGSGGGGSFEQVQLQQPGAELVKPGASVKMSCKASGYAFSSYWINWMKQKPGQGLEWIGQIYPGDGDTNYNGKFKGRATLTADTSSSTAYMQLSSLTSEDSAVYFCARSITTVVGCAMDYWGQGTSVTVSSGGGGSGGGGSGGGGSDIQMTQSPSSLSASVGDRVTITCKASDHINNWLAWYQQKPGQAPKLLIYGATTLETGVPSRFSGSGSGTDYTLTISSLQPEDFATYYCQQSWNTPWTFGQGTKLEIKRTRGGGSDGNEEMGGITQTPYKVSISGTTVILTCPQYPGSEILWQHNDKNIGGDEDDKNIGSDEDHLSLKEFSELEQSGYYVCYPRGSKPEDANFYLYLRARVCENCMEMDVMSVATIVIVDICITGGLLLLVYYWSKNRKAKAKPVTRGAGAGGRQRGQNKERPPPVPNPDYEPIRKGQRDLYSGLNQRRI

SEQ ID NO: 14801 - protein, 558 aa, Artificial Sequence
  Synthetic Polypeptide
MDWIWRILFLVGAATGAHSGPQVQLQESGGGLAQAGGSLRLSCAASGRTFSMGWFRQAPGKEREFVAAITYSGGSPYYASSVRGRFTISRDNAKNTVYLQMNSLKPEDTAVYYCAANPTYGSDWNAENWGQGTQVTVSSGSGGGGSGGGGSGGGGSFEQVQLQQPGAELVKPGASVKMSCKASGYAFSSYWINWMKQKPGQGLEWIGQIYPGDGDTNYNGKFKGRATLTADTSSSTAYMQLSSLTSEDSAVYFCARSITTVVGCAMDYWGQGTSVTVSSGGGGSGGGGSGGGGSDIQMTQSPSSLSASVGDRVTITCKASDHINNWLAWYQQKPGQAPKLLIYGATTLETGVPSRFSGSGSGTDYTLTISSLQPEDFATYYCQQSWNTPWTFGQGTKLEIKRTRGGGSFKIPIEELEDRVFVNCNTSITWVEGTVGTLLSDITRLDLGKRILDPRGIYRCNGTDIYKDKESTVQVHYRMCQSCVELDPATVAGIIVTDVIATLLLALGVFCFAGHETGRLSGAADTQALLRNDQVYQPLRDRDDAQYSHLGGNWARNK

SEQ ID NO: 14802 - protein, 568 aa, Artificial Sequence
  Synthetic Polypeptide
MDWIWRILFLVGAATGAHSGPQVQLQESGGGLAQAGGSLRLSCAASGRTFSMGWFRQAPGKEREFVAAITYSGGSPYYASSVRGRFTISRDNAKNTVYLQMNSLKPEDTAVYYCAANPTYGSDWNAENWGQGTQVTVSSGSGGGGSGGGGSGGGGSFEQVQLQQPGAELVKPGASVKMSCKASGYAFSSYWINWMKQKPGQGLEWIGQIYPGDGDTNYNGKFKGRATLTADTSSSTAYMQLSSLTSEDSAVYFCARSITTVVGCAMDYWGQGTSVTVSSGGGGSGGGGSGGGGSDIQMTQSPSSLSASVGDRVTITCKASDHINNWLAWYQQKPGQAPKLLIYGATTLETGVPSRFSGSGSGTDYTLTISSLQPEDFATYYCQQSWNTPWTFGQGTKLEIKRTRGGGSQSIKGNHLVKVYDYQEDGSVLLTCDAEAKNITWFKDGKMIGFLTEDKKKWNLGSNAKDPRGMYQCKGSQNKSKPLQVYYRMCQNCIELNAATISGFLFAEIVSIFVLAVGVYFIAGQDGVRQSRASDKQTLLPNDQLYQPLKDREDDQYSHLQGNQLRRN

SEQ ID NO: 14803 - protein, 551 aa, Artificial Sequence
  Synthetic Polypeptide
MDWIWRILFLVGAATGAHSGPQVQLQESGGGLAQAGGSLRLSCAASGRTFSMGWFRQAPGKEREFVAAITYSGGSPYYASSVRGRFTISRDNAKNTVYLQMNSLKPEDTAVYYCAANPTYGSDWNAENWGQGTQVTVSSGSGGGGSGGGGSGGGGSFEQVQLQQPGAELVKPGASVKMSCKASGYAFSSYWINWMKQKPGQGLEWIGQIYPGDGDTNYNGKFKGRATLTADTSSSTAYMQLSSLTSEDSAVYFCARSITTVVGCAMDYWGQGTSVTVSSGGGGSGGGGSGGGGSDIQMTQSPSSLSASVGDRVTITCKASDHINNWLAWYQQKPGQAPKLLIYGATTLETGVPSRFSGSGSGTDYTLTISSLQPEDFATYYCQQSWNTPWTFGQGTKLEIKRTRGGGSQSFGLLDPKLCYLLDGILFIYGVILTALFLRVKFSRSADAPAYQQGQNQLYNELNLGRREEYDVLDKRRGRDPEMGGKPQRRKNPQEGLYNELQKDKMAEAYSEIGMKGERRRGKGHDGLYQGLSTATKDTYDALHMQALPPR

SEQ ID NO: 14804 - protein, 587 aa, Artificial Sequence
  Synthetic Polypeptide
MDWIWRILFLVGAATGAHSGPQVQLQESGGGLAQAGGSLRLSCAASGRTFSMGWFRQAPGKEREFVAAITYSGGSPYYASSVRGRFTISRDNAKNTVYLQMNSLKPEDTAVYYCAANPTYGSDWNAENWGQGTQVTVSSGSGGGGSGGGGSGGGGSFEQVQLQQPGAELVKPGASVKMSCKASGYAFSSYWINWMKQKPGQGLEWIGQIYPGDGDTNYNGKFKGRATLTADTSSSTAYMQLSSLTSEDSAVYFCARSITTVVGCAMDYWGQGTSVTVSSTRIQNPDPAVYQLRDSKSSDKSVCLFTDFDSQTNVSQSKDSDVYITDKTVLDMRSMDFKSNSAVAWSNKSDFACANAFNNSIIPEDTFFPSPESSCDVKLVEKSFETDTNLNFQNLSVIGFRILLLKVAGFNLLMTLRLWSSRAKRSGSGVKQTLNFDLLKLAGDVESNPGPSRGHMAKPLSQEESTLIERATATINSIPISEDYSVASAALSSDGRIFTGVNVYHFTGGPCAELVVLGTAAAAAAGNLTCIVAIGNENRGILSPCGRCRQVLLDLHPGIKAIVKDSDGQPTAVGIRELLPSGYVWEG

SEQ ID NO: 14805 - protein, 421 aa, Artificial Sequence
  Synthetic Polypeptide
MDWIWRILFLVGAATGAHSGPQVQLQESGGGLAQAGGSLRLSCAASGRTFSMGWFRQAPGKEREFVAAITYSGGSPYYASSVRGRFTISRDNAKNTVYLQMNSLKPEDTAVYYCAANPTYGSDWNAENWGQGTQVTVSSGSGGGGSGGGGSGGGGSFEQVQLQQPGAELVKPGASVKMSCKASGYAFSSYWINWMKQKPGQGLEWIGQIYPGDGDTNYNGKFKGRATLTADTSSSTAYMQLSSLTSEDSAVYFCARSITTVVGCAMDYWGQGTSVTVSSTRIQNPDPAVYQLRDSKSSDKSVCLFTDFDSQTNVSQSKDSDVYITDKTVLDMRSMDFKSNSAVAWSNKSDFACANAFNNSIIPEDTFFPSPESSCDVKLVEKSFETDTNLNFQNLSVIGFRILLLKVAGFNLLMTLRLWSS

SEQ ID NO: 14806 - protein, 599 aa, Artificial Sequence
  Synthetic Polypeptide
MDWIWRILFLVGAATGAHSGPQVQLQESGGGLAQAGGSLRLSCAASGRTFSMGWFRQAPGKEREFVAAITYSGGSPYYASSVRGRFTISRDNAKNTVYLQMNSLKPEDTAVYYCAANPTYGSDWNAENWGQGTQVTVSSGSGGGGSGGGGSGGGGSFEQVQLQQPGAELVKPGASVKMSCKASGYAFSSYWINWMKQKPGQGLEWIGQIYPGDGDTNYNGKFKGRATLTADTSSSTAYMQLSSLTSEDSAVYFCARSITTVVGCAMDYWGQGTSVTVSSTREQKLISEEDGSGIQNPDPAVYQLRDSKSSDKSVCLFTDFDSQTNVSQSKDSDVYITDKCVLDMRSMDFKSNSAVAWSNKSDFACANAFNNSIIPEDTFFPSPESSCDVKLVEKSFETDTNLNFQNLSVIGFRILLLKVAGFNLLMTLRLWSSRAKRSGSGVKQTLNFDLLKLAGDVESNPGPSRGHMAKPLSQEESTLIERATATINSIPISEDYSVASAALSSDGRIFTGVNVYHFTGGPCAELVVLGTAAAAAAGNLTCIVAIGNENRGILSPCGRCRQVLLDLHPGIKAIVKDSDGQPTAVGIRELLPSGYVWEG

SEQ ID NO: 14807 - protein, 433 aa, Artificial Sequence
  Synthetic Polypeptide
MDWIWRILFLVGAATGAHSGPQVQLQESGGGLAQAGGSLRLSCAASGRTFSMGWFRQAPGKEREFVAAITYSGGSPYYASSVRGRFTISRDNAKNTVYLQMNSLKPEDTAVYYCAANPTYGSDWNAENWGQGTQVTVSSGSGGGGSGGGGSGGGGSFEQVQLQQPGAELVKPGASVKMSCKASGYAFSSYWINWMKQKPGQGLEWIGQIYPGDGDTNYNGKFKGRATLTADTSSSTAYMQLSSLTSEDSAVYFCARSITTVVGCAMDYWGQGTSVTVSSTREQKLISEEDGSGIQNPDPAVYQLRDSKSSDKSVCLFTDFDSQTNVSQSKDSDVYITDKCVLDMRSMDFKSNSAVAWSNKSDFACANAFNNSIIPEDTFFPSPESSCDVKLVEKSFETDTNLNFQNLSVIGFRILLLKVAGFNLLMTLRLWSS

SEQ ID NO: 14808 - protein, 634 aa, Artificial Sequence
  Synthetic Polypeptide
MALPVTALLLPLALLLHAARPQLQLQESGPGLVKPSETLSLTCTVSGDSISSGDYYWGWIRQPPGKGLEWIGHIYYSGVTYYNPSLKSRVTISVDTSRNQFSLKLSSVTAADTAVYYCTREDSSNWRSRGQGTLVTVSSGTGGGGSGGGGSGGGGSEFDIQMTQSPSSLSASVGDRVTITCKASDHINNWLAWYQQKPGQAPKLLIYGATTLETGVPSRFSGSGSGTDYTLTISSLQPEDFATYYCQQSWNTPWTFGQGTKLEIKRGGGGSGGGGSGGGGSQVQLQQPGAELVKPGASVKMSCKASGYAFSSYWINWMKQKPGQGLEWIGQIYPGDGDTNYNGKFKGRATLTADTSSSTAYMQLSSLTSEDSAVYFCARSITTVVGCAMDYWGQGTSVTVSSTREQKLISEEDLKIEVMYPPPYLDNEKSNGTIIHVKGKHLCPSPLFPGPSKPFWVLVVVGGVLACYSLLVTVAFIIFWVRSKRSRLLHSDYMNMTPRRPGPTRKHYQPYAPPRDFAAYRSRVKFSRSADAPAYQQGQNQLYNELNLGRREEYDVLDKRRGRDPEMGGKPRRKNPQEGLYNELQKDKMAEAYSEIGMKGERRRGKGHDGLYQGLSTATKDTYDALHMQALPPR

SEQ ID NO: 14809 - protein, 640 aa, Artificial Sequence
  Synthetic Polypeptide
MALPVTALLLPLALLLHAARPQLQLQESGPGLVKPSETLSLTCTVSGDSISSGDYYWGWIRQPPGKGLEWIGHIYYSGVTYYNPSLKSRVTISVDTSRNQFSLKLSSVTAADTAVYYCTREDSSNWRSRGQGTLVTVSSGTGGGGSGGGGSGGGGSEFDIQMTQSPSSLSASVGDRVTITCKASDHINNWLAWYQQKPGQAPKLLIYGATTLETGVPSRFSGSGSGTDYTLTISSLQPEDFATYYCQQSWNTPWTFGQGTKLEIKRGGGGSGGGGSGGGGSQVQLQQPGAELVKPGASVKMSCKASGYAFSSYWINWMKQKPGQGLEWIGQIYPGDGDTNYNGKFKGRATLTADTSSSTAYMQLSSLTSEDSAVYFCARSITTVVGCAMDYWGQGTSVTVSSTREQKLISEEDLAKPTTTPAPRPPTPAPTIASQPLSLRPEACRPAAGGAVHTRGLDFACDIYIWAPLAGTCGVLLLSLVITLYCKRGRKKLLYIFKQPFMRPVQTTQEEDGCSCRFPEEEEGGCELRVKFSRSADAPAYQQGQNQLYNELNLGRREEYDVLDKRRGRDPEMGGKPRRKNPQEGLYNELQKDKMAEAYSEIGMKGERRRGKGHDGLYQGLSTATKDTYDALHMQALPPR

SEQ ID NO: 14810 - protein, 1053 aa, Artificial Sequence
  Synthetic Polypeptide
MALPVTALLLPLALLLHAARPQLQLQESGPGLVKPSETLSLTCTVSGDSISSGDYYWGWIRQPPGKGLEWIGHIYYSGVTYYNPSLKSRVTISVDTSRNQFSLKLSSVTAADTAVYYCTREDSSNWRSRGQGTLVTVSSGTGGGGSGGGGSGGGGSEFDIQMTQSPSSLSASVGDRVTITCKASDHINNWLAWYQQKPGQAPKLLIYGATTLETGVPSRFSGSGSGTDYTLTISSLQPEDFATYYCQQSWNTPWTFGQGTKLEIKRGGGGSGGGGSGGGGSQVQLQQPGAELVKPGASVKMSCKASGYAFSSYWINWMKQKPGQGLEWIGQIYPGDGDTNYNGKFKGRATLTADTSSSTAYMQLSSLTSEDSAVYFCARSITTVVGCAMDYWGQGTSVTVSSTREQKLISEEDLAKPTTTPAPRPPTPAPTIASQPLSLRPEACRPAAGGAVHTRGLDFACDIYIWAPLAGTCGVLLLSLVITLYCGRARVKFSRSADAPAYQQGQNQLYNELNLGRREEYDVLDKRRGRDPEMGGKPRRKNPQEGLYNELQKDKMAEAYSEIGMKGERRRGKGHDGLYQGLSTATKDTYDALHMQALPPRSRGSGATNFSLLKQAGDVEENPGPGIHMATYEVLCEVARKLGTDDREVVLFLLNVFIPQPTLAQLIGALRALKEEGRLTFPLLAECLFRAGRRDLLRDLLHLDPRFLERHLAGTMSYFSPYQLTVLHVDGELCARDIRSLIFLSKDTIGSRSTPQTFLHWVYCMENLDLLGPTDVDALMSMLRSLSRVDLQRQVQTLMGLHLSGPSHSQHYRHTPLETDFYDYKDDDDKTSGSGEGRGSLLTCGDVEENPGPHMTEYKPTVRLATRDDVPRAVRTLAAAFADYPATRHTVDPDRHIERVTELQELFLTRVGLDIGKVWVADDGAAVAVWTTPESVEAGAVFAEIGPRMAELSGSRLAAQQQMEGLLAPHRPKEPAWFLATVGVSPDHQGKGLGSAVVLPGVEAAERAGVPAFLETSAPRNLPFYERLGFTVTADVEVPEGPRTWCMTRKPGA

SEQ ID NO: 14811 - protein, 993 aa, Artificial Sequence
  Synthetic Polypeptide
MALPVTALLLPLALLLHAARPQLQLQESGPGLVKPSETLSLTCTVSGDSISSGDYYWGWIRQPPGKGLEWIGHIYYSGVTYYNPSLKSRVTISVDTSRNQFSLKLSSVTAADTAVYYCTREDSSNWRSRGQGTLVTVSSGTGGGGSGGGGSGGGGSEFDIQMTQSPSSLSASVGDRVTITCKASDHINNWLAWYQQKPGQAPKLLIYGATTLETGVPSRFSGSGSGTDYTLTISSLQPEDFATYYCQQSWNTPWTFGQGTKLEIKRLEIQNPDPAVYQLRDSKSSDKSVCLFTDFDSQTNVSQSKDSDVYITDKCVLDMRSMDFKSNSAVAWSNKSDFACANAFNNSIIPEDTFFPSSDVPCDVKLVEKSFETDTNLNFQNLSVIGFRILLLKVAGFNLLMTLRLWSSRAKRSGSGVKQTLNFDLLKLAGDVESNPGPTSMDWIWRILFLVGAATGAHSFEQVQLQQPGAELVKPGASVKMSCKASGYAFSSYWINWMKQKPGQGLEWIGQIYPGDGDTNYNGKFKGRATLTADTSSSTAYMQLSSLTSEDSAVYFCARSITTVVGCAMDYWGQGTSVTVSSTREDLKNVFPPEVAVFEPSKAEIAHTQKATLVCLATGFYPDHVELSWWVNGKEVHSGVCTDPQPLKEQPALNDSRYCLSSRLRVSATFWQNPRNHFRCQVQFYGLSENDEWTQDRAKPVTQIVSAEAWGRADCGITSASYHQGVLSATILYEILLGKATLYAVLVSALVLMAMVKRKDSRGRAKRSGSGATNFSLLKQAGDVEENPGPSRGHMTEYKPTVRLATRDDVPRAVRTLAAAFADYPATRHTVDPDRHIERVTELQELFLTRVGLDIGKVWVADDGAAVAVWTTPESVEAGAVFAEIGPRMAELSGSRLAAQQQMEGLLAPHRPKEPAWFLATVGVSPDHQGKGLGSAVVLPGVEAAERAGVPAFLETSAPRNLPFYERLGFTVTADVEVPEGPRTWCMTRKPGA

SEQ ID NO: 14812 - protein, 992 aa, Artificial Sequence
  Synthetic Polypeptide
MALPVTALLLPLALLLHAARPQLQLQESGPGLVKPSETLSLTCTVSGDSISSGDYYWGWIRQPPGKGLEWIGHIYYSGVTYYNPSLKSRVTISVDTSRNQFSLKLSSVTAADTAVYYCTREDSSNWRSRGQGTLVTVSSGTGGGGSGGGGSGGGGSEFDIQMTQSPSSLSASVGDRVTITCKASDHINNWLAWYQQKPGQAPKLLIYGATTLETGVPSRFSGSGSGTDYTLTISSLQPEDFATYYCQQSWNTPWTFGQGTKLEIKRLEDLKNVFPPEVAVFEPSKAEIAHTQKATLVCLATGFYPDHVELSWWVNGKEVHSGVCTDPQPLKEQPALNDSRYCLSSRLRVSATFWQNPRNHFRCQVQFYGLSENDEWTQDRAKPVTQIVSAEAWGRADCGITSASYHQGVLSATILYEILLGKATLYAVLVSALVLMAMVKRKDSRGRAKRSGSGATNFSLLKQAGDVEENPGPTSMDWIWRILFLVGAATGAHSFEQVQLQQPGAELVKPGASVKMSCKASGYAFSSYWINWMKQKPGQGLEWIGQIYPGDGDTNYNGKFKGRATLTADTSSSTAYMQLSSLTSEDSAVYFCARSITTVVGCAMDYWGQGTSVTVSSTRIQNPDPAVYQLRDSKSSDKSVCLFTDFDSQTNVSQSKDSDVYITDKCVLDMRSMDFKSNSAVAWSNKSDFACANAFNNSIIPEDTFFPSSDVPCDVKLVEKSFETDTNLNFQNLSVIGFRILLLKVAGFNLLMTLRLWSSRAKRSGSGVKQTLNFDLLKLAGDVESNPGPSRGHMTEYKPTVRLATRDDVPRAVRTLAAAFADYPATRHTVDPDRHIERVTELQELFLTRVGLDIGKVWVADDGAAVAVWTTPESVEAGAVFAEIGPRMAELSGSRLAAQQQMEGLLAPHRPKEPAWFLATVGVSPDHQGKGLGSAVVLPGVEAAERAGVPAFLETSAPRNLPFYERLGFTVTADVEVPEGPRTWCMTRKPGA

SEQ ID NO: 14813 - protein, 759 aa, Artificial Sequence
  Synthetic Polypeptide
MALPVTALLLPLALLLHAARPQLQLQESGPGLVKPSETLSLTCTVSGDSISSGDYYWGWIRQPPGKGLEWIGHIYYSGVTYYNPSLKSRVTISVDTSRNQFSLKLSSVTAADTAVYYCTREDSSNWRSRGQGTLVTVSSGTGGGGSGGGGSGGGGSEFDIQMTQSPSSLSASVGDRVTITCKASDHINNWLAWYQQKPGQAPKLLIYGATTLETGVPSRFSGSGSGTDYTLTISSLQPEDFATYYCQQSWNTPWTFGQGTKLEIKRLEDLKNVFPPEVAVFEPSEAEISHTQKATLVCLATGFYPDHVELSWWVNGKEVHSGVCTDPQPLKEQPALNDSRYCLSSRLRVSATFWQNPRNHFRCQVQFYGLSENDEWTQDRAKPVTQIVSAEAWGRADCGFTSESYQQGVLSATILYEILLGKATLYAVLVSALVLMAMVKRKDSRGRAKRSGSGATNFSLLKQAGDVEENPGPTSMDWIWRILFLVGAATGAHSFEQVQLQQPGAELVKPGASVKMSCKASGYAFSSYWINWMKQKPGQGLEWIGQIYPGDGDTNYNGKFKGRATLTADTSSSTAYMQLSSLTSEDSAVYFCARSITTVVGCAMDYWGQGTSVTVSSTRIQNPDPAVYQLRDSKSSDKSVCLFTDFDSQTNVSQSKDSDVYITDKCVLDMRSMDFKSNSAVAWSNKSDFACANAFNNSIIPEDTFFPSPESSCDVKLVEKSFETDTNLNFQNLSVIGFRILLLKVAGFNLLMTLRLWSS

SEQ ID NO: 14814 - protein, 984 aa, Artificial Sequence
  Synthetic Polypeptide
MALPVTALLLPLALLLHAARPQLQLQESGPGLVKPSETLSLTCTVSGDSISSGDYYWGWIRQPPGKGLEWIGHIYYSGVTYYNPSLKSRVTISVDTSRNQFSLKLSSVTAADTAVYYCTREDSSNWRSRGQGTLVTVSSGTGGGGSGGGGSGGGGSEFDIQMTQSPSSLSASVGDRVTITCKASDHINNWLAWYQQKPGQAPKLLIYGATTLETGVPSRFSGSGSGTDYTLTISSLQPEDFATYYCQQSWNTPWTFGQGTKLEIKRLEDLKNVFPPEVAVFEPSEAEISHTQKATLVCLATGFYPDHVELSWWVNGKEVHSGVCTDPQPLKEQPALNDSRYCLSSRLRVSATFWQNPRNHFRCQVQFYGLSENDEWTQDRAKPVTQIVSAEAWGRADCGFTSESYQQGVLSATILYEILLGKATLYAVLVSALVLMAMVKRKDSRGRAKRSGSGATNFSLLKQAGDVEENPGPTSMDWIWRILFLVGAATGAHSFEQVQLQQPGAELVKPGASVKMSCKASGYAFSSYWINWMKQKPGQGLEWIGQIYPGDGDTNYNGKFKGRATLTADTSSSTAYMQLSSLTSEDSAVYFCARSITTVVGCAMDYWGQGTSVTVSSTRIQNPDPAVYQLRDSKSSDKSVCLFTDFDSQTNVSQSKDSDVYITDKCVLDMRSMDFKSNSAVAWSNKSDFACANAFNNSIIPEDTFFPSPESSCDVKLVEKSFETDTNLNFQNLSVIGFRILLLKVAGFNLLMTLRLWSSRAKRSGSGVKQTLNFDLLKLAGDVESNPGPSRGGIHTMATYEVLCEVARKLGTDDREVVLFLLNVFIPQPTLAQLIGALRALKEEGRLTFPLLAECLFRAGRRDLLRDLLHLDPRFLERHLAGTMSYFSPYQLTVLHVDGELCARDIRSLIFLSKDTIGSRSTPQTFLHWVYCMENLDLLGPTDVDALMSMLRSLSRVDLQRQVQTLMGLHLSGPSHSQHYRHTP

SEQ ID NO: 14815 - protein, 763 aa, Artificial Sequence
  Synthetic Polypeptide
MALPVTALLLPLALLLHAARPQLQLQESGPGLVKPSETLSLTCTVSGDSISSGDYYWGWIRQPPGKGLEWIGHIYYSGVTYYNPSLKSRVTISVDTSRNQFSLKLSSVTAADTAVYYCTREDSSNWRSRGQGTLVTVSSGTGGGGSGGGGSGGGGSEFDIQMTQSPSSLSASVGDRVTITCKASDHINNWLAWYQQKPGQAPKLLIYGATTLETGVPSRFSGSGSGTDYTLTISSLQPEDFATYYCQQSWNTPWTFGQGTKLEIKRLEIQNPDPAVYQLRDSKSSDKSVCLFTDFDSQTNVSQSKDSDVYITDKCVLDMRSMDFKSNSAVAWSNKSDFACANAFNNSIIPEDTFFPSPESSCDVKLVEKSFETDTNLNFQNLSVIGFRILLLKVAGFNLLMTLRLWSSRAKRSGSGVKQTLNFDLLKLAGDVESNPGPTSMDWIWRILFLVGAATGAHSFEQVQLQQPGAELVKPGASVKMSCKASGYAFSSYWINWMKQKPGQGLEWIGQIYPGDGDTNYNGKFKGRATLTADTSSSTAYMQLSSLTSEDSAVYFCARSITTVVGCAMDYWGQGTSVTVSSTREDLKNVFPPEVAVFEPSEAEISHTQKATLVCLATGFYPDHVELSWWVNGKEVHSGVCTDPQPLKEQPALNDSRYCLSSRLRVSATFWQNPRNHFRCQVQFYGLSENDEWTQDRAKPVTQIVSAEAWGRADCGFTSESYQQGVLSATILYEILLGKATLYAVLVSALVLMAMVKRKDSRG

SEQ ID NO: 14816 - protein, 985 aa, Artificial Sequence
  Synthetic Polypeptide
MALPVTALLLPLALLLHAARPQLQLQESGPGLVKPSETLSLTCTVSGDSISSGDYYWGWIRQPPGKGLEWIGHIYYSGVTYYNPSLKSRVTISVDTSRNQFSLKLSSVTAADTAVYYCTREDSSNWRSRGQGTLVTVSSGTGGGGSGGGGSGGGGSEFDIQMTQSPSSLSASVGDRVTITCKASDHINNWLAWYQQKPGQAPKLLIYGATTLETGVPSRFSGSGSGTDYTLTISSLQPEDFATYYCQQSWNTPWTFGQGTKLEIKRLEIQNPDPAVYQLRDSKSSDKSVCLFTDFDSQTNVSQSKDSDVYITDKCVLDMRSMDFKSNSAVAWSNKSDFACANAFNNSIIPEDTFFPSPESSCDVKLVEKSFETDTNLNFQNLSVIGFRILLLKVAGFNLLMTLRLWSSRAKRSGSGVKQTLNFDLLKLAGDVESNPGPTSMDWIWRILFLVGAATGAHSFEQVQLQQPGAELVKPGASVKMSCKASGYAFSSYWINWMKQKPGQGLEWIGQIYPGDGDTNYNGKFKGRATLTADTSSSTAYMQLSSLTSEDSAVYFCARSITTVVGCAMDYWGQGTSVTVSSTREDLKNVFPPEVAVFEPSEAEISHTQKATLVCLATGFYPDHVELSWWVNGKEVHSGVCTDPQPLKEQPALNDSRYCLSSRLRVSATFWQNPRNHFRCQVQFYGLSENDEWTQDRAKPVTQIVSAEAWGRADCGFTSESYQQGVLSATILYEILLGKATLYAVLVSALVLMAMVKRKDSRGRAKRSGSGATNFSLLKQAGDVEENPGPSRGGIHTMATYEVLCEVARKLGTDDREVVLFLLNVFIPQPTLAQLIGALRALKEEGRLTFPLLAECLFRAGRRDLLRDLLHLDPRFLERHLAGTMSYFSPYQLTVLHVDGELCARDIRSLIFLSKDTIGSRSTPQTFLHWVYCMENLDLLGPTDVDALMSMLRSLSRVDLQRQVQTLMGLHLSGPSHSQHYRHTP

SEQ ID NO: 14817 - protein, 1037 aa, Artificial Sequence
  Synthetic Polypeptide
MALPVTALLLPLALLLHAARPLEGKPIPNPLLGLDSTGSGEDLKNVFPPEVAVFEPSKAEIAHTQKATLVCLATGFYPDHVELSWWVNGKEVHSGVCTDPQPLKEQPALNDSRYCLSSRLRVSATFWQNPRNHFRCQVQFYGLSENDEWTQDRAKPVTQIVSAEAWGRADCGITSASYHQGVLSATILYEILLGKATLYAVLVSALVLMAMVKRKDSRGRAKRSGSGATNFSLLKQAGDVEENPGPTSMALPVTALLLPLALLLHAARPQLQLQESGPGLVKPSETLSLTCTVSGDSISSGDYYWGWIRQPPGKGLEWIGHIYYSGVTYYNPSLKSRVTISVDTSRNQFSLKLSSVTAADTAVYYCTREDSSNWRSRGQGTLVTVSSGTGGGGSGGGGSGGGGSEFDIQMTQSPSSLSASVGDRVTITCKASDHINNWLAWYQQKPGQAPKLLIYGATTLETGVPSRFSGSGSGTDYTLTISSLQPEDFATYYCQQSWNTPWTFGQGTKLEIKRGGGGSGGGGSGGGGSQVQLQQPGAELVKPGASVKMSCKASGYAFSSYWINWMKQKPGQGLEWIGQIYPGDGDTNYNGKFKGRATLTADTSSSTAYMQLSSLTSEDSAVYFCARSITTVVGCAMDYWGQGTSVTVSSTREQKLISEEDGSGIQNPDPAVYQLRDSKSSDKSVCLFTDFDSQTNVSQSKDSDVYITDKCVLDMRSMDFKSNSAVAWSNKSDFACANAFNNSIIPEDTFFPSSDVPCDVKLVEKSFETDTNLNFQNLSVIGFRILLLKVAGFNLLMTLRLWSSRAKRSGSGVKQTLNFDLLKLAGDVESNPGPSRGHMTEYKPTVRLATRDDVPRAVRTLAAAFADYPATRHTVDPDRHIERVTELQELFLTRVGLDIGKVWVADDGAAVAVWTTPESVEAGAVFAEIGPRMAELSGSRLAAQQQMEGLLAPHRPKEPAWFLATVGVSPDHQGKGLGSAVVLPGVEAAERAGVPAFLETSAPRNLPFYERLGFTVTADVEVPEGPRTWCMTRKPGA

SEQ ID NO: 14818 - protein, 1038 aa, Artificial Sequence
  Synthetic Polypeptide
MALPVTALLLPLALLLHAARPLEQKLISEEDLGSGDRPDPAVYQLRDSKSSDKSVCLFTDFDSQTNVSQSKDSDVYITDKCVLDMRSMDFKSNSAVAWSNKSDFACANAFNNSIIPEDTFFPSPESSCDVKLVEKSFETDTNLNFQNLSVIGFRILLLKVAGFNLLMTLRLWSSSSRAKRSGSGVKQTLNFDLLKLAGDVESNPGPTSMALPVTALLLPLALLLHAARPQLQLQESGPGLVKPSETLSLTCTVSGDSISSGDYYWGWIRQPPGKGLEWIGHIYYSGVTYYNPSLKSRVTISVDTSRNQFSLKLSSVTAADTAVYYCTREDSSNWRSRGQGTLVTVSSGTGGGGSGGGGSGGGGSEFDIQMTQSPSSLSASVGDRVTITCKASDHINNWLAWYQQKPGQAPKLLIYGATTLETGVPSRFSGSGSGTDYTLTISSLQPEDFATYYCQQSWNTPWTFGQGTKLEIKRGGGGSGGGGSGGGGSQVQLQQPGAELVKPGASVKMSCKASGYAFSSYWINWMKQKPGQGLEWIGQIYPGDGDTNYNGKFKGRATLTADTSSSTAYMQLSSLTSEDSAVYFCARSITTVVGCAMDYWGQGTSVTVSSTRGKPIPNPLLGLDSTGSGEDLKNVFPPEVAVFEPSEAEISHTQKATLVCLATGFYPDHVELSWWVNGKEVHSGVCTDPQPLKEQPALNDSRYCLSSRLRVSATFWQNPRNHFRCQVQFYGLSENDEWTQDRAKPVTQIVSAEAWGRADCGFTSESYQQGVLSATILYEILLGKATLYAVLVSALVLMAMVKRKDSRGRAKRSGSGATNFSLLKQAGDVEENPGPSRGHMTEYKPTVRLATRDDVPRAVRTLAAAFADYPATRHTVDPDRHIERVTELQELFLTRVGLDIGKVWVADDGAAVAVWTTPESVEAGAVFAEIGPRMAELSGSRLAAQQQMEGLLAPHRPKEPAWFLATVGVSPDHQGKGLGSAVVLPGVEAAERAGVPAFLETSAPRNLPFYERLGFTVTADVEVPEGPRTWCMTRKPGA

SEQ ID NO: 14819 - protein, 992 aa, Artificial Sequence
  Synthetic Polypeptide
MALPVTALLLPLALLLHAARPQLQLQESGPGLVKPSETLSLTCTVSGDSISSGDYYWGWIRQPPGKGLEWIGHIYYSGVTYYNPSLKSRVTISVDTSRNQFSLKLSSVTAADTAVYYCTREDSSNWRSRGQGTLVTVSSGTGGGGSGGGGSGGGGSEFDIQMTQSPSSLSASVGDRVTITCKASDHINNWLAWYQQKPGQAPKLLIYGATTLETGVPSRFSGSGSGTDYTLTISSLQPEDFATYYCQQSWNTPWTFGQGTKLEIKRLEDLKNVFPPEVAVFEPSEAEISHTQKATLVCLATGFYPDHVELSWWVNGKEVHSGVSTDPQPLKEQPALNDSRYCLSSRLRVSATFWQNPRNHFRCQVQFYGLSENDEWTQDRAKPVTQIVSAEAWGRADCGFTSESYQQGVLSATILYEILLGKATLYAVLVSALVLMAMVKRKDSRGRAKRSGSGATNFSLLKQAGDVEENPGPTSMDWIWRILFLVGAATGAHSFEQVQLQQPGAELVKPGASVKMSCKASGYAFSSYWINWMKQKPGQGLEWIGQIYPGDGDTNYNGKFKGRATLTADTSSSTAYMQLSSLTSEDSAVYFCARSITTVVGCAMDYWGQGTSVTVSSTRIQNPDPAVYQLRDSKSSDKSVCLFTDFDSQTNVSQSKDSDVYITDKTVLDMRSMDFKSNSAVAWSNKSDFACANAFNNSIIPEDTFFPSPESSCDVKLVEKSFETDTNLNFQNLSVIGFRILLLKVAGFNLLMTLRLWSSRAKRSGSGVKQTLNFDLLKLAGDVESNPGPSRGHMTEYKPTVRLATRDDVPRAVRTLAAAFADYPATRHTVDPDRHIERVTELQELFLTRVGLDIGKVWVADDGAAVAVWTTPESVEAGAVFAEIGPRMAELSGSRLAAQQQMEGLLAPHRPKEPAWFLATVGVSPDHQGKGLGSAVVLPGVEAAERAGVPAFLETSAPRNLPFYERLGFTVTADVEVPEGPRTWCMTRKPGA

SEQ ID NO: 14820 - protein, 1074 aa, Artificial Sequence
  Synthetic Polypeptide
MALPVTALLLPLALLLHAARPQLQLQESGPGLVKPSETLSLTCTVSGDSISSGDYYWGWIRQPPGKGLEWIGHIYYSGVTYYNPSLKSRVTISVDTSRNQFSLKLSSVTAADTAVYYCTREDSSNWRSRGQGTLVTVSSGTGGGGSGGGGSGGGGSEFDIQMTQSPSSLSASVGDRVTITCKASDHINNWLAWYQQKPGQAPKLLIYGATTLETGVPSRFSGSGSGTDYTLTISSLQPEDFATYYCQQSWNTPWTFGQGTKLEIKRLEDLKNVFPPEVAVFEPSEAEISHTQKATLVCLATGFYPDHVELSWWVNGKEVHSGVSTDPQPLKEQPALNDSRYCLSSRLRVSATFWQNPRNHFRCQVQFYGLSENDEWTQDRAKPVTQIVSAEAWGRADCGFTSESYQQGVLSATILYEILLGKATLYAVLVSALVLMAMVKRKDSRGRAKRSGSGATNFSLLKQAGDVEENPGPTSMDWIWRILFLVGAATGAHSFEQVQLQQPGAELVKPGASVKMSCKASGYAFSSYWINWMKQKPGQGLEWIGQIYPGDGDTNYNGKFKGRATLTADTSSSTAYMQLSSLTSEDSAVYFCARSITTVVGCAMDYWGQGTSVTVSSTREQKLISEEDGSGTPFPSLAPPIMLLVDGKQQMVVVCLVLDVAPPGLDSPIWFSAGNGSALDAFTYGPSPATDGTWTNLAHLSLPSEELASWEPLVCHTGPGAEGHSRSTQPMHLSGEASTARTCPQEPLRGTPGGALWLGVLRLLLFKLLLFDLLLTCSCLCDPAGPLPSPATTTRLRALGSHRLHPATETGGREATSSPRPQPRDRRWGDTPPGRKPGSPVRAKRSGSGVKQTLNFDLLKLAGDVESNPGPSRGHMTEYKPTVRLATRDDVPRAVRTLAAAFADYPATRHTVDPDRHIERVTELQELFLTRVGLDIGKVWVADDGAAVAVWTTPESVEAGAVFAEIGPRMAELSGSRLAAQQQMEGLLAPHRPKEPAWFLATVGVSPDHQGKGLGSAVVLPGVEAAERAGVPAFLETSAPRNLPFYERLGFTVTADVEVPEGPRTWCMTRKPGA

SEQ ID NO: 14821 - protein, 1092 aa, Artificial Sequence
  Synthetic Polypeptide
MALPVTALLLPLALLLHAARPLEDLKNVFPPEVAVFEPSEAEISHTQKATLVCLATGFYPDHVELSWWVNGKEVHSGVSTDPQPLKEQPALNDSRYCLSSRLRVSATFWQNPRNHFRCQVQFYGLSENDEWTQDRAKPVTQIVSAEAWGRADCGFTSESYQQGVLSATILYEILLGKATLYAVLVSALVLMAMVKRKDSRGRAKRSGSGATNFSLLKQAGDVEENPGPTSMALPVTALLLPLALLLHAARPQLQLQESGPGLVKPSETLSLTCTVSGDSISSGDYYWGWIRQPPGKGLEWIGHIYYSGVTYYNPSLKSRVTISVDTSRNQFSLKLSSVTAADTAVYYCTREDSSNWRSRGQGTLVTVSSGTGGGGSGGGGSGGGGSEFDIQMTQSPSSLSASVGDRVTITCKASDHINNWLAWYQQKPGQAPKLLIYGATTLETGVPSRFSGSGSGTDYTLTISSLQPEDFATYYCQQSWNTPWTFGQGTKLEIKRGGGGSGGGGSGGGGSQVQLQQPGAELVKPGASVKMSCKASGYAFSSYWINWMKQKPGQGLEWIGQIYPGDGDTNYNGKFKGRATLTADTSSSTAYMQLSSLTSEDSAVYFCARSITTVVGCAMDYWGQGTSVTVSSTREQKLISEEDLGSGTPFPSLAPPIMLLVDGKQQMVVVCLVLDVAPPGLDSPIWFSAGNGSALDAFTYGPSPATDGTWTNLAHLSLPSEELASWEPLVCHTGPGAEGHSRSTQPMHLSGEASTARTCPQEPLRGTPGGALWLGVLRLLLFKLLLFDLLLTCSCLCDPAGPLPSPATTTRLRALGSHRLHPATETGGREATSSPRPQPRDRRWGDTPPGRKPGSPVRAKRSGSGVKQTLNFDLLKLAGDVESNPGPSRSRGHMTEYKPTVRLATRDDVPRAVRTLAAAFADYPATRHTVDPDRHIERVTELQELFLTRVGLDIGKVWVADDGAAVAVWTTPESVEAGAVFAEIGPRMAELSGSRLAAQQQMEGLLAPHRPKEPAWFLATVGVSPDHQGKGLGSAVVLPGVEAAERAGVPAFLETSAPRNLPFYERLGFTVTADVEVPEGPRTWCMTRKPGA

SEQ ID NO: 14822 - protein, 1029 aa, Artificial Sequence
  Synthetic Polypeptide
MALPVTALLLPLALLLHAARPQLQLQESGPGLVKPSETLSLTCTVSGDSISSGDYYWGWIRQPPGKGLEWIGHIYYSGVTYYNPSLKSRVTISVDTSRNQFSLKLSSVTAADTAVYYCTREDSSNWRSRGQGTLVTVSSGTGGGGSGGGGSGGGGSEFDIQMTQSPSSLSASVGDRVTITCKASDHINNWLAWYQQKPGQAPKLLIYGATTLETGVPSRFSGSGSGTDYTLTISSLQPEDFATYYCQQSWNTPWTFGQGTKLEIKRLEGKPIPNPLLGLDSTGSGDKQLDADVSPKPTIFLPSIAETKLQKAGTYLCLLEKFFPDVIKIHWQEKKSNTILGSQEGNTMKTNDTYMKFSWLTVPEKSLDKEHRCIVRHENNKNGVDQEIIFPPIKTDVITMDPKDNCSKDANDTLLLQLTNTSAYYMYLLLLLKSVVYFAIITCCLLRRTAFCCNGEKSRAKRSGSGATNFSLLKQAGDVEENPGPTSMDWIWRILFLVGAATGAHSFEQVQLQQPGAELVKPGASVKMSCKASGYAFSSYWINWMKQKPGQGLEWIGQIYPGDGDTNYNGKFKGRATLTADTSSSTAYMQLSSLTSEDSAVYFCARSITTVVGCAMDYWGQGTSVTVSSTREQKLISEEDGSGSQPHTKPSVFVMKNGTNVACLVKEFYPKDIRINLVSSKKITEFDPAIVISPSGKYNAVKLGKYEDSNSVTCSVQHDNKTVHSTDFEVKTDSTDHVKPKETENTKQPSKSCHKPKAIVHTEKVNMMSLTVLGLRMLFAKTVAVNFLLTAKLFFLRAKRSGSGVKQTLNFDLLKLAGDVESNPGPSRGHMTEYKPTVRLATRDDVPRAVRTLAAAFADYPATRHTVDPDRHIERVTELQELFLTRVGLDIGKVWVADDGAAVAVWTTPESVEAGAVFAEIGPRMAELSGSRLAAQQQMEGLLAPHRPKEPAWFLATVGVSPDHQGKGLGSAVVLPGVEAAERAGVPAFLETSAPRNLPFYERLGFTVTADVEVPEGPRTWCMTRKPGA

SEQ ID NO: 14823 - protein, 767 aa, Artificial Sequence
  Synthetic Polypeptide
MALPVTALLLPLALLLHAARPQLQLQESGPGLVKPSETLSLTCTVSGDSISSGDYYWGWIRQPPGKGLEWIGHIYYSGVTYYNPSLKSRVTISVDTSRNQFSLKLSSVTAADTAVYYCTREDSSNWRSRGQGTLVTVSSGTGGGGSGGGGSGGGGSEFDIQMTQSPSSLSASVGDRVTITCKASDHINNWLAWYQQKPGQAPKLLIYGATTLETGVPSRFSGSGSGTDYTLTISSLQPEDFATYYCQQSWNTPWTFGQGTKLEIKRLESQPHTKPSVFVMKNGTNVACLVKEFYPKDIRINLVSSKKITEFDPAIVISPSGKYNAVKLGKYEDSNSVTCSVQHDNKTVHSTDFEVKTDSTDHVKPKETENTKQPSKSCHKPKAIVHTEKVNMMSLTVLGLRMLFAKTVAVNFLLTAKLFFLRAKRSGSGATNFSLLKQAGDVEENPGPTSMDWIWRILFLVGAATGAHSFEQVQLQQPGAELVKPGASVKMSCKASGYAFSSYWINWMKQKPGQGLEWIGQIYPGDGDTNYNGKFKGRATLTADTSSSTAYMQLSSLTSEDSAVYFCARSITTVVGCAMDYWGQGTSVTVSSTRDKQLDADVSPKPTIFLPSIAETKLQKAGTYLCLLEKFFPDVIKIHWQEKKSNTILGSQEGNTMKTNDTYMKFSWLTVPEKSLDKEHRCIVRHENNKNGVDQEIIFPPIKTDVITMDPKDNCSKDANDTLLLQLTNTSAYYMYLLLLLKSVVYFAIITCCLLRRTAFCCNGEKS

SEQ ID NO: 14824 - protein, 1044 aa, Artificial Sequence
  Synthetic Polypeptide
MALPVTALLLPLALLLHAARPLEGKPIPNPLLGLDSTGSGDKQLDADVSPKPTIFLPSIAETKLQKAGTYLCLLEKFFPDVIKIHWQEKKSNTILGSQEGNTMKTNDTYMKFSWLTVPEKSLDKEHRCIVRHENNKNGVDQEIIFPPIKTDVITMDPKDNCSKDANDTLLLQLTNTSAYYMYLLLLLKSVVYFAIITCCLLRRTAFCCNGEKSRAKRSGSGATNFSLLKQAGDVEENPGPTSMALPVTALLLPLALLLHAARPQLQLQESGPGLVKPSETLSLTCTVSGDSISSGDYYWGWIRQPPGKGLEWIGHIYYSGVTYYNPSLKSRVTISVDTSRNQFSLKLSSVTAADTAVYYCTREDSSNWRSRGQGTLVTVSSGTGGGGSGGGGSGGGGSEFDIQMTQSPSSLSASVGDRVTITCKASDHINNWLAWYQQKPGQAPKLLIYGATTLETGVPSRFSGSGSGTDYTLTISSLQPEDFATYYCQQSWNTPWTFGQGTKLEIKRGGGGSGGGGSGGGGSQVQLQQPGAELVKPGASVKMSCKASGYAFSSYWINWMKQKPGQGLEWIGQIYPGDGDTNYNGKFKGRATLTADTSSSTAYMQLSSLTSEDSAVYFCARSITTVVGCAMDYWGQGTSVTVSSTREQKLISEEDGSGSQPHTKPSVFVMKNGTNVACLVKEFYPKDIRINLVSSKKITEFDPAIVISPSGKYNAVKLGKYEDSNSVTCSVQHDNKTVHSTDFEVKTDSTDHVKPKETENTKQPSKSCHKPKAIVHTEKVNMMSLTVLGLRMLFAKTVAVNFLLTAKLFFLRAKRSGSGVKQTLNFDLLKLAGDVESNPGPSRGHMTEYKPTVRLATRDDVPRAVRTLAAAFADYPATRHTVDPDRHIERVTELQELFLTRVGLDIGKVWVADDGAAVAVWTTPESVEAGAVFAEIGPRMAELSGSRLAAQQQMEGLLAPHRPKEPAWFLATVGVSPDHQGKGLGSAVVLPGVEAAERAGVPAFLETSAPRNLPFYERLGFTVTADVEVPEGPRTWCMTRKPGA

SEQ ID NO: 14825 - protein, 1169 aa, Artificial Sequence
  Synthetic Polypeptide
MALPVTALLLPLALLLHAARPQLQLQESGPGLVKPSETLSLTCTVSGDSISSGDYYWGWIRQPPGKGLEWIGHIYYSGVTYYNPSLKSRVTISVDTSRNQFSLKLSSVTAADTAVYYCTREDSSNWRSRGQGTLVTVSSGTGGGGSGGGGSGGGGSEFDIQMTQSPSSLSASVGDRVTITCKASDHINNWLAWYQQKPGQAPKLLIYGATTLETGVPSRFSGSGSGTDYTLTISSLQPEDFATYYCQQSWNTPWTFGQGTKLEIKRGQPKANPTVTLFPPSSEELQANKATLVCLISDFYPGAVTVAWKADGSPVKAGVETTKPSKQSNNKYAASSYLSLTPEQWKSHRSYSCQVTHEGSTVEKTVAPTECSGSQSFGLLDPKLCYLLDGILFIYGVILTALFLRVKFSRSADAPAYQQGQNQLYNELNLGRREEYDVLDKRRGRDPEMGGKPQRRKNPQEGLYNELQKDKMAEAYSEIGMKGERRRGKGHDGLYQGLSTATKDTYDALHMQALPPRRAKRSGSGATNFSLLKQAGDVEENPGPTSMDWIWRILFLVGAATGAHSFEQVQLQQPGAELVKPGASVKMSCKASGYAFSSYWINWMKQKPGQGLEWIGQIYPGDGDTNYNGKFKGRATLTADTSSSTAYMQLSSLTSEDSAVYFCARSITTVVGCAMDYWGQGTSVTVSSASTKGPSVFPLAPSSKSTSGGTAALGCLVKDYFPEPVTVSWNSGALTSGVHTFPAVLQSSGLYSLSSVVTVPSSSLGTQTYICNVNHKPSNTKVDKRVEPKSCGTQSFGLLDPKLCYLLDGILFIYGVILTALFLRVKFSRSADAPAYQQGQNQLYNELNLGRREEYDVLDKRRGRDPEMGGKPQRRKNPQEGLYNELQKDKMAEAYSEIGMKGERRRGKGHDGLYQGLSTATKDTYDALHMQALPPRRAKRSGSGVKQTLNFDLLKLAGDVESNPGPSRGHMTEYKPTVRLATRDDVPRAVRTLAAAFADYPATRHTVDPDRHIERVTELQELFLTRVGLDIGKVWVADDGAAVAVWTTPESVEAGAVFAEIGPRMAELSGSRLAAQQQMEGLLAPHRPKEPAWFLATVGVSPDHQGKGLGSAVVLPGVEAAERAGVPAFLETSAPRNLPFYERLGFTVTADVEVPEGPRTWCMTRKPGA

SEQ ID NO: 14826 - protein, 955 aa, Artificial Sequence
  Synthetic Polypeptide
MALPVTALLLPLALLLHAARPQLQLQESGPGLVKPSETLSLTCTVSGDSISSGDYYWGWIRQPPGKGLEWIGHIYYSGVTYYNPSLKSRVTISVDTSRNQFSLKLSSVTAADTAVYYCTREDSSNWRSRGQGTLVTVSSGTGGGGSGGGGSGGGGSEFDIQMTQSPSSLSASVGDRVTITCKASDHINNWLAWYQQKPGQAPKLLIYGATTLETGVPSRFSGSGSGTDYTLTISSLQPEDFATYYCQQSWNTPWTFGQGTKLEIKRLEDLKNVFPPEVAVFEPSEAEISHTQKATLVCLATGFYPDHVELSWWVNGKEVHSGVSTDPQPLKEQPALNDSRYCLSSRLRVSATFWQNPRNHFRCQVQFYGLSENDEWTQDRAKPVTQIVSAEAWGRADCGSQSFGLLDPKLCYLLDGILFIYGVILTALFLRVKFSRSADAPAYQQGQNQLYNELNLGRREEYDVLDKRRGRDPEMGGKPQRRKNPQEGLYNELQKDKMAEAYSEIGMKGERRRGKGHDGLYQGLSTATKDTYDALHMQALPPRRAKRSGSGATNFSLLKQAGDVEENPGPTSMDWIWRILFLVGAATGAHSFEQVQLQQPGAELVKPGASVKMSCKASGYAFSSYWINWMKQKPGQGLEWIGQIYPGDGDTNYNGKFKGRATLTADTSSSTAYMQLSSLTSEDSAVYFCARSITTVVGCAMDYWGQGTSVTVSSTRIQNPDPAVYQLRDSKSSDKSVCLFTDFDSQTNVSQSKDSDVYITDKTVLDMRSMDFKSNSAVAWSNKSDFACANAFNNSIIPEDTFFPSPESSCGTQSFGLLDPKLCYLLDGILFIYGVILTALFLRVKFSRSADAPAYQQGQNQLYNELNLGRREEYDVLDKRRGRDPEMGGKPQRRKNPQEGLYNELQKDKMAEAYSEIGMKGERRRGKGHDGLYQGLSTATKDTYDALHMQALPPR

SEQ ID NO: 14827 - protein, 955 aa, Artificial Sequence
  Synthetic Polypeptide
MALPVTALLLPLALLLHAARPQLQLQESGPGLVKPSETLSLTCTVSGDSISSGDYYWGWIRQPPGKGLEWIGHIYYSGVTYYNPSLKSRVTISVDTSRNQFSLKLSSVTAADTAVYYCTREDSSNWRSRGQGTLVTVSSGTGGGGSGGGGSGGGGSEFDIQMTQSPSSLSASVGDRVTITCKASDHINNWLAWYQQKPGQAPKLLIYGATTLETGVPSRFSGSGSGTDYTLTISSLQPEDFATYYCQQSWNTPWTFGQGTKLEIKRLEDLKNVFPPEVAVFEPSKAEIAHTQKATLVCLATGFYPDHVELSWWVNGKEVHSGVCTDPQPLKEQPALNDSRYCLSSRLRVSATFWQNPRNHFRCQVQFYGLSENDEWTQDRAKPVTQIVSAEAWGRADCGSQSFGLLDPKLCYLLDGILFIYGVILTALFLRVKFSRSADAPAYQQGQNQLYNELNLGRREEYDVLDKRRGRDPEMGGKPQRRKNPQEGLYNELQKDKMAEAYSEIGMKGERRRGKGHDGLYQGLSTATKDTYDALHMQALPPRRAKRSGSGATNFSLLKQAGDVEENPGPTSMDWIWRILFLVGAATGAHSFEQVQLQQPGAELVKPGASVKMSCKASGYAFSSYWINWMKQKPGQGLEWIGQIYPGDGDTNYNGKFKGRATLTADTSSSTAYMQLSSLTSEDSAVYFCARSITTVVGCAMDYWGQGTSVTVSSTRIQNPDPAVYQLRDSKSSDKSVCLFTDFDSQTNVSQSKDSDVYITDKCVLDMRSMDFKSNSAVAWSNKSDFACANAFNNSIIPEDTFFPSSDVPCGTQSFGLLDPKLCYLLDGILFIYGVILTALFLRVKFSRSADAPAYQQGQNQLYNELNLGRREEYDVLDKRRGRDPEMGGKPQRRKNPQEGLYNELQKDKMAEAYSEIGMKGERRRGKGHDGLYQGLSTATKDTYDALHMQALPPR

SEQ ID NO: 14828 - protein, 1026 aa, Artificial Sequence
  Synthetic Polypeptide
MALPVTALLLPLALLLHAARPQLQLQESGPGLVKPSETLSLTCTVSGDSISSGDYYWGWIRQPPGKGLEWIGHIYYSGVTYYNPSLKSRVTISVDTSRNQFSLKLSSVTAADTAVYYCTREDSSNWRSRGQGTLVTVSSGTGGGGSGGGGSGGGGSEFDIQMTQSPSSLSASVGDRVTITCKASDHINNWLAWYQQKPGQAPKLLIYGATTLETGVPSRFSGSGSGTDYTLTISSLQPEDFATYYCQQSWNTPWTFGQGTKLEIKRLEGKPIPNPLLGLDSTGSGEDLKNVFPPEVAVFEPSEAEISHTQKATLVCLATGFYPDHVELSWWVNGKEVHSGVSTDPQPLKEQPALNDSRYCLSSRLRVSATFWQNPRNHFRCQVQFYGLSENDEWTQDRAKPVTQIVSAEAWGRADCGSQSFGLLDPKLCYLLDGILFIYGVILTALFLRVKFSRSADAPAYQQGQNQLYNELNLGRREEYDVLDKRRGRDPEMGGKPQRRKNPQEGLYNELQKDKMAEAYSEIGMKGERRRGKGHDGLYQGLSTATKDTYDALHMQALPPRRAKRSGSGATNFSLLKQAGDVEENPGPTSMDWIWRILFLVGAATGAHSFEQVQLQQPGAELVKPGASVKMSCKASGYAFSSYWINWMKQKPGQGLEWIGQIYPGDGDTNYNGKFKGRATLTADTSSSTAYMQLSSLTSEDSAVYFCARSITTVVGCAMDYWGQGTSVTVSSTREQKLISEEDGSGIQNPDPAVYQLRDSKSSDKSVCLFTDFDSQTNVSQSKDSDVYITDKTVLDMRSMDFKSNSAVAWSNKSDFACANAFNNSIIPEDTFFPSPESSCGTQSFGLLDPKLCYLLDGILFIYGVILTALFLRSKRSRLLHSDYMNMTPRRPGPTRKHYQPYAPPRDFAAYRSRVKFSRSADAPAYQQGQNQLYNELNLGRREEYDVLDKRRGRDPEMGGKPQRRKNPQEGLYNELQKDKMAEAYSEIGMKGERRRGKGHDGLYQGLSTATKDTYDALHMQALPPR

SEQ ID NO: 14829 - protein, 1067 aa, Artificial Sequence
  Synthetic Polypeptide
MALPVTALLLPLALLLHAARPQLQLQESGPGLVKPSETLSLTCTVSGDSISSGDYYWGWIRQPPGKGLEWIGHIYYSGVTYYNPSLKSRVTISVDTSRNQFSLKLSSVTAADTAVYYCTREDSSNWRSRGQGTLVTVSSGTGGGGSGGGGSGGGGSEFDIQMTQSPSSLSASVGDRVTITCKASDHINNWLAWYQQKPGQAPKLLIYGATTLETGVPSRFSGSGSGTDYTLTISSLQPEDFATYYCQQSWNTPWTFGQGTKLEIKRLEGKPIPNPLLGLDSTGSGEDLKNVFPPEVAVFEPSEAEISHTQKATLVCLATGFYPDHVELSWWVNGKEVHSGVSTDPQPLKEQPALNDSRYCLSSRLRVSATFWQNPRNHFRCQVQFYGLSENDEWTQDRAKPVTQIVSAEAWGRADCGSQSFGLLDPKLCYLLDGILFIYGVILTALFLRSKRSRLLHSDYMNMTPRRPGPTRKHYQPYAPPRDFAAYRSRVKFSRSADAPAYQQGQNQLYNELNLGRREEYDVLDKRRGRDPEMGGKPQRRKNPQEGLYNELQKDKMAEAYSEIGMKGERRRGKGHDGLYQGLSTATKDTYDALHMQALPPRRAKRSGSGATNFSLLKQAGDVEENPGPTSMDWIWRILFLVGAATGAHSFEQVQLQQPGAELVKPGASVKMSCKASGYAFSSYWINWMKQKPGQGLEWIGQIYPGDGDTNYNGKFKGRATLTADTSSSTAYMQLSSLTSEDSAVYFCARSITTVVGCAMDYWGQGTSVTVSSTREQKLISEEDGSGIQNPDPAVYQLRDSKSSDKSVCLFTDFDSQTNVSQSKDSDVYITDKTVLDMRSMDFKSNSAVAWSNKSDFACANAFNNSIIPEDTFFPSPESSCGTQSFGLLDPKLCYLLDGILFIYGVILTALFLRSKRSRLLHSDYMNMTPRRPGPTRKHYQPYAPPRDFAAYRSRVKFSRSADAPAYQQGQNQLYNELNLGRREEYDVLDKRRGRDPEMGGKPQRRKNPQEGLYNELQKDKMAEAYSEIGMKGERRRGKGHDGLYQGLSTATKDTYDALHMQALPPR

SEQ ID NO: 14830 - protein, 1028 aa, Artificial Sequence
  Synthetic Polypeptide
MALPVTALLLPLALLLHAARPQLQLQESGPGLVKPSETLSLTCTVSGDSISSGDYYWGWIRQPPGKGLEWIGHIYYSGVTYYNPSLKSRVTISVDTSRNQFSLKLSSVTAADTAVYYCTREDSSNWRSRGQGTLVTVSSGTGGGGSGGGGSGGGGSEFDIQMTQSPSSLSASVGDRVTITCKASDHINNWLAWYQQKPGQAPKLLIYGATTLETGVPSRFSGSGSGTDYTLTISSLQPEDFATYYCQQSWNTPWTFGQGTKLEIKRLEGKPIPNPLLGLDSTGSGEDLKNVFPPEVAVFEPSEAEISHTQKATLVCLATGFYPDHVELSWWVNGKEVHSGVSTDPQPLKEQPALNDSRYCLSSRLRVSATFWQNPRNHFRCQVQFYGLSENDEWTQDRAKPVTQIVSAEAWGRADCGSQSFGLLDPKLCYLLDGILFIYGVILTALFLRVKFSRSADAPAYQQGQNQLYNELNLGRREEYDVLDKRRGRDPEMGGKPQRRKNPQEGLYNELQKDKMAEAYSEIGMKGERRRGKGHDGLYQGLSTATKDTYDALHMQALPPRRAKRSGSGATNFSLLKQAGDVEENPGPTSMDWIWRILFLVGAATGAHSFEQVQLQQPGAELVKPGASVKMSCKASGYAFSSYWINWMKQKPGQGLEWIGQIYPGDGDTNYNGKFKGRATLTADTSSSTAYMQLSSLTSEDSAVYFCARSITTVVGCAMDYWGQGTSVTVSSTREQKLISEEDLGSGIQNPDPAVYQLRDSKSSDKSVCLFTDFDSQTNVSQSKDSDVYITDKTVLDMRSMDFKSNSAVAWSNKSDFACANAFNNSIIPEDTFFPSPESSCGTQSFGLLDPKLCYLLDGILFIYGVILTALFLKRGRKKLLYIFKQPFMRPVQTTQEEDGCSCRFPEEEEGGCELRVKFSRSADAPAYQQGQNQLYNELNLGRREEYDVLDKRRGRDPEMGGKPQRRKNPQEGLYNELQKDKMAEAYSEIGMKGERRRGKGHDGLYQGLSTATKDTYDALHMQALPPR

SEQ ID NO: 14831 - protein, 1070 aa, Artificial Sequence
  Synthetic Polypeptide
MALPVTALLLPLALLLHAARPQLQLQESGPGLVKPSETLSLTCTVSGDSISSGDYYWGWIRQPPGKGLEWIGHIYYSGVTYYNPSLKSRVTISVDTSRNQFSLKLSSVTAADTAVYYCTREDSSNWRSRGQGTLVTVSSGTGGGGSGGGGSGGGGSEFDIQMTQSPSSLSASVGDRVTITCKASDHINNWLAWYQQKPGQAPKLLIYGATTLETGVPSRFSGSGSGTDYTLTISSLQPEDFATYYCQQSWNTPWTFGQGTKLEIKRLEGKPIPNPLLGLDSTGSGEDLKNVFPPEVAVFEPSEAEISHTQKATLVCLATGFYPDHVELSWWVNGKEVHSGVSTDPQPLKEQPALNDSRYCLSSRLRVSATFWQNPRNHFRCQVQFYGLSENDEWTQDRAKPVTQIVSAEAWGRADCGSQSFGLLDPKLCYLLDGILFIYGVILTALFLKRGRKKLLYIFKQPFMRPVQTTQEEDGCSCRFPEEEEGGCELRVKFSRSADAPAYQQGQNQLYNELNLGRREEYDVLDKRRGRDPEMGGKPQRRKNPQEGLYNELQKDKMAEAYSEIGMKGERRRGKGHDGLYQGLSTATKDTYDALHMQALPPRRAKRSGSGATNFSLLKQAGDVEENPGPTSMDWIWRILFLVGAATGAHSFEQVQLQQPGAELVKPGASVKMSCKASGYAFSSYWINWMKQKPGQGLEWIGQIYPGDGDTNYNGKFKGRATLTADTSSSTAYMQLSSLTSEDSAVYFCARSITTVVGCAMDYWGQGTSVTVSSTREQKLISEEDLGSGIQNPDPAVYQLRDSKSSDKSVCLFTDFDSQTNVSQSKDSDVYITDKTVLDMRSMDFKSNSAVAWSNKSDFACANAFNNSIIPEDTFFPSPESSCGTQSFGLLDPKLCYLLDGILFIYGVILTALFLKRGRKKLLYIFKQPFMRPVQTTQEEDGCSCRFPEEEEGGCELRVKFSRSADAPAYQQGQNQLYNELNLGRREEYDVLDKRRGRDPEMGGKPQRRKNPQEGLYNELQKDKMAEAYSEIGMKGERRRGKGHDGLYQGLSTATKDTYDALHMQALPPR

SEQ ID NO: 14832 - protein, 960 aa, Artificial Sequence
  Synthetic Polypeptide
MALPVTALLLPLALLLHAARPQLQLQESGPGLVKPSETLSLTCTVSGDSISSGDYYWGWIRQPPGKGLEWIGHIYYSGVTYYNPSLKSRVTISVDTSRNQFSLKLSSVTAADTAVYYCTREDSSNWRSRGQGTLVTVSSGTGGGGSGGGGSGGGGSEFDIQMTQSPSSLSASVGDRVTITCKASDHINNWLAWYQQKPGQAPKLLIYGATTLETGVPSRFSGSGSGTDYTLTISSLQPEDFATYYCQQSWNTPWTFGQGTKLEIKRLEQSFGLLDPKLCYLLDGILFIYGVILTALFLRVKFSRSADAPAYQQGQNQLYNELNLGRREEYDVLDKRRGRDPEMGGKPQRRKNPQEGLYNELQKDKMAEAYSEIGMKGERRRGKGHDGLYQGLSTATKDTYDALHMQALPPRRAKRSGSGATNFSLLKQAGDVEENPGPTSMDWIWRILFLVGAATGAHSFEQVQLQQPGAELVKPGASVKMSCKASGYAFSSYWINWMKQKPGQGLEWIGQIYPGDGDTNYNGKFKGRATLTADTSSSTAYMQLSSLTSEDSAVYFCARSITTVVGCAMDYWGQGTSVTVSSTRQSFGLLDPKLCYLLDGILFIYGVILTALFLRVKFSRSADAPAYQQGQNQLYNELNLGRREEYDVLDKRRGRDPEMGGKPQRRKNPQEGLYNELQKDKMAEAYSEIGMKGERRRGKGHDGLYQGLSTATKDTYDALHMQALPPRRAKRSGSGVKQTLNFDLLKLAGDVESNPGPSRGHMTEYKPTVRLATRDDVPRAVRTLAAAFADYPATRHTVDPDRHIERVTELQELFLTRVGLDIGKVWVADDGAAVAVWTTPESVEAGAVFAEIGPRMAELSGSRLAAQQQMEGLLAPHRPKEPAWFLATVGVSPDHQGKGLGSAVVLPGVEAAERAGVPAFLETSAPRNLPFYERLGFTVTADVEVPEGPRTWCMTRKPGA

SEQ ID NO: 14833 - protein, 785 aa, Artificial Sequence
  Synthetic Polypeptide
MALPVTALLLPLALLLHAARPQLQLQESGPGLVKPSETLSLTCTVSGDSISSGDYYWGWIRQPPGKGLEWIGHIYYSGVTYYNPSLKSRVTISVDTSRNQFSLKLSSVTAADTAVYYCTREDSSNWRSRGQGTLVTVSSGTGGGGSGGGGSGGGGSEFDIQMTQSPSSLSASVGDRVTITCKASDHINNWLAWYQQKPGQAPKLLIYGATTLETGVPSRFSGSGSGTDYTLTISSLQPEDFATYYCQQSWNTPWTFGQGTKLEIKRLEGQPKANPTVTLFPPSSEELQANKATLVCLISDFYPGAVTVAWKADGSPVKAGVETTKPSKQSNNKYAASSYLSLTPEQWKSHRSYSCQVTHEGSTVEKTVAPTECSPIKTDVITMDPKDNCSKDANDTLLLQLTNTSAYYMYLLLLLKSVVYFAIITCCLLRRTAFCCNGEKSRAKRSGSGATNFSLLKQAGDVEENPGPTSMDWIWRILFLVGAATGAHSFEQVQLQQPGAELVKPGASVKMSCKASGYAFSSYWINWMKQKPGQGLEWIGQIYPGDGDTNYNGKFKGRATLTADTSSSTAYMQLSSLTSEDSAVYFCARSITTVVGCAMDYWGQGTSVTVSSTRASTKGPSVFPLAPSSKSTSGGTAALGCLVKDYFPEPVTVSWNSGALTSGVHTFPAVLQSSGLYSLSSVVTVPSSSLGTQTYICNVNHKPSNTKVDKRVEPKSCEVKTDSTDHVKPKETENTKQPSKSCHKPKAIVHTEKVNMMSLTVLGLRMLFAKTVAVNFLLTAKLFFL

SEQ ID NO: 14834 - protein, 763 aa, Artificial Sequence
  Synthetic Polypeptide
MALPVTALLLPLALLLHAARPQLQLQESGPGLVKPSETLSLTCTVSGDSISSGDYYWGWIRQPPGKGLEWIGHIYYSGVTYYNPSLKSRVTISVDTSRNQFSLKLSSVTAADTAVYYCTREDSSNWRSRGQGTLVTVSSGTGGGGSGGGGSGGGGSEFDIQMTQSPSSLSASVGDRVTITCKASDHINNWLAWYQQKPGQAPKLLIYGATTLETGVPSRFSGSGSGTDYTLTISSLQPEDFATYYCQQSWNTPWTFGQGTKLEIKRLEGQPKANPTVTLFPPSSEELQANKATLVCLISDFYPGAVTVAWKADGSPVKAGVETTKPSKQSNNKYAASSYLSLTPEQWKSHRSYSCQVTHEGSTVEKTVAPTECSGRADCGITSASYHQGVLSATILYEILLGKATLYAVLVSALVLMAMVKRKDSRGRAKRSGSGATNFSLLKQAGDVEENPGPTSMDWIWRILFLVGAATGAHSFEQVQLQQPGAELVKPGASVKMSCKASGYAFSSYWINWMKQKPGQGLEWIGQIYPGDGDTNYNGKFKGRATLTADTSSSTAYMQLSSLTSEDSAVYFCARSITTVVGCAMDYWGQGTSVTVSSTRASTKGPSVFPLAPSSKSTSGGTAALGCLVKDYFPEPVTVSWNSGALTSGVHTFPAVLQSSGLYSLSSVVTVPSSSLGTQTYICNVNHKPSNTKVDKRVEPKSCIPEDTFFPSSDVPCDVKLVEKSFETDTNLNFQNLSVIGFRILLLKVAGFNLLMTLRLWSS

SEQ ID NO: 14835 - protein, 763 aa, Artificial Sequence
  Synthetic Polypeptide
MALPVTALLLPLALLLHAARPQLQLQESGPGLVKPSETLSLTCTVSGDSISSGDYYWGWIRQPPGKGLEWIGHIYYSGVTYYNPSLKSRVTISVDTSRNQFSLKLSSVTAADTAVYYCTREDSSNWRSRGQGTLVTVSSGTGGGGSGGGGSGGGGSEFDIQMTQSPSSLSASVGDRVTITCKASDHINNWLAWYQQKPGQAPKLLIYGATTLETGVPSRFSGSGSGTDYTLTISSLQPEDFATYYCQQSWNTPWTFGQGTKLEIKRLEGQPKANPTVTLFPPSSEELQANKATLVCLISDFYPGAVTVAWKADGSPVKAGVETTKPSKQSNNKYAASSYLSLTPEQWKSHRSYSCQVTHEGSTVEKTVAPTECSGRADCGFTSESYQQGVLSATILYEILLGKATLYAVLVSALVLMAMVKRKDSRGRAKRSGSGATNFSLLKQAGDVEENPGPTSMDWIWRILFLVGAATGAHSFEQVQLQQPGAELVKPGASVKMSCKASGYAFSSYWINWMKQKPGQGLEWIGQIYPGDGDTNYNGKFKGRATLTADTSSSTAYMQLSSLTSEDSAVYFCARSITTVVGCAMDYWGQGTSVTVSSTRASTKGPSVFPLAPSSKSTSGGTAALGCLVKDYFPEPVTVSWNSGALTSGVHTFPAVLQSSGLYSLSSVVTVPSSSLGTQTYICNVNHKPSNTKVDKRVEPKSCIPEDTFFPSPESSCDVKLVEKSFETDTNLNFQNLSVIGFRILLLKVAGFNLLMTLRLWSS

SEQ ID NO: 14836 - protein, 589 aa, Artificial Sequence
  Synthetic Polypeptide
MALPVTALLLPLALLLHAARPQLQLQESGPGLVKPSETLSLTCTVSGDSISSGDYYWGWIRQPPGKGLEWIGHIYYSGVTYYNPSLKSRVTISVDTSRNQFSLKLSSVTAADTAVYYCTREDSSNWRSRGQGTLVTVSSGTGGGGSGGGGSGGGGSEFDIQMTQSPSSLSASVGDRVTITCKASDHINNWLAWYQQKPGQAPKLLIYGATTLETGVPSRFSGSGSGTDYTLTISSLQPEDFATYYCQQSWNTPWTFGQGTKLEIKRGGGGSGGGGSGGGGSQVQLQQPGAELVKPGASVKMSCKASGYAFSSYWINWMKQKPGQGLEWIGQIYPGDGDTNYNGKFKGRATLTADTSSSTAYMQLSSLTSEDSAVYFCARSITTVVGCAMDYWGQGTSVTVSSTRDGNEEMGGITQTPYKVSISGTTVILTCPQYPGSEILWQHNDKNIGGDEDDKNIGSDEDHLSLKEFSELEQSGYYVCYPRGSKPEDANFYLYLRARVCENCMEMDVMSVATIVIVDICITGGLLLLVYYWSKNRKAKAKPVTRGAGAGGRQRGQNKERPPPVPNPDYEPIRKGQRDLYSGLNQRRI

SEQ ID NO: 14837 - protein, 554 aa, Artificial Sequence
  Synthetic Polypeptide
MALPVTALLLPLALLLHAARPQLQLQESGPGLVKPSETLSLTCTVSGDSISSGDYYWGWIRQPPGKGLEWIGHIYYSGVTYYNPSLKSRVTISVDTSRNQFSLKLSSVTAADTAVYYCTREDSSNWRSRGQGTLVTVSSGTGGGGSGGGGSGGGGSEFDIQMTQSPSSLSASVGDRVTITCKASDHINNWLAWYQQKPGQAPKLLIYGATTLETGVPSRFSGSGSGTDYTLTISSLQPEDFATYYCQQSWNTPWTFGQGTKLEIKRGGGGSGGGGSGGGGSQVQLQQPGAELVKPGASVKMSCKASGYAFSSYWINWMKQKPGQGLEWIGQIYPGDGDTNYNGKFKGRATLTADTSSSTAYMQLSSLTSEDSAVYFCARSITTVVGCAMDYWGQGTSVTVSSTRFKIPIEELEDRVFVNCNTSITWVEGTVGTLLSDITRLDLGKRILDPRGIYRCNGTDIYKDKESTVQVHYRMCQSCVELDPATVAGIIVTDVIATLLLALGVFCFAGHETGRLSGAADTQALLRNDQVYQPLRDRDDAQYSHLGGNWARNK

SEQ ID NO: 14838 - protein, 564 aa, Artificial Sequence
  Synthetic Polypeptide
MALPVTALLLPLALLLHAARPQLQLQESGPGLVKPSETLSLTCTVSGDSISSGDYYWGWIRQPPGKGLEWIGHIYYSGVTYYNPSLKSRVTISVDTSRNQFSLKLSSVTAADTAVYYCTREDSSNWRSRGQGTLVTVSSGTGGGGSGGGGSGGGGSEFDIQMTQSPSSLSASVGDRVTITCKASDHINNWLAWYQQKPGQAPKLLIYGATTLETGVPSRFSGSGSGTDYTLTISSLQPEDFATYYCQQSWNTPWTFGQGTKLEIKRGGGGSGGGGSGGGGSQVQLQQPGAELVKPGASVKMSCKASGYAFSSYWINWMKQKPGQGLEWIGQIYPGDGDTNYNGKFKGRATLTADTSSSTAYMQLSSLTSEDSAVYFCARSITTVVGCAMDYWGQGTSVTVSSTRQSIKGNHLVKVYDYQEDGSVLLTCDAEAKNITWFKDGKMIGFLTEDKKKWNLGSNAKDPRGMYQCKGSQNKSKPLQVYYRMCQNCIELNAATISGFLFAEIVSIFVLAVGVYFIAGQDGVRQSRASDKQTLLPNDQLYQPLKDREDDQYSHLQGNQLRRN

SEQ ID NO: 14839 - protein, 547 aa, Artificial Sequence
  Synthetic Polypeptide
MALPVTALLLPLALLLHAARPQLQLQESGPGLVKPSETLSLTCTVSGDSISSGDYYWGWIRQPPGKGLEWIGHIYYSGVTYYNPSLKSRVTISVDTSRNQFSLKLSSVTAADTAVYYCTREDSSNWRSRGQGTLVTVSSGTGGGGSGGGGSGGGGSEFDIQMTQSPSSLSASVGDRVTITCKASDHINNWLAWYQQKPGQAPKLLIYGATTLETGVPSRFSGSGSGTDYTLTISSLQPEDFATYYCQQSWNTPWTFGQGTKLEIKRGGGGSGGGGSGGGGSQVQLQQPGAELVKPGASVKMSCKASGYAFSSYWINWMKQKPGQGLEWIGQIYPGDGDTNYNGKFKGRATLTADTSSSTAYMQLSSLTSEDSAVYFCARSITTVVGCAMDYWGQGTSVTVSSTRQSFGLLDPKLCYLLDGILFIYGVILTALFLRVKFSRSADAPAYQQGQNQLYNELNLGRREEYDVLDKRRGRDPEMGGKPQRRKNPQEGLYNELQKDKMAEAYSEIGMKGERRRGKGHDGLYQGLSTATKDTYDALHMQALPPR

SEQ ID NO: 14840 - protein, 780 aa, Artificial Sequence
  Synthetic Polypeptide
MALPVTALLLPLALLLHAARPQLQLQESGPGLVKPSETLSLTCTVSGDSISSGDYYWGWIRQPPGKGLEWIGHIYYSGVTYYNPSLKSRVTISVDTSRNQFSLKLSSVTAADTAVYYCTREDSSNWRSRGQGTLVTVSSGTGGGGSGGGGSGGGGSEFDIQMTQSPSSLSASVGDRVTITCKASDHINNWLAWYQQKPGQAPKLLIYGATTLETGVPSRFSGSGSGTDYTLTISSLQPEDFATYYCQQSWNTPWTFGQGTKLEIKRGGGGSGGGGSGGGGSQVQLQQPGAELVKPGASVKMSCKASGYAFSSYWINWMKQKPGQGLEWIGQIYPGDGDTNYNGKFKGRATLTADTSSSTAYMQLSSLTSEDSAVYFCARSITTVVGCAMDYWGQGTSVTVSSTRGSGIQNPDPAVYQLRDSKSSDKSVCLFTDFDSQTNVSQSKDSDVYITDKTVLDMRSMDFKSNSAVAWSNKSDFACANAFNNSIIPEDTFFPSPESSCDVKLVEKSFETDTNLNFQNLSVIGFRILLLKVAGFNLLMTLRLWSSRAKRSGSGVKQTLNFDLLKLAGDVESNPGPSRGHMTEYKPTVRLATRDDVPRAVRTLAAAFADYPATRHTVDPDRHIERVTELQELFLTRVGLDIGKVWVADDGAAVAVWTTPESVEAGAVFAEIGPRMAELSGSRLAAQQQMEGLLAPHRPKEPAWFLATVGVSPDHQGKGLGSAVVLPGVEAAERAGVPAFLETSAPRNLPFYERLGFTVTADVEVPEGPRTWCMTRKPGA

SEQ ID NO: 14841 - protein, 812 aa, Artificial Sequence
  Synthetic Polypeptide
MALPVTALLLPLALLLHAARPQLQLQESGPGLVKPSETLSLTCTVSGDSISSGDYYWGWIRQPPGKGLEWIGHIYYSGVTYYNPSLKSRVTISVDTSRNQFSLKLSSVTAADTAVYYCTREDSSNWRSRGQGTLVTVSSGTGGGGSGGGGSGGGGSEFDIQMTQSPSSLSASVGDRVTITCKASDHINNWLAWYQQKPGQAPKLLIYGATTLETGVPSRFSGSGSGTDYTLTISSLQPEDFATYYCQQSWNTPWTFGQGTKLEIKRGGGGSGGGGSGGGGSQVQLQQPGAELVKPGASVKMSCKASGYAFSSYWINWMKQKPGQGLEWIGQIYPGDGDTNYNGKFKGRATLTADTSSSTAYMQLSSLTSEDSAVYFCARSITTVVGCAMDYWGQGTSVTVSSLEDLKNVFPPEVAVFEPSEAEISHTQKATLVCLATGFYPDHVELSWWVNGKEVHSGVSTDPQPLKEQPALNDSRYCLSSRLRVSATFWQNPRNHFRCQVQFYGLSENDEWTQDRAKPVTQIVSAEAWGRADCGFTSESYQQGVLSATILYEILLGKATLYAVLVSALVLMAMVKRKDSRGRAKRSGSGATNFSLLKQAGDVEENPGPTRGHMTEYKPTVRLATRDDVPRAVRTLAAAFADYPATRHTVDPDRHIERVTELQELFLTRVGLDIGKVWVADDGAAVAVWTTPESVEAGAVFAEIGPRMAELSGSRLAAQQQMEGLLAPHRPKEPAWFLATVGVSPDHQGKGLGSAVVLPGVEAAERAGVPAFLETSAPRNLPFYERLGFTVTADVEVPEGPRTWCMTRKPGA

SEQ ID NO: 14842 - protein, 862 aa, Artificial Sequence
  Synthetic Polypeptide
MALPVTALLLPLALLLHAARPQLQLQESGPGLVKPSETLSLTCTVSGDSISSGDYYWGWIRQPPGKGLEWIGHIYYSGVTYYNPSLKSRVTISVDTSRNQFSLKLSSVTAADTAVYYCTREDSSNWRSRGQGTLVTVSSGTGGGGSGGGGSGGGGSEFDIQMTQSPSSLSASVGDRVTITCKASDHINNWLAWYQQKPGQAPKLLIYGATTLETGVPSRFSGSGSGTDYTLTISSLQPEDFATYYCQQSWNTPWTFGQGTKLEIKRGGGGSGGGGSGGGGSQVQLQQPGAELVKPGASVKMSCKASGYAFSSYWINWMKQKPGQGLEWIGQIYPGDGDTNYNGKFKGRATLTADTSSSTAYMQLSSLTSEDSAVYFCARSITTVVGCAMDYWGQGTSVTVSSTREQKLISEEDLGSGTPFPSLAPPIMLLVDGKQQMVVVCLVLDVAPPGLDSPIWFSAGNGSALDAFTYGPSPATDGTWTNLAHLSLPSEELASWEPLVCHTGPGAEGHSRSTQPMHLSGEASTARTCPQEPLRGTPGGALWLGVLRLLLFKLLLFDLLLTCSCLCDPAGPLPSPATTTRLRALGSHRLHPATETGGREATSSPRPQPRDRRWGDTPPGRKPGSPVRAKRSGSGVKQTLNFDLLKLAGDVESNPGPSRSRGHMTEYKPTVRLATRDDVPRAVRTLAAAFADYPATRHTVDPDRHIERVTELQELFLTRVGLDIGKVWVADDGAAVAVWTTPESVEAGAVFAEIGPRMAELSGSRLAAQQQMEGLLAPHRPKEPAWFLATVGVSPDHQGKGLGSAVVLPGVEAAERAGVPAFLETSAPRNLPFYERLGFTVTADVEVPEGPRTWCMTRKPGA

SEQ ID NO: 14843 - protein, 676 aa, Artificial Sequence
  Synthetic Polypeptide
MALPVTALLLPLALLLHAARPQLQLQESGPGLVKPSETLSLTCTVSGDSISSGDYYWGWIRQPPGKGLEWIGHIYYSGVTYYNPSLKSRVTISVDTSRNQFSLKLSSVTAADTAVYYCTREDSSNWRSRGQGTLVTVSSGTGGGGSGGGGSGGGGSEFDIQMTQSPSSLSASVGDRVTITCKASDHINNWLAWYQQKPGQAPKLLIYGATTLETGVPSRFSGSGSGTDYTLTISSLQPEDFATYYCQQSWNTPWTFGQGTKLEIKRLEDLKNVFPPEVAVFEPSEAEISHTQKATLVCLATGFYPDHVELSWWVNGKEVHSGVSTDPQPLKEQPALNDSRYCLSSRLRVSATFWQNPRNHFRCQVQFYGLSENDEWTQDRAKPVTQIVSAEAWGRADCGFTSESYQQGVLSATILYEILLGKATLYAVLVSALVLMAMVKRKDSRGRAKRSGSGATNFSLLKQAGDVEENPGPTRGHMTEYKPTVRLATRDDVPRAVRTLAAAFADYPATRHTVDPDRHIERVTELQELFLTRVGLDIGKVWVADDGAAVAVWTTPESVEAGAVFAEIGPRMAELSGSRLAAQQQMEGLLAPHRPKEPAWFLATVGVSPDHQGKGLGSAVVLPGVEAAERAGVPAFLETSAPRNLPFYERLGFTVTADVEVPEGPRTWCMTRKPGA

SEQ ID NO: 14844 - protein, 446 aa, Artificial Sequence
  Synthetic Polypeptide
MALPVTALLLPLALLLHAARPQLQLQESGPGLVKPSETLSLTCTVSGDSISSGDYYWGWIRQPPGKGLEWIGHIYYSGVTYYNPSLKSRVTISVDTSRNQFSLKLSSVTAADTAVYYCTREDSSNWRSRGQGTLVTVSSGTGGGGSGGGGSGGGGSEFDIQMTQSPSSLSASVGDRVTITCKASDHINNWLAWYQQKPGQAPKLLIYGATTLETGVPSRFSGSGSGTDYTLTISSLQPEDFATYYCQQSWNTPWTFGQGTKLEIKRLEDLKNVFPPEVAVFEPSEAEISHTQKATLVCLATGFYPDHVELSWWVNGKEVHSGVSTDPQPLKEQPALNDSRYCLSSRLRVSATFWQNPRNHFRCQVQFYGLSENDEWTQDRAKPVTQIVSAEAWGRADCGFTSESYQQGVLSATILYEILLGKATLYAVLVSALVLMAMVKRKDSRG

SEQ ID NO: 14845 - protein, 450 aa, Artificial Sequence
  Synthetic Polypeptide
MDWIWRILFLVGAATGAHSFEQVQLQQPGAELVKPGASVKMSCKASGYAFSSYWINWMKQKPGQGLEWIGQIYPGDGDTNYNGKFKGRATLTADTSSSTAYMQLSSLTSEDSAVYFCARSITTVVGCAMDYWGQGTSVTVSSTRIQNPDPAVYQLRDSKSSDKSVCLFTDFDSQTNVSQSKDSDVYITDKTVLDMRSMDFKSNSAVAWSNKSDFACANAFNNSIIPEDTFFPSPESSCDVKLVEKSFETDTNLNFQNLSVIGFRILLLKVAGFNLLMTLRLWSSRAKRSGSGVKQTLNFDLLKLAGDVESNPGPSRGHMAKPLSQEESTLIERATATINSIPISEDYSVASAALSSDGRIFTGVNVYHFTGGPCAELVVLGTAAAAAAGNLTCIVAIGNENRGILSPCGRCRQVLLDLHPGIKAIVKDSDGQPTAVGIRELLPSGYVWEG

SEQ ID NO: 14846 - protein, 284 aa, Artificial Sequence
  Synthetic Polypeptide
MDWIWRILFLVGAATGAHSFEQVQLQQPGAELVKPGASVKMSCKASGYAFSSYWINWMKQKPGQGLEWIGQIYPGDGDTNYNGKFKGRATLTADTSSSTAYMQLSSLTSEDSAVYFCARSITTVVGCAMDYWGQGTSVTVSSTRIQNPDPAVYQLRDSKSSDKSVCLFTDFDSQTNVSQSKDSDVYITDKTVLDMRSMDFKSNSAVAWSNKSDFACANAFNNSIIPEDTFFPSPESSCDVKLVEKSFETDTNLNFQNLSVIGFRILLLKVAGFNLLMTLRLWSS

SEQ ID NO: 14847 - protein, 694 aa, Artificial Sequence
  Synthetic Polypeptide
MALPVTALLLPLALLLHAARPQLQLQESGPGLVKPSETLSLTCTVSGDSISSGDYYWGWIRQPPGKGLEWIGHIYYSGVTYYNPSLKSRVTISVDTSRNQFSLKLSSVTAADTAVYYCTREDSSNWRSRGQGTLVTVSSGTGGGGSGGGGSGGGGSEFDIQMTQSPSSLSASVGDRVTITCKASDHINNWLAWYQQKPGQAPKLLIYGATTLETGVPSRFSGSGSGTDYTLTISSLQPEDFATYYCQQSWNTPWTFGQGTKLEIKRLEGKPIPNPLLGLDSTGSGEDLKNVFPPEVAVFEPSEAEISHTQKATLVCLATGFYPDHVELSWWVNGKEVHSGVCTDPQPLKEQPALNDSRYCLSSRLRVSATFWQNPRNHFRCQVQFYGLSENDEWTQDRAKPVTQIVSAEAWGRADCGFTSESYQQGVLSATILYEILLGKATLYAVLVSALVLMAMVKRKDSRGRAKRSGSGATNFSLLKQAGDVEENPGPTRGHMTEYKPTVRLATRDDVPRAVRTLAAAFADYPATRHTVDPDRHIERVTELQELFLTRVGLDIGKVWVADDGAAVAVWTTPESVEAGAVFAEIGPRMAELSGSRLAAQQQMEGLLAPHRPKEPAWFLATVGVSPDHQGKGLGSAVVLPGVEAAERAGVPAFLETSAPRNLPFYERLGFTVTADVEVPEGPRTWCMTRKPGA

SEQ ID NO: 14848 - protein, 464 aa, Artificial Sequence
  Synthetic Polypeptide
MALPVTALLLPLALLLHAARPQLQLQESGPGLVKPSETLSLTCTVSGDSISSGDYYWGWIRQPPGKGLEWIGHIYYSGVTYYNPSLKSRVTISVDTSRNQFSLKLSSVTAADTAVYYCTREDSSNWRSRGQGTLVTVSSGTGGGGSGGGGSGGGGSEFDIQMTQSPSSLSASVGDRVTITCKASDHINNWLAWYQQKPGQAPKLLIYGATTLETGVPSRFSGSGSGTDYTLTISSLQPEDFATYYCQQSWNTPWTFGQGTKLEIKRLEGKPIPNPLLGLDSTGSGEDLKNVFPPEVAVFEPSEAEISHTQKATLVCLATGFYPDHVELSWWVNGKEVHSGVCTDPQPLKEQPALNDSRYCLSSRLRVSATFWQNPRNHFRCQVQFYGLSENDEWTQDRAKPVTQIVSAEAWGRADCGFTSESYQQGVLSATILYEILLGKATLYAVLVSALVLMAMVKRKDSRG

SEQ ID NO: 14849 - protein, 462 aa, Artificial Sequence
  Synthetic Polypeptide
MDWIWRILFLVGAATGAHSFEQVQLQQPGAELVKPGASVKMSCKASGYAFSSYWINWMKQKPGQGLEWIGQIYPGDGDTNYNGKFKGRATLTADTSSSTAYMQLSSLTSEDSAVYFCARSITTVVGCAMDYWGQGTSVTVSSTREQKLISEEDGSGIQNPDPAVYQLRDSKSSDKSVCLFTDFDSQTNVSQSKDSDVYITDKCVLDMRSMDFKSNSAVAWSNKSDFACANAFNNSIIPEDTFFPSPESSCDVKLVEKSFETDTNLNFQNLSVIGFRILLLKVAGFNLLMTLRLWSSRAKRSGSGVKQTLNFDLLKLAGDVESNPGPSRGHMAKPLSQEESTLIERATATINSIPISEDYSVASAALSSDGRIFTGVNVYHFTGGPCAELVVLGTAAAAAAGNLTCIVAIGNENRGILSPCGRCRQVLLDLHPGIKAIVKDSDGQPTAVGIRELLPSGYVWEG

SEQ ID NO: 14850 - protein, 296 aa, Artificial Sequence
  Synthetic Polypeptide
MDWIWRILFLVGAATGAHSFEQVQLQQPGAELVKPGASVKMSCKASGYAFSSYWINWMKQKPGQGLEWIGQIYPGDGDTNYNGKFKGRATLTADTSSSTAYMQLSSLTSEDSAVYFCARSITTVVGCAMDYWGQGTSVTVSSTREQKLISEEDGSGIQNPDPAVYQLRDSKSSDKSVCLFTDFDSQTNVSQSKDSDVYITDKCVLDMRSMDFKSNSAVAWSNKSDFACANAFNNSIIPEDTFFPSPESSCDVKLVEKSFETDTNLNFQNLSVIGFRILLLKVAGFNLLMTLRLWSS

SEQ ID NO: 14851 - protein, 780 aa, Artificial Sequence
  Synthetic Polypeptide
MALPVTALLLPLALLLHAARPQLQLQESGPGLVKPSETLSLTCTVSGDSISSGDYYWGWIRQPPGKGLEWIGHIYYSGVTYYNPSLKSRVTISVDTSRNQFSLKLSSVTAADTAVYYCTREDSSNWRSRGQGTLVTVSSGTGGGGSGGGGSGGGGSEFDIQMTQSPSSLSASVGDRVTITCKASDHINNWLAWYQQKPGQAPKLLIYGATTLETGVPSRFSGSGSGTDYTLTISSLQPEDFATYYCQQSWNTPWTFGQGTKLEIKRGGGGSGGGGSGGGGSQVQLQQPGAELVKPGASVKMSCKASGYAFSSYWINWMKQKPGQGLEWIGQIYPGDGDTNYNGKFKGRATLTADTSSSTAYMQLSSLTSEDSAVYFCARSITTVVGCAMDYWGQGTSVTVSSTRGSGIQNPDPAVYQLRDSKSSDKSVCLFTDFDSQTNVSQSKDSDVYITDKTVLDMRSMDFKSNSAVAWSNKSDFACANAFNNSIIPEDTFFPSSDVPCDVKLVEKSFETDTNLNFQNLSVIGFRILLLKVAGFNLLMTLRLWSSRAKRSGSGVKQTLNFDLLKLAGDVESNPGPSRGHMTEYKPTVRLATRDDVPRAVRTLAAAFADYPATRHTVDPDRHIERVTELQELFLTRVGLDIGKVWVADDGAAVAVWTTPESVEAGAVFAEIGPRMAELSGSRLAAQQQMEGLLAPHRPKEPAWFLATVGVSPDHQGKGLGSAVVLPGVEAAERAGVPAFLETSAPRNLPFYERLGFTVTADVEVPEGPRTWCMTRKPGA

SEQ ID NO: 14852 - protein, 812 aa, Artificial Sequence
  Synthetic Polypeptide
MALPVTALLLPLALLLHAARPQLQLQESGPGLVKPSETLSLTCTVSGDSISSGDYYWGWIRQPPGKGLEWIGHIYYSGVTYYNPSLKSRVTISVDTSRNQFSLKLSSVTAADTAVYYCTREDSSNWRSRGQGTLVTVSSGTGGGGSGGGGSGGGGSEFDIQMTQSPSSLSASVGDRVTITCKASDHINNWLAWYQQKPGQAPKLLIYGATTLETGVPSRFSGSGSGTDYTLTISSLQPEDFATYYCQQSWNTPWTFGQGTKLEIKRGGGGSGGGGSGGGGSQVQLQQPGAELVKPGASVKMSCKASGYAFSSYWINWMKQKPGQGLEWIGQIYPGDGDTNYNGKFKGRATLTADTSSSTAYMQLSSLTSEDSAVYFCARSITTVVGCAMDYWGQGTSVTVSSLEDLKNVFPPEVAVFEPSKAEIAHTQKATLVCLATGFYPDHVELSWWVNGKEVHSGVSTDPQPLKEQPALNDSRYCLSSRLRVSATFWQNPRNHFRCQVQFYGLSENDEWTQDRAKPVTQIVSAEAWGRADCGITSASYHQGVLSATILYEILLGKATLYAVLVSALVLMAMVKRKDSRGRAKRSGSGATNFSLLKQAGDVEENPGPTRGHMTEYKPTVRLATRDDVPRAVRTLAAAFADYPATRHTVDPDRHIERVTELQELFLTRVGLDIGKVWVADDGAAVAVWTTPESVEAGAVFAEIGPRMAELSGSRLAAQQQMEGLLAPHRPKEPAWFLATVGVSPDHQGKGLGSAVVLPGVEAAERAGVPAFLETSAPRNLPFYERLGFTVTADVEVPEGPRTWCMTRKPGA

SEQ ID NO: 14853 - protein, 1130 aa, Artificial Sequence
  Synthetic Polypeptide
MALPVTALLLPLALLLHAARPQLQLQESGPGLVKPSETLSLTCTVSGDSISSGDYYWGWIRQPPGKGLEWIGHIYYSGVTYYNPSLKSRVTISVDTSRNQFSLKLSSVTAADTAVYYCTREDSSNWRSRGQGTLVTVSSGTGGGGSGGGGSGGGGSEFDIQMTQSPSSLSASVGDRVTITCKASDHINNWLAWYQQKPGQAPKLLIYGATTLETGVPSRFSGSGSGTDYTLTISSLQPEDFATYYCQQSWNTPWTFGQGTKLEIKRLEIQNPDPAVYQLRDSKSSDKSVCLFTDFDSQTNVSQSKDSDVYITDKCVLDMRSMDFKSNSAVAWSNKSDFACANAFNNSIIPEDTFFPSSDVPCDVKLVEKSFETDTNLNFQNLSVIGFRILLLKVAGFNLLMTLRLWSSRAKRSGSGVKQTLNFDLLKLAGDVESNPGPTSMDWIWRILFLVGAATGAHSGPQVQLQESGGGLAQAGGSLRLSCAASGRTFSMGWFRQAPGKEREFVAAITYSGGSPYYASSVRGRFTISRDNAKNTVYLQMNSLKPEDTAVYYCAANPTYGSDWNAENWGQGTQVTVSSGSGGGGSGGGGSGGGGSFEQVQLQQPGAELVKPGASVKMSCKASGYAFSSYWINWMKQKPGQGLEWIGQIYPGDGDTNYNGKFKGRATLTADTSSSTAYMQLSSLTSEDSAVYFCARSITTVVGCAMDYWGQGTSVTVSSTREDLKNVFPPEVAVFEPSKAEIAHTQKATLVCLATGFYPDHVELSWWVNGKEVHSGVCTDPQPLKEQPALNDSRYCLSSRLRVSATFWQNPRNHFRCQVQFYGLSENDEWTQDRAKPVTQIVSAEAWGRADCGITSASYHQGVLSATILYEILLGKATLYAVLVSALVLMAMVKRKDSRGRAKRSGSGATNFSLLKQAGDVEENPGPSRGHMTEYKPTVRLATRDDVPRAVRTLAAAFADYPATRHTVDPDRHIERVTELQELFLTRVGLDIGKVWVADDGAAVAVWTTPESVEAGAVFAEIGPRMAELSGSRLAAQQQMEGLLAPHRPKEPAWFLATVGVSPDHQGKGLGSAVVLPGVEAAERAGVPAFLETSAPRNLPFYERLGFTVTADVEVPEGPRTWCMTRKPGA

SEQ ID NO: 14854 - protein, 1129 aa, Artificial Sequence
  Synthetic Polypeptide
MALPVTALLLPLALLLHAARPQLQLQESGPGLVKPSETLSLTCTVSGDSISSGDYYWGWIRQPPGKGLEWIGHIYYSGVTYYNPSLKSRVTISVDTSRNQFSLKLSSVTAADTAVYYCTREDSSNWRSRGQGTLVTVSSGTGGGGSGGGGSGGGGSEFDIQMTQSPSSLSASVGDRVTITCKASDHINNWLAWYQQKPGQAPKLLIYGATTLETGVPSRFSGSGSGTDYTLTISSLQPEDFATYYCQQSWNTPWTFGQGTKLEIKRLEDLKNVFPPEVAVFEPSKAEIAHTQKATLVCLATGFYPDHVELSWWVNGKEVHSGVCTDPQPLKEQPALNDSRYCLSSRLRVSATFWQNPRNHFRCQVQFYGLSENDEWTQDRAKPVTQIVSAEAWGRADCGITSASYHQGVLSATILYEILLGKATLYAVLVSALVLMAMVKRKDSRGRAKRSGSGATNFSLLKQAGDVEENPGPTSMDWIWRILFLVGAATGAHSGPQVQLQESGGGLAQAGGSLRLSCAASGRTFSMGWFRQAPGKEREFVAAITYSGGSPYYASSVRGRFTISRDNAKNTVYLQMNSLKPEDTAVYYCAANPTYGSDWNAENWGQGTQVTVSSGSGGGGSGGGGSGGGGSFEQVQLQQPGAELVKPGASVKMSCKASGYAFSSYWINWMKQKPGQGLEWIGQIYPGDGDTNYNGKFKGRATLTADTSSSTAYMQLSSLTSEDSAVYFCARSITTVVGCAMDYWGQGTSVTVSSTRIQNPDPAVYQLRDSKSSDKSVCLFTDFDSQTNVSQSKDSDVYITDKCVLDMRSMDFKSNSAVAWSNKSDFACANAFNNSIIPEDTFFPSSDVPCDVKLVEKSFETDTNLNFQNLSVIGFRILLLKVAGFNLLMTLRLWSSRAKRSGSGVKQTLNFDLLKLAGDVESNPGPSRGHMTEYKPTVRLATRDDVPRAVRTLAAAFADYPATRHTVDPDRHIERVTELQELFLTRVGLDIGKVWVADDGAAVAVWTTPESVEAGAVFAEIGPRMAELSGSRLAAQQQMEGLLAPHRPKEPAWFLATVGVSPDHQGKGLGSAVVLPGVEAAERAGVPAFLETSAPRNLPFYERLGFTVTADVEVPEGPRTWCMTRKPGA

SEQ ID NO: 14855 - protein, 1129 aa, Artificial Sequence
  Synthetic Polypeptide
MALPVTALLLPLALLLHAARPQLQLQESGPGLVKPSETLSLTCTVSGDSISSGDYYWGWIRQPPGKGLEWIGHIYYSGVTYYNPSLKSRVTISVDTSRNQFSLKLSSVTAADTAVYYCTREDSSNWRSRGQGTLVTVSSGTGGGGSGGGGSGGGGSEFDIQMTQSPSSLSASVGDRVTITCKASDHINNWLAWYQQKPGQAPKLLIYGATTLETGVPSRFSGSGSGTDYTLTISSLQPEDFATYYCQQSWNTPWTFGQGTKLEIKRLEDLKNVFPPEVAVFEPSEAEISHTQKATLVCLATGFYPDHVELSWWVNGKEVHSGVCTDPQPLKEQPALNDSRYCLSSRLRVSATFWQNPRNHFRCQVQFYGLSENDEWTQDRAKPVTQIVSAEAWGRADCGFTSESYQQGVLSATILYEILLGKATLYAVLVSALVLMAMVKRKDSRGRAKRSGSGATNFSLLKQAGDVEENPGPTSMDWIWRILFLVGAATGAHSGPQVQLQESGGGLAQAGGSLRLSCAASGRTFSMGWFRQAPGKEREFVAAITYSGGSPYYASSVRGRFTISRDNAKNTVYLQMNSLKPEDTAVYYCAANPTYGSDWNAENWGQGTQVTVSSGSGGGGSGGGGSGGGGSFEQVQLQQPGAELVKPGASVKMSCKASGYAFSSYWINWMKQKPGQGLEWIGQIYPGDGDTNYNGKFKGRATLTADTSSSTAYMQLSSLTSEDSAVYFCARSITTVVGCAMDYWGQGTSVTVSSTRIQNPDPAVYQLRDSKSSDKSVCLFTDFDSQTNVSQSKDSDVYITDKCVLDMRSMDFKSNSAVAWSNKSDFACANAFNNSIIPEDTFFPSPESSCDVKLVEKSFETDTNLNFQNLSVIGFRILLLKVAGFNLLMTLRLWSSRAKRSGSGVKQTLNFDLLKLAGDVESNPGPSRGHMTEYKPTVRLATRDDVPRAVRTLAAAFADYPATRHTVDPDRHIERVTELQELFLTRVGLDIGKVWVADDGAAVAVWTTPESVEAGAVFAEIGPRMAELSGSRLAAQQQMEGLLAPHRPKEPAWFLATVGVSPDHQGKGLGSAVVLPGVEAAERAGVPAFLETSAPRNLPFYERLGFTVTADVEVPEGPRTWCMTRKPGA

SEQ ID NO: 14856 - protein, 896 aa, Artificial Sequence
  Synthetic Polypeptide
MALPVTALLLPLALLLHAARPQLQLQESGPGLVKPSETLSLTCTVSGDSISSGDYYWGWIRQPPGKGLEWIGHIYYSGVTYYNPSLKSRVTISVDTSRNQFSLKLSSVTAADTAVYYCTREDSSNWRSRGQGTLVTVSSGTGGGGSGGGGSGGGGSEFDIQMTQSPSSLSASVGDRVTITCKASDHINNWLAWYQQKPGQAPKLLIYGATTLETGVPSRFSGSGSGTDYTLTISSLQPEDFATYYCQQSWNTPWTFGQGTKLEIKRLEDLKNVFPPEVAVFEPSEAEISHTQKATLVCLATGFYPDHVELSWWVNGKEVHSGVCTDPQPLKEQPALNDSRYCLSSRLRVSATFWQNPRNHFRCQVQFYGLSENDEWTQDRAKPVTQIVSAEAWGRADCGFTSESYQQGVLSATILYEILLGKATLYAVLVSALVLMAMVKRKDSRGRAKRSGSGATNFSLLKQAGDVEENPGPTSMDWIWRILFLVGAATGAHSGPQVQLQESGGGLAQAGGSLRLSCAASGRTFSMGWFRQAPGKEREFVAAITYSGGSPYYASSVRGRFTISRDNAKNTVYLQMNSLKPEDTAVYYCAANPTYGSDWNAENWGQGTQVTVSSGSGGGGSGGGGSGGGGSFEQVQLQQPGAELVKPGASVKMSCKASGYAFSSYWINWMKQKPGQGLEWIGQIYPGDGDTNYNGKFKGRATLTADTSSSTAYMQLSSLTSEDSAVYFCARSITTVVGCAMDYWGQGTSVTVSSTRIQNPDPAVYQLRDSKSSDKSVCLFTDFDSQTNVSQSKDSDVYITDKCVLDMRSMDFKSNSAVAWSNKSDFACANAFNNSIIPEDTFFPSPESSCDVKLVEKSFETDTNLNFQNLSVIGFRILLLKVAGFNLLMTLRLWSS

SEQ ID NO: 14857 - protein, 1121 aa, Artificial Sequence
  Synthetic Polypeptide
MALPVTALLLPLALLLHAARPQLQLQESGPGLVKPSETLSLTCTVSGDSISSGDYYWGWIRQPPGKGLEWIGHIYYSGVTYYNPSLKSRVTISVDTSRNQFSLKLSSVTAADTAVYYCTREDSSNWRSRGQGTLVTVSSGTGGGGSGGGGSGGGGSEFDIQMTQSPSSLSASVGDRVTITCKASDHINNWLAWYQQKPGQAPKLLIYGATTLETGVPSRFSGSGSGTDYTLTISSLQPEDFATYYCQQSWNTPWTFGQGTKLEIKRLEDLKNVFPPEVAVFEPSEAEISHTQKATLVCLATGFYPDHVELSWWVNGKEVHSGVCTDPQPLKEQPALNDSRYCLSSRLRVSATFWQNPRNHFRCQVQFYGLSENDEWTQDRAKPVTQIVSAEAWGRADCGFTSESYQQGVLSATILYEILLGKATLYAVLVSALVLMAMVKRKDSRGRAKRSGSGATNFSLLKQAGDVEENPGPTSMDWIWRILFLVGAATGAHSGPQVQLQESGGGLAQAGGSLRLSCAASGRTFSMGWFRQAPGKEREFVAAITYSGGSPYYASSVRGRFTISRDNAKNTVYLQMNSLKPEDTAVYYCAANPTYGSDWNAENWGQGTQVTVSSGSGGGGSGGGGSGGGGSFEQVQLQQPGAELVKPGASVKMSCKASGYAFSSYWINWMKQKPGQGLEWIGQIYPGDGDTNYNGKFKGRATLTADTSSSTAYMQLSSLTSEDSAVYFCARSITTVVGCAMDYWGQGTSVTVSSTRIQNPDPAVYQLRDSKSSDKSVCLFTDFDSQTNVSQSKDSDVYITDKCVLDMRSMDFKSNSAVAWSNKSDFACANAFNNSIIPEDTFFPSPESSCDVKLVEKSFETDTNLNFQNLSVIGFRILLLKVAGFNLLMTLRLWSSRAKRSGSGVKQTLNFDLLKLAGDVESNPGPSRGGIHTMATYEVLCEVARKLGTDDREVVLFLLNVFIPQPTLAQLIGALRALKEEGRLTFPLLAECLFRAGRRDLLRDLLHLDPRFLERHLAGTMSYFSPYQLTVLHVDGELCARDIRSLIFLSKDTIGSRSTPQTFLHWVYCMENLDLLGPTDVDALMSMLRSLSRVDLQRQVQTLMGLHLSGPSHSQHYRHTP

SEQ ID NO: 14858 - protein, 900 aa, Artificial Sequence
  Synthetic Polypeptide
MALPVTALLLPLALLLHAARPQLQLQESGPGLVKPSETLSLTCTVSGDSISSGDYYWGWIRQPPGKGLEWIGHIYYSGVTYYNPSLKSRVTISVDTSRNQFSLKLSSVTAADTAVYYCTREDSSNWRSRGQGTLVTVSSGTGGGGSGGGGSGGGGSEFDIQMTQSPSSLSASVGDRVTITCKASDHINNWLAWYQQKPGQAPKLLIYGATTLETGVPSRFSGSGSGTDYTLTISSLQPEDFATYYCQQSWNTPWTFGQGTKLEIKRLEIQNPDPAVYQLRDSKSSDKSVCLFTDFDSQTNVSQSKDSDVYITDKCVLDMRSMDFKSNSAVAWSNKSDFACANAFNNSIIPEDTFFPSPESSCDVKLVEKSFETDTNLNFQNLSVIGFRILLLKVAGFNLLMTLRLWSSRAKRSGSGVKQTLNFDLLKLAGDVESNPGPTSMDWIWRILFLVGAATGAHSGPQVQLQESGGGLAQAGGSLRLSCAASGRTFSMGWFRQAPGKEREFVAAITYSGGSPYYASSVRGRFTISRDNAKNTVYLQMNSLKPEDTAVYYCAANPTYGSDWNAENWGQGTQVTVSSGSGGGGSGGGGSGGGGSFEQVQLQQPGAELVKPGASVKMSCKASGYAFSSYWINWMKQKPGQGLEWIGQIYPGDGDTNYNGKFKGRATLTADTSSSTAYMQLSSLTSEDSAVYFCARSITTVVGCAMDYWGQGTSVTVSSTREDLKNVFPPEVAVFEPSEAEISHTQKATLVCLATGFYPDHVELSWWVNGKEVHSGVCTDPQPLKEQPALNDSRYCLSSRLRVSATFWQNPRNHFRCQVQFYGLSENDEWTQDRAKPVTQIVSAEAWGRADCGFTSESYQQGVLSATILYEILLGKATLYAVLVSALVLMAMVKRKDSRG

SEQ ID NO: 14859 - protein, 1122 aa, Artificial Sequence
  Synthetic Polypeptide
MALPVTALLLPLALLLHAARPQLQLQESGPGLVKPSETLSLTCTVSGDSISSGDYYWGWIRQPPGKGLEWIGHIYYSGVTYYNPSLKSRVTISVDTSRNQFSLKLSSVTAADTAVYYCTREDSSNWRSRGQGTLVTVSSGTGGGGSGGGGSGGGGSEFDIQMTQSPSSLSASVGDRVTITCKASDHINNWLAWYQQKPGQAPKLLIYGATTLETGVPSRFSGSGSGTDYTLTISSLQPEDFATYYCQQSWNTPWTFGQGTKLEIKRLEIQNPDPAVYQLRDSKSSDKSVCLFTDFDSQTNVSQSKDSDVYITDKCVLDMRSMDFKSNSAVAWSNKSDFACANAFNNSIIPEDTFFPSPESSCDVKLVEKSFETDTNLNFQNLSVIGFRILLLKVAGFNLLMTLRLWSSRAKRSGSGVKQTLNFDLLKLAGDVESNPGPTSMDWIWRILFLVGAATGAHSGPQVQLQESGGGLAQAGGSLRLSCAASGRTFSMGWFRQAPGKEREFVAAITYSGGSPYYASSVRGRFTISRDNAKNTVYLQMNSLKPEDTAVYYCAANPTYGSDWNAENWGQGTQVTVSSGSGGGGSGGGGSGGGGSFEQVQLQQPGAELVKPGASVKMSCKASGYAFSSYWINWMKQKPGQGLEWIGQIYPGDGDTNYNGKFKGRATLTADTSSSTAYMQLSSLTSEDSAVYFCARSITTVVGCAMDYWGQGTSVTVSSTREDLKNVFPPEVAVFEPSEAEISHTQKATLVCLATGFYPDHVELSWWVNGKEVHSGVCTDPQPLKEQPALNDSRYCLSSRLRVSATFWQNPRNHFRCQVQFYGLSENDEWTQDRAKPVTQIVSAEAWGRADCGFTSESYQQGVLSATILYEILLGKATLYAVLVSALVLMAMVKRKDSRGRAKRSGSGATNFSLLKQAGDVEENPGPSRGGIHTMATYEVLCEVARKLGTDDREVVLFLLNVFIPQPTLAQLIGALRALKEEGRLTFPLLAECLFRAGRRDLLRDLLHLDPRFLERHLAGTMSYFSPYQLTVLHVDGELCARDIRSLIFLSKDTIGSRSTPQTFLHWVYCMENLDLLGPTDVDALMSMLRSLSRVDLQRQVQTLMGLHLSGPSHSQHYRHTP

SEQ ID NO: 14860 - protein, 1129 aa, Artificial Sequence
  Synthetic Polypeptide
MALPVTALLLPLALLLHAARPQLQLQESGPGLVKPSETLSLTCTVSGDSISSGDYYWGWIRQPPGKGLEWIGHIYYSGVTYYNPSLKSRVTISVDTSRNQFSLKLSSVTAADTAVYYCTREDSSNWRSRGQGTLVTVSSGTGGGGSGGGGSGGGGSEFDIQMTQSPSSLSASVGDRVTITCKASDHINNWLAWYQQKPGQAPKLLIYGATTLETGVPSRFSGSGSGTDYTLTISSLQPEDFATYYCQQSWNTPWTFGQGTKLEIKRLEDLKNVFPPEVAVFEPSEAEISHTQKATLVCLATGFYPDHVELSWWVNGKEVHSGVSTDPQPLKEQPALNDSRYCLSSRLRVSATFWQNPRNHFRCQVQFYGLSENDEWTQDRAKPVTQIVSAEAWGRADCGFTSESYQQGVLSATILYEILLGKATLYAVLVSALVLMAMVKRKDSRGRAKRSGSGATNFSLLKQAGDVEENPGPTSMDWIWRILFLVGAATGAHSGPQVQLQESGGGLAQAGGSLRLSCAASGRTFSMGWFRQAPGKEREFVAAITYSGGSPYYASSVRGRFTISRDNAKNTVYLQMNSLKPEDTAVYYCAANPTYGSDWNAENWGQGTQVTVSSGSGGGGSGGGGSGGGGSFEQVQLQQPGAELVKPGASVKMSCKASGYAFSSYWINWMKQKPGQGLEWIGQIYPGDGDTNYNGKFKGRATLTADTSSSTAYMQLSSLTSEDSAVYFCARSITTVVGCAMDYWGQGTSVTVSSTRIQNPDPAVYQLRDSKSSDKSVCLFTDFDSQTNVSQSKDSDVYITDKTVLDMRSMDFKSNSAVAWSNKSDFACANAFNNSIIPEDTFFPSPESSCDVKLVEKSFETDTNLNFQNLSVIGFRILLLKVAGFNLLMTLRLWSSRAKRSGSGVKQTLNFDLLKLAGDVESNPGPSRGHMTEYKPTVRLATRDDVPRAVRTLAAAFADYPATRHTVDPDRHIERVTELQELFLTRVGLDIGKVWVADDGAAVAVWTTPESVEAGAVFAEIGPRMAELSGSRLAAQQQMEGLLAPHRPKEPAWFLATVGVSPDHQGKGLGSAVVLPGVEAAERAGVPAFLETSAPRNLPFYERLGFTVTADVEVPEGPRTWCMTRKPGA

SEQ ID NO: 14861 - protein, 1211 aa, Artificial Sequence
  Synthetic Polypeptide
MALPVTALLLPLALLLHAARPQLQLQESGPGLVKPSETLSLTCTVSGDSISSGDYYWGWIRQPPGKGLEWIGHIYYSGVTYYNPSLKSRVTISVDTSRNQFSLKLSSVTAADTAVYYCTREDSSNWRSRGQGTLVTVSSGTGGGGSGGGGSGGGGSEFDIQMTQSPSSLSASVGDRVTITCKASDHINNWLAWYQQKPGQAPKLLIYGATTLETGVPSRFSGSGSGTDYTLTISSLQPEDFATYYCQQSWNTPWTFGQGTKLEIKRLEDLKNVFPPEVAVFEPSEAEISHTQKATLVCLATGFYPDHVELSWWVNGKEVHSGVSTDPQPLKEQPALNDSRYCLSSRLRVSATFWQNPRNHFRCQVQFYGLSENDEWTQDRAKPVTQIVSAEAWGRADCGFTSESYQQGVLSATILYEILLGKATLYAVLVSALVLMAMVKRKDSRGRAKRSGSGATNFSLLKQAGDVEENPGPTSMDWIWRILFLVGAATGAHSGPQVQLQESGGGLAQAGGSLRLSCAASGRTFSMGWFRQAPGKEREFVAAITYSGGSPYYASSVRGRFTISRDNAKNTVYLQMNSLKPEDTAVYYCAANPTYGSDWNAENWGQGTQVTVSSGSGGGGSGGGGSGGGGSFEQVQLQQPGAELVKPGASVKMSCKASGYAFSSYWINWMKQKPGQGLEWIGQIYPGDGDTNYNGKFKGRATLTADTSSSTAYMQLSSLTSEDSAVYFCARSITTVVGCAMDYWGQGTSVTVSSTREQKLISEEDGSGTPFPSLAPPIMLLVDGKQQMVVVCLVLDVAPPGLDSPIWFSAGNGSALDAFTYGPSPATDGTWTNLAHLSLPSEELASWEPLVCHTGPGAEGHSRSTQPMHLSGEASTARTCPQEPLRGTPGGALWLGVLRLLLFKLLLFDLLLTCSCLCDPAGPLPSPATTTRLRALGSHRLHPATETGGREATSSPRPQPRDRRWGDTPPGRKPGSPVRAKRSGSGVKQTLNFDLLKLAGDVESNPGPSRGHMTEYKPTVRLATRDDVPRAVRTLAAAFADYPATRHTVDPDRHIERVTELQELFLTRVGLDIGKVWVADDGAAVAVWTTPESVEAGAVFAEIGPRMAELSGSRLAAQQQMEGLLAPHRPKEPAWFLATVGVSPDHQGKGLGSAVVLPGVEAAERAGVPAFLETSAPRNLPFYERLGFTVTADVEVPEGPRTWCMTRKPGA

SEQ ID NO: 14862 - protein, 1166 aa, Artificial Sequence
  Synthetic Polypeptide
MALPVTALLLPLALLLHAARPQLQLQESGPGLVKPSETLSLTCTVSGDSISSGDYYWGWIRQPPGKGLEWIGHIYYSGVTYYNPSLKSRVTISVDTSRNQFSLKLSSVTAADTAVYYCTREDSSNWRSRGQGTLVTVSSGTGGGGSGGGGSGGGGSEFDIQMTQSPSSLSASVGDRVTITCKASDHINNWLAWYQQKPGQAPKLLIYGATTLETGVPSRFSGSGSGTDYTLTISSLQPEDFATYYCQQSWNTPWTFGQGTKLEIKRLEGKPIPNPLLGLDSTGSGDKQLDADVSPKPTIFLPSIAETKLQKAGTYLCLLEKFFPDVIKIHWQEKKSNTILGSQEGNTMKTNDTYMKFSWLTVPEKSLDKEHRCIVRHENNKNGVDQEIIFPPIKTDVITMDPKDNCSKDANDTLLLQLTNTSAYYMYLLLLLKSVVYFAIITCCLLRRTAFCCNGEKSRAKRSGSGATNFSLLKQAGDVEENPGPTSMDWIWRILFLVGAATGAHSGPQVQLQESGGGLAQAGGSLRLSCAASGRTFSMGWFRQAPGKEREFVAAITYSGGSPYYASSVRGRFTISRDNAKNTVYLQMNSLKPEDTAVYYCAANPTYGSDWNAENWGQGTQVTVSSGSGGGGSGGGGSGGGGSFEQVQLQQPGAELVKPGASVKMSCKASGYAFSSYWINWMKQKPGQGLEWIGQIYPGDGDTNYNGKFKGRATLTADTSSSTAYMQLSSLTSEDSAVYFCARSITTVVGCAMDYWGQGTSVTVSSTREQKLISEEDGSGSQPHTKPSVFVMKNGTNVACLVKEFYPKDIRINLVSSKKITEFDPAIVISPSGKYNAVKLGKYEDSNSVTCSVQHDNKTVHSTDFEVKTDSTDHVKPKETENTKQPSKSCHKPKAIVHTEKVNMMSLTVLGLRMLFAKTVAVNFLLTAKLFFLRAKRSGSGVKQTLNFDLLKLAGDVESNPGPSRGHMTEYKPTVRLATRDDVPRAVRTLAAAFADYPATRHTVDPDRHIERVTELQELFLTRVGLDIGKVWVADDGAAVAVWTTPESVEAGAVFAEIGPRMAELSGSRLAAQQQMEGLLAPHRPKEPAWFLATVGVSPDHQGKGLGSAVVLPGVEAAERAGVPAFLETSAPRNLPFYERLGFTVTADVEVPEGPRTWCMTRKPGA

SEQ ID NO: 14863 - protein, 904 aa, Artificial Sequence
  Synthetic Polypeptide
MALPVTALLLPLALLLHAARPQLQLQESGPGLVKPSETLSLTCTVSGDSISSGDYYWGWIRQPPGKGLEWIGHIYYSGVTYYNPSLKSRVTISVDTSRNQFSLKLSSVTAADTAVYYCTREDSSNWRSRGQGTLVTVSSGTGGGGSGGGGSGGGGSEFDIQMTQSPSSLSASVGDRVTITCKASDHINNWLAWYQQKPGQAPKLLIYGATTLETGVPSRFSGSGSGTDYTLTISSLQPEDFATYYCQQSWNTPWTFGQGTKLEIKRLESQPHTKPSVFVMKNGTNVACLVKEFYPKDIRINLVSSKKITEFDPAIVISPSGKYNAVKLGKYEDSNSVTCSVQHDNKTVHSTDFEVKTDSTDHVKPKETENTKQPSKSCHKPKAIVHTEKVNMMSLTVLGLRMLFAKTVAVNFLLTAKLFFLRAKRSGSGATNFSLLKQAGDVEENPGPTSMDWIWRILFLVGAATGAHSGPQVQLQESGGGLAQAGGSLRLSCAASGRTFSMGWFRQAPGKEREFVAAITYSGGSPYYASSVRGRFTISRDNAKNTVYLQMNSLKPEDTAVYYCAANPTYGSDWNAENWGQGTQVTVSSGSGGGGSGGGGSGGGGSFEQVQLQQPGAELVKPGASVKMSCKASGYAFSSYWINWMKQKPGQGLEWIGQIYPGDGDTNYNGKFKGRATLTADTSSSTAYMQLSSLTSEDSAVYFCARSITTVVGCAMDYWGQGTSVTVSSTRDKQLDADVSPKPTIFLPSIAETKLQKAGTYLCLLEKFFPDVIKIHWQEKKSNTILGSQEGNTMKTNDTYMKFSWLTVPEKSLDKEHRCIVRHENNKNGVDQEIIFPPIKTDVITMDPKDNCSKDANDTLLLQLTNTSAYYMYLLLLLKSVVYFAIITCCLLRRTAFCCNGEKS

SEQ ID NO: 14864 - protein, 1306 aa, Artificial Sequence
  Synthetic Polypeptide
MALPVTALLLPLALLLHAARPQLQLQESGPGLVKPSETLSLTCTVSGDSISSGDYYWGWIRQPPGKGLEWIGHIYYSGVTYYNPSLKSRVTISVDTSRNQFSLKLSSVTAADTAVYYCTREDSSNWRSRGQGTLVTVSSGTGGGGSGGGGSGGGGSEFDIQMTQSPSSLSASVGDRVTITCKASDHINNWLAWYQQKPGQAPKLLIYGATTLETGVPSRFSGSGSGTDYTLTISSLQPEDFATYYCQQSWNTPWTFGQGTKLEIKRGQPKANPTVTLFPPSSEELQANKATLVCLISDFYPGAVTVAWKADGSPVKAGVETTKPSKQSNNKYAASSYLSLTPEQWKSHRSYSCQVTHEGSTVEKTVAPTECSGSQSFGLLDPKLCYLLDGILFIYGVILTALFLRVKFSRSADAPAYQQGQNQLYNELNLGRREEYDVLDKRRGRDPEMGGKPQRRKNPQEGLYNELQKDKMAEAYSEIGMKGERRRGKGHDGLYQGLSTATKDTYDALHMQALPPRRAKRSGSGATNFSLLKQAGDVEENPGPTSMDWIWRILFLVGAATGAHSGPQVQLQESGGGLAQAGGSLRLSCAASGRTFSMGWFRQAPGKEREFVAAITYSGGSPYYASSVRGRFTISRDNAKNTVYLQMNSLKPEDTAVYYCAANPTYGSDWNAENWGQGTQVTVSSGSGGGGSGGGGSGGGGSFEQVQLQQPGAELVKPGASVKMSCKASGYAFSSYWINWMKQKPGQGLEWIGQIYPGDGDTNYNGKFKGRATLTADTSSSTAYMQLSSLTSEDSAVYFCARSITTVVGCAMDYWGQGTSVTVSSASTKGPSVFPLAPSSKSTSGGTAALGCLVKDYFPEPVTVSWNSGALTSGVHTFPAVLQSSGLYSLSSVVTVPSSSLGTQTYICNVNHKPSNTKVDKRVEPKSCGTQSFGLLDPKLCYLLDGILFIYGVILTALFLRVKFSRSADAPAYQQGQNQLYNELNLGRREEYDVLDKRRGRDPEMGGKPQRRKNPQEGLYNELQKDKMAEAYSEIGMKGERRRGKGHDGLYQGLSTATKDTYDALHMQALPPRRAKRSGSGVKQTLNFDLLKLAGDVESNPGPSRGHMTEYKPTVRLATRDDVPRAVRTLAAAFADYPATRHTVDPDRHIERVTELQELFLTRVGLDIGKVWVADDGAAVAVWTTPESVEAGAVFAEIGPRMAELSGSRLAAQQQMEGLLAPHRPKEPAWFLATVGVSPDHQGKGLGSAVVLPGVEAAERAGVPAFLETSAPRNLPFYERLGFTVTADVEVPEGPRTWCMTRKPGA

SEQ ID NO: 14865 - protein, 1092 aa, Artificial Sequence
  Synthetic Polypeptide
MALPVTALLLPLALLLHAARPQLQLQESGPGLVKPSETLSLTCTVSGDSISSGDYYWGWIRQPPGKGLEWIGHIYYSGVTYYNPSLKSRVTISVDTSRNQFSLKLSSVTAADTAVYYCTREDSSNWRSRGQGTLVTVSSGTGGGGSGGGGSGGGGSEFDIQMTQSPSSLSASVGDRVTITCKASDHINNWLAWYQQKPGQAPKLLIYGATTLETGVPSRFSGSGSGTDYTLTISSLQPEDFATYYCQQSWNTPWTFGQGTKLEIKRLEDLKNVFPPEVAVFEPSEAEISHTQKATLVCLATGFYPDHVELSWWVNGKEVHSGVSTDPQPLKEQPALNDSRYCLSSRLRVSATFWQNPRNHFRCQVQFYGLSENDEWTQDRAKPVTQIVSAEAWGRADCGSQSFGLLDPKLCYLLDGILFIYGVILTALFLRVKFSRSADAPAYQQGQNQLYNELNLGRREEYDVLDKRRGRDPEMGGKPQRRKNPQEGLYNELQKDKMAEAYSEIGMKGERRRGKGHDGLYQGLSTATKDTYDALHMQALPPRRAKRSGSGATNFSLLKQAGDVEENPGPTSMDWIWRILFLVGAATGAHSGPQVQLQESGGGLAQAGGSLRLSCAASGRTFSMGWFRQAPGKEREFVAAITYSGGSPYYASSVRGRFTISRDNAKNTVYLQMNSLKPEDTAVYYCAANPTYGSDWNAENWGQGTQVTVSSGSGGGGSGGGGSGGGGSFEQVQLQQPGAELVKPGASVKMSCKASGYAFSSYWINWMKQKPGQGLEWIGQIYPGDGDTNYNGKFKGRATLTADTSSSTAYMQLSSLTSEDSAVYFCARSITTVVGCAMDYWGQGTSVTVSSTRIQNPDPAVYQLRDSKSSDKSVCLFTDFDSQTNVSQSKDSDVYITDKTVLDMRSMDFKSNSAVAWSNKSDFACANAFNNSIIPEDTFFPSPESSCGTQSFGLLDPKLCYLLDGILFIYGVILTALFLRVKFSRSADAPAYQQGQNQLYNELNLGRREEYDVLDKRRGRDPEMGGKPQRRKNPQEGLYNELQKDKMAEAYSEIGMKGERRRGKGHDGLYQGLSTATKDTYDALHMQALPPR

SEQ ID NO: 14866 - protein, 1092 aa, Artificial Sequence
  Synthetic Polypeptide
MALPVTALLLPLALLLHAARPQLQLQESGPGLVKPSETLSLTCTVSGDSISSGDYYWGWIRQPPGKGLEWIGHIYYSGVTYYNPSLKSRVTISVDTSRNQFSLKLSSVTAADTAVYYCTREDSSNWRSRGQGTLVTVSSGTGGGGSGGGGSGGGGSEFDIQMTQSPSSLSASVGDRVTITCKASDHINNWLAWYQQKPGQAPKLLIYGATTLETGVPSRFSGSGSGTDYTLTISSLQPEDFATYYCQQSWNTPWTFGQGTKLEIKRLEDLKNVFPPEVAVFEPSKAEIAHTQKATLVCLATGFYPDHVELSWWVNGKEVHSGVCTDPQPLKEQPALNDSRYCLSSRLRVSATFWQNPRNHFRCQVQFYGLSENDEWTQDRAKPVTQIVSAEAWGRADCGSQSFGLLDPKLCYLLDGILFIYGVILTALFLRVKFSRSADAPAYQQGQNQLYNELNLGRREEYDVLDKRRGRDPEMGGKPQRRKNPQEGLYNELQKDKMAEAYSEIGMKGERRRGKGHDGLYQGLSTATKDTYDALHMQALPPRRAKRSGSGATNFSLLKQAGDVEENPGPTSMDWIWRILFLVGAATGAHSGPQVQLQESGGGLAQAGGSLRLSCAASGRTFSMGWFRQAPGKEREFVAAITYSGGSPYYASSVRGRFTISRDNAKNTVYLQMNSLKPEDTAVYYCAANPTYGSDWNAENWGQGTQVTVSSGSGGGGSGGGGSGGGGSFEQVQLQQPGAELVKPGASVKMSCKASGYAFSSYWINWMKQKPGQGLEWIGQIYPGDGDTNYNGKFKGRATLTADTSSSTAYMQLSSLTSEDSAVYFCARSITTVVGCAMDYWGQGTSVTVSSTRIQNPDPAVYQLRDSKSSDKSVCLFTDFDSQTNVSQSKDSDVYITDKCVLDMRSMDFKSNSAVAWSNKSDFACANAFNNSIIPEDTFFPSSDVPCGTQSFGLLDPKLCYLLDGILFIYGVILTALFLRVKFSRSADAPAYQQGQNQLYNELNLGRREEYDVLDKRRGRDPEMGGKPQRRKNPQEGLYNELQKDKMAEAYSEIGMKGERRRGKGHDGLYQGLSTATKDTYDALHMQALPPR

SEQ ID NO: 14867 - protein, 1163 aa, Artificial Sequence
  Synthetic Polypeptide
MALPVTALLLPLALLLHAARPQLQLQESGPGLVKPSETLSLTCTVSGDSISSGDYYWGWIRQPPGKGLEWIGHIYYSGVTYYNPSLKSRVTISVDTSRNQFSLKLSSVTAADTAVYYCTREDSSNWRSRGQGTLVTVSSGTGGGGSGGGGSGGGGSEFDIQMTQSPSSLSASVGDRVTITCKASDHINNWLAWYQQKPGQAPKLLIYGATTLETGVPSRFSGSGSGTDYTLTISSLQPEDFATYYCQQSWNTPWTFGQGTKLEIKRLEGKPIPNPLLGLDSTGSGEDLKNVFPPEVAVFEPSEAEISHTQKATLVCLATGFYPDHVELSWWVNGKEVHSGVSTDPQPLKEQPALNDSRYCLSSRLRVSATFWQNPRNHFRCQVQFYGLSENDEWTQDRAKPVTQIVSAEAWGRADCGSQSFGLLDPKLCYLLDGILFIYGVILTALFLRVKFSRSADAPAYQQGQNQLYNELNLGRREEYDVLDKRRGRDPEMGGKPQRRKNPQEGLYNELQKDKMAEAYSEIGMKGERRRGKGHDGLYQGLSTATKDTYDALHMQALPPRRAKRSGSGATNFSLLKQAGDVEENPGPTSMDWIWRILFLVGAATGAHSGPQVQLQESGGGLAQAGGSLRLSCAASGRTFSMGWFRQAPGKEREFVAAITYSGGSPYYASSVRGRFTISRDNAKNTVYLQMNSLKPEDTAVYYCAANPTYGSDWNAENWGQGTQVTVSSGSGGGGSGGGGSGGGGSFEQVQLQQPGAELVKPGASVKMSCKASGYAFSSYWINWMKQKPGQGLEWIGQIYPGDGDTNYNGKFKGRATLTADTSSSTAYMQLSSLTSEDSAVYFCARSITTVVGCAMDYWGQGTSVTVSSTREQKLISEEDGSGIQNPDPAVYQLRDSKSSDKSVCLFTDFDSQTNVSQSKDSDVYITDKTVLDMRSMDFKSNSAVAWSNKSDFACANAFNNSIIPEDTFFPSPESSCGTQSFGLLDPKLCYLLDGILFIYGVILTALFLRSKRSRLLHSDYMNMTPRRPGPTRKHYQPYAPPRDFAAYRSRVKFSRSADAPAYQQGQNQLYNELNLGRREEYDVLDKRRGRDPEMGGKPQRRKNPQEGLYNELQKDKMAEAYSEIGMKGERRRGKGHDGLYQGLSTATKDTYDALHMQALPPR

SEQ ID NO: 14868 - protein, 1204 aa, Artificial Sequence
  Synthetic Polypeptide
MALPVTALLLPLALLLHAARPQLQLQESGPGLVKPSETLSLTCTVSGDSISSGDYYWGWIRQPPGKGLEWIGHIYYSGVTYYNPSLKSRVTISVDTSRNQFSLKLSSVTAADTAVYYCTREDSSNWRSRGQGTLVTVSSGTGGGGSGGGGSGGGGSEFDIQMTQSPSSLSASVGDRVTITCKASDHINNWLAWYQQKPGQAPKLLIYGATTLETGVPSRFSGSGSGTDYTLTISSLQPEDFATYYCQQSWNTPWTFGQGTKLEIKRLEGKPIPNPLLGLDSTGSGEDLKNVFPPEVAVFEPSEAEISHTQKATLVCLATGFYPDHVELSWWVNGKEVHSGVSTDPQPLKEQPALNDSRYCLSSRLRVSATFWQNPRNHFRCQVQFYGLSENDEWTQDRAKPVTQIVSAEAWGRADCGSQSFGLLDPKLCYLLDGILFIYGVILTALFLRSKRSRLLHSDYMNMTPRRPGPTRKHYQPYAPPRDFAAYRSRVKFSRSADAPAYQQGQNQLYNELNLGRREEYDVLDKRRGRDPEMGGKPQRRKNPQEGLYNELQKDKMAEAYSEIGMKGERRRGKGHDGLYQGLSTATKDTYDALHMQALPPRRAKRSGSGATNFSLLKQAGDVEENPGPTSMDWIWRILFLVGAATGAHSGPQVQLQESGGGLAQAGGSLRLSCAASGRTFSMGWFRQAPGKEREFVAAITYSGGSPYYASSVRGRFTISRDNAKNTVYLQMNSLKPEDTAVYYCAANPTYGSDWNAENWGQGTQVTVSSGSGGGGSGGGGSGGGGSFEQVQLQQPGAELVKPGASVKMSCKASGYAFSSYWINWMKQKPGQGLEWIGQIYPGDGDTNYNGKFKGRATLTADTSSSTAYMQLSSLTSEDSAVYFCARSITTVVGCAMDYWGQGTSVTVSSTREQKLISEEDGSGIQNPDPAVYQLRDSKSSDKSVCLFTDFDSQTNVSQSKDSDVYITDKTVLDMRSMDFKSNSAVAWSNKSDFACANAFNNSIIPEDTFFPSPESSCGTQSFGLLDPKLCYLLDGILFIYGVILTALFLRSKRSRLLHSDYMNMTPRRPGPTRKHYQPYAPPRDFAAYRSRVKFSRSADAPAYQQGQNQLYNELNLGRREEYDVLDKRRGRDPEMGGKPQRRKNPQEGLYNELQKDKMAEAYSEIGMKGERRRGKGHDGLYQGLSTATKDTYDALHMQALPPR

SEQ ID NO: 14869 - protein, 1165 aa, Artificial Sequence
  Synthetic Polypeptide
MALPVTALLLPLALLLHAARPQLQLQESGPGLVKPSETLSLTCTVSGDSISSGDYYWGWIRQPPGKGLEWIGHIYYSGVTYYNPSLKSRVTISVDTSRNQFSLKLSSVTAADTAVYYCTREDSSNWRSRGQGTLVTVSSGTGGGGSGGGGSGGGGSEFDIQMTQSPSSLSASVGDRVTITCKASDHINNWLAWYQQKPGQAPKLLIYGATTLETGVPSRFSGSGSGTDYTLTISSLQPEDFATYYCQQSWNTPWTFGQGTKLEIKRLEGKPIPNPLLGLDSTGSGEDLKNVFPPEVAVFEPSEAEISHTQKATLVCLATGFYPDHVELSWWVNGKEVHSGVSTDPQPLKEQPALNDSRYCLSSRLRVSATFWQNPRNHFRCQVQFYGLSENDEWTQDRAKPVTQIVSAEAWGRADCGSQSFGLLDPKLCYLLDGILFIYGVILTALFLRVKFSRSADAPAYQQGQNQLYNELNLGRREEYDVLDKRRGRDPEMGGKPQRRKNPQEGLYNELQKDKMAEAYSEIGMKGERRRGKGHDGLYQGLSTATKDTYDALHMQALPPRRAKRSGSGATNFSLLKQAGDVEENPGPTSMDWIWRILFLVGAATGAHSGPQVQLQESGGGLAQAGGSLRLSCAASGRTFSMGWFRQAPGKEREFVAAITYSGGSPYYASSVRGRFTISRDNAKNTVYLQMNSLKPEDTAVYYCAANPTYGSDWNAENWGQGTQVTVSSGSGGGGSGGGGSGGGGSFEQVQLQQPGAELVKPGASVKMSCKASGYAFSSYWINWMKQKPGQGLEWIGQIYPGDGDTNYNGKFKGRATLTADTSSSTAYMQLSSLTSEDSAVYFCARSITTVVGCAMDYWGQGTSVTVSSTREQKLISEEDLGSGIQNPDPAVYQLRDSKSSDKSVCLFTDFDSQTNVSQSKDSDVYITDKTVLDMRSMDFKSNSAVAWSNKSDFACANAFNNSIIPEDTFFPSPESSCGTQSFGLLDPKLCYLLDGILFIYGVILTALFLKRGRKKLLYIFKQPFMRPVQTTQEEDGCSCRFPEEEEGGCELRVKFSRSADAPAYQQGQNQLYNELNLGRREEYDVLDKRRGRDPEMGGKPQRRKNPQEGLYNELQKDKMAEAYSEIGMKGERRRGKGHDGLYQGLSTATKDTYDALHMQALPPR

SEQ ID NO: 14870 - protein, 1207 aa, Artificial Sequence
  Synthetic Polypeptide
MALPVTALLLPLALLLHAARPQLQLQESGPGLVKPSETLSLTCTVSGDSISSGDYYWGWIRQPPGKGLEWIGHIYYSGVTYYNPSLKSRVTISVDTSRNQFSLKLSSVTAADTAVYYCTREDSSNWRSRGQGTLVTVSSGTGGGGSGGGGSGGGGSEFDIQMTQSPSSLSASVGDRVTITCKASDHINNWLAWYQQKPGQAPKLLIYGATTLETGVPSRFSGSGSGTDYTLTISSLQPEDFATYYCQQSWNTPWTFGQGTKLEIKRLEGKPIPNPLLGLDSTGSGEDLKNVFPPEVAVFEPSEAEISHTQKATLVCLATGFYPDHVELSWWVNGKEVHSGVSTDPQPLKEQPALNDSRYCLSSRLRVSATFWQNPRNHFRCQVQFYGLSENDEWTQDRAKPVTQIVSAEAWGRADCGSQSFGLLDPKLCYLLDGILFIYGVILTALFLKRGRKKLLYIFKQPFMRPVQTTQEEDGCSCRFPEEEEGGCELRVKFSRSADAPAYQQGQNQLYNELNLGRREEYDVLDKRRGRDPEMGGKPQRRKNPQEGLYNELQKDKMAEAYSEIGMKGERRRGKGHDGLYQGLSTATKDTYDALHMQALPPRRAKRSGSGATNFSLLKQAGDVEENPGPTSMDWIWRILFLVGAATGAHSGPQVQLQESGGGLAQAGGSLRLSCAASGRTFSMGWFRQAPGKEREFVAAITYSGGSPYYASSVRGRFTISRDNAKNTVYLQMNSLKPEDTAVYYCAANPTYGSDWNAENWGQGTQVTVSSGSGGGGSGGGGSGGGGSFEQVQLQQPGAELVKPGASVKMSCKASGYAFSSYWINWMKQKPGQGLEWIGQIYPGDGDTNYNGKFKGRATLTADTSSSTAYMQLSSLTSEDSAVYFCARSITTVVGCAMDYWGQGTSVTVSSTREQKLISEEDLGSGIQNPDPAVYQLRDSKSSDKSVCLFTDFDSQTNVSQSKDSDVYITDKTVLDMRSMDFKSNSAVAWSNKSDFACANAFNNSIIPEDTFFPSPESSCGTQSFGLLDPKLCYLLDGILFIYGVILTALFLKRGRKKLLYIFKQPFMRPVQTTQEEDGCSCRFPEEEEGGCELRVKFSRSADAPAYQQGQNQLYNELNLGRREEYDVLDKRRGRDPEMGGKPQRRKNPQEGLYNELQKDKMAEAYSEIGMKGERRRGKGHDGLYQGLSTATKDTYDALHMQALPPR

SEQ ID NO: 14871 - protein, 1097 aa, Artificial Sequence
  Synthetic Polypeptide
MALPVTALLLPLALLLHAARPQLQLQESGPGLVKPSETLSLTCTVSGDSISSGDYYWGWIRQPPGKGLEWIGHIYYSGVTYYNPSLKSRVTISVDTSRNQFSLKLSSVTAADTAVYYCTREDSSNWRSRGQGTLVTVSSGTGGGGSGGGGSGGGGSEFDIQMTQSPSSLSASVGDRVTITCKASDHINNWLAWYQQKPGQAPKLLIYGATTLETGVPSRFSGSGSGTDYTLTISSLQPEDFATYYCQQSWNTPWTFGQGTKLEIKRLEQSFGLLDPKLCYLLDGILFIYGVILTALFLRVKFSRSADAPAYQQGQNQLYNELNLGRREEYDVLDKRRGRDPEMGGKPQRRKNPQEGLYNELQKDKMAEAYSEIGMKGERRRGKGHDGLYQGLSTATKDTYDALHMQALPPRRAKRSGSGATNFSLLKQAGDVEENPGPTSMDWIWRILFLVGAATGAHSGPQVQLQESGGGLAQAGGSLRLSCAASGRTFSMGWFRQAPGKEREFVAAITYSGGSPYYASSVRGRFTISRDNAKNTVYLQMNSLKPEDTAVYYCAANPTYGSDWNAENWGQGTQVTVSSGSGGGGSGGGGSGGGGSFEQVQLQQPGAELVKPGASVKMSCKASGYAFSSYWINWMKQKPGQGLEWIGQIYPGDGDTNYNGKFKGRATLTADTSSSTAYMQLSSLTSEDSAVYFCARSITTVVGCAMDYWGQGTSVTVSSTRQSFGLLDPKLCYLLDGILFIYGVILTALFLRVKFSRSADAPAYQQGQNQLYNELNLGRREEYDVLDKRRGRDPEMGGKPQRRKNPQEGLYNELQKDKMAEAYSEIGMKGERRRGKGHDGLYQGLSTATKDTYDALHMQALPPRRAKRSGSGVKQTLNFDLLKLAGDVESNPGPSRGHMTEYKPTVRLATRDDVPRAVRTLAAAFADYPATRHTVDPDRHIERVTELQELFLTRVGLDIGKVWVADDGAAVAVWTTPESVEAGAVFAEIGPRMAELSGSRLAAQQQMEGLLAPHRPKEPAWFLATVGVSPDHQGKGLGSAVVLPGVEAAERAGVPAFLETSAPRNLPFYERLGFTVTADVEVPEGPRTWCMTRKPGA

SEQ ID NO: 14872 - protein, 922 aa, Artificial Sequence
  Synthetic Polypeptide
MALPVTALLLPLALLLHAARPQLQLQESGPGLVKPSETLSLTCTVSGDSISSGDYYWGWIRQPPGKGLEWIGHIYYSGVTYYNPSLKSRVTISVDTSRNQFSLKLSSVTAADTAVYYCTREDSSNWRSRGQGTLVTVSSGTGGGGSGGGGSGGGGSEFDIQMTQSPSSLSASVGDRVTITCKASDHINNWLAWYQQKPGQAPKLLIYGATTLETGVPSRFSGSGSGTDYTLTISSLQPEDFATYYCQQSWNTPWTFGQGTKLEIKRLEGQPKANPTVTLFPPSSEELQANKATLVCLISDFYPGAVTVAWKADGSPVKAGVETTKPSKQSNNKYAASSYLSLTPEQWKSHRSYSCQVTHEGSTVEKTVAPTECSPIKTDVITMDPKDNCSKDANDTLLLQLTNTSAYYMYLLLLLKSVVYFAIITCCLLRRTAFCCNGEKSRAKRSGSGATNFSLLKQAGDVEENPGPTSMDWIWRILFLVGAATGAHSGPQVQLQESGGGLAQAGGSLRLSCAASGRTFSMGWFRQAPGKEREFVAAITYSGGSPYYASSVRGRFTISRDNAKNTVYLQMNSLKPEDTAVYYCAANPTYGSDWNAENWGQGTQVTVSSGSGGGGSGGGGSGGGGSFEQVQLQQPGAELVKPGASVKMSCKASGYAFSSYWINWMKQKPGQGLEWIGQIYPGDGDTNYNGKFKGRATLTADTSSSTAYMQLSSLTSEDSAVYFCARSITTVVGCAMDYWGQGTSVTVSSTRASTKGPSVFPLAPSSKSTSGGTAALGCLVKDYFPEPVTVSWNSGALTSGVHTFPAVLQSSGLYSLSSVVTVPSSSLGTQTYICNVNHKPSNTKVDKRVEPKSCEVKTDSTDHVKPKETENTKQPSKSCHKPKAIVHTEKVNMMSLTVLGLRMLFAKTVAVNFLLTAKLFFL

SEQ ID NO: 14873 - protein, 900 aa, Artificial Sequence
  Synthetic Polypeptide
MALPVTALLLPLALLLHAARPQLQLQESGPGLVKPSETLSLTCTVSGDSISSGDYYWGWIRQPPGKGLEWIGHIYYSGVTYYNPSLKSRVTISVDTSRNQFSLKLSSVTAADTAVYYCTREDSSNWRSRGQGTLVTVSSGTGGGGSGGGGSGGGGSEFDIQMTQSPSSLSASVGDRVTITCKASDHINNWLAWYQQKPGQAPKLLIYGATTLETGVPSRFSGSGSGTDYTLTISSLQPEDFATYYCQQSWNTPWTFGQGTKLEIKRLEGQPKANPTVTLFPPSSEELQANKATLVCLISDFYPGAVTVAWKADGSPVKAGVETTKPSKQSNNKYAASSYLSLTPEQWKSHRSYSCQVTHEGSTVEKTVAPTECSGRADCGITSASYHQGVLSATILYEILLGKATLYAVLVSALVLMAMVKRKDSRGRAKRSGSGATNFSLLKQAGDVEENPGPTSMDWIWRILFLVGAATGAHSGPQVQLQESGGGLAQAGGSLRLSCAASGRTFSMGWFRQAPGKEREFVAAITYSGGSPYYASSVRGRFTISRDNAKNTVYLQMNSLKPEDTAVYYCAANPTYGSDWNAENWGQGTQVTVSSGSGGGGSGGGGSGGGGSFEQVQLQQPGAELVKPGASVKMSCKASGYAFSSYWINWMKQKPGQGLEWIGQIYPGDGDTNYNGKFKGRATLTADTSSSTAYMQLSSLTSEDSAVYFCARSITTVVGCAMDYWGQGTSVTVSSTRASTKGPSVFPLAPSSKSTSGGTAALGCLVKDYFPEPVTVSWNSGALTSGVHTFPAVLQSSGLYSLSSVVTVPSSSLGTQTYICNVNHKPSNTKVDKRVEPKSCIPEDTFFPSSDVPCDVKLVEKSFETDTNLNFQNLSVIGFRILLLKVAGFNLLMTLRLWSS

SEQ ID NO: 14874 - protein, 900 aa, Artificial Sequence
  Synthetic Polypeptide
MALPVTALLLPLALLLHAARPQLQLQESGPGLVKPSETLSLTCTVSGDSISSGDYYWGWIRQPPGKGLEWIGHIYYSGVTYYNPSLKSRVTISVDTSRNQFSLKLSSVTAADTAVYYCTREDSSNWRSRGQGTLVTVSSGTGGGGSGGGGSGGGGSEFDIQMTQSPSSLSASVGDRVTITCKASDHINNWLAWYQQKPGQAPKLLIYGATTLETGVPSRFSGSGSGTDYTLTISSLQPEDFATYYCQQSWNTPWTFGQGTKLEIKRLEGQPKANPTVTLFPPSSEELQANKATLVCLISDFYPGAVTVAWKADGSPVKAGVETTKPSKQSNNKYAASSYLSLTPEQWKSHRSYSCQVTHEGSTVEKTVAPTECSGRADCGFTSESYQQGVLSATILYEILLGKATLYAVLVSALVLMAMVKRKDSRGRAKRSGSGATNFSLLKQAGDVEENPGPTSMDWIWRILFLVGAATGAHSGPQVQLQESGGGLAQAGGSLRLSCAASGRTFSMGWFRQAPGKEREFVAAITYSGGSPYYASSVRGRFTISRDNAKNTVYLQMNSLKPEDTAVYYCAANPTYGSDWNAENWGQGTQVTVSSGSGGGGSGGGGSGGGGSFEQVQLQQPGAELVKPGASVKMSCKASGYAFSSYWINWMKQKPGQGLEWIGQIYPGDGDTNYNGKFKGRATLTADTSSSTAYMQLSSLTSEDSAVYFCARSITTVVGCAMDYWGQGTSVTVSSTRASTKGPSVFPLAPSSKSTSGGTAALGCLVKDYFPEPVTVSWNSGALTSGVHTFPAVLQSSGLYSLSSVVTVPSSSLGTQTYICNVNHKPSNTKVDKRVEPKSCIPEDTFFPSPESSCDVKLVEKSFETDTNLNFQNLSVIGFRILLLKVAGFNLLMTLRLWSS

SEQ ID NO: 14875 - protein, 866 aa, Artificial Sequence
  Synthetic Polypeptide
MALPVTALLLPLALLLHAARPQLQLQESGPGLVKPSETLSLTCTVSGDSISSGDYYWGWIRQPPGKGLEWIGHIYYSGVTYYNPSLKSRVTISVDTSRNQFSLKLSSVTAADTAVYYCTREDSSNWRSRGQGTLVTVSSLEGQPKANPTVTLFPPSSEELQANKATLVCLISDFYPGAVTVAWKADGSPVKAGVETTKPSKQSNNKYAASSYLSLTPEQWKSHRSYSCQVTHEGSTVEKTVAPTECSGRADCGFTSESYQQGVLSATILYEILLGKATLYAVLVSALVLMAMVKRKDSRGRAKRSGSGATNFSLLKQAGDVEENPGPTSMDWIWRILFLVGAATGAHSGPQVQLQESGGGLAQAGGSLRLSCAASGRTFSMGWFRQAPGKEREFVAAITYSGGSPYYASSVRGRFTISRDNAKNTVYLQMNSLKPEDTAVYYCAANPTYGSDWNAENWGQGTQVTVSSTRASTKGPSVFPLAPSSKSTSGGTAALGCLVKDYFPEPVTVSWNSGALTSGVHTFPAVLQSSGLYSLSSVVTVPSSSLGTQTYICNVNHKPSNTKVDKRVEPKSCIPEDTFFPSPESSCDVKLVEKSFETDTNLNFQNLSVIGFRILLLKVAGFNLLMTLRLWSSRAKRSGSGVKQTLNFDLLKLAGDVESNPGPSRGHMTEYKPTVRLATRDDVPRAVRTLAAAFADYPATRHTVDPDRHIERVTELQELFLTRVGLDIGKVWVADDGAAVAVWTTPESVEAGAVFAEIGPRMAELSGSRLAAQQQMEGLLAPHRPKEPAWFLATVGVSPDHQGKGLGSAVVLPGVEAAERAGVPAFLETSAPRNLPFYERLGFTVTADVEVPEGPRTWCMTRKPGA

SEQ ID NO: 14876 - protein, 633 aa, Artificial Sequence
  Synthetic Polypeptide
MALPVTALLLPLALLLHAARPQLQLQESGPGLVKPSETLSLTCTVSGDSISSGDYYWGWIRQPPGKGLEWIGHIYYSGVTYYNPSLKSRVTISVDTSRNQFSLKLSSVTAADTAVYYCTREDSSNWRSRGQGTLVTVSSLEGQPKANPTVTLFPPSSEELQANKATLVCLISDFYPGAVTVAWKADGSPVKAGVETTKPSKQSNNKYAASSYLSLTPEQWKSHRSYSCQVTHEGSTVEKTVAPTECSGRADCGFTSESYQQGVLSATILYEILLGKATLYAVLVSALVLMAMVKRKDSRGRAKRSGSGATNFSLLKQAGDVEENPGPTSMDWIWRILFLVGAATGAHSGPQVQLQESGGGLAQAGGSLRLSCAASGRTFSMGWFRQAPGKEREFVAAITYSGGSPYYASSVRGRFTISRDNAKNTVYLQMNSLKPEDTAVYYCAANPTYGSDWNAENWGQGTQVTVSSTRASTKGPSVFPLAPSSKSTSGGTAALGCLVKDYFPEPVTVSWNSGALTSGVHTFPAVLQSSGLYSLSSVVTVPSSSLGTQTYICNVNHKPSNTKVDKRVEPKSCIPEDTFFPSPESSCDVKLVEKSFETDTNLNFQNLSVIGFRILLLKVAGFNLLMTLRLWSS

SEQ ID NO: 14877 - protein, 661 aa, Artificial Sequence
  Synthetic Polypeptide
MALPVTALLLPLALLLHAARPQLQLQESGPGLVKPSETLSLTCTVSGDSISSGDYYWGWIRQPPGKGLEWIGHIYYSGVTYYNPSLKSRVTISVDTSRNQFSLKLSSVTAADTAVYYCTREDSSNWRSRGQGTLVTVSSLEGSGRADCGFTSESYQQGVLSATILYEILLGKATLYAVLVSALVLMAMVKRKDSRGRAKRSGSGATNFSLLKQAGDVEENPGPTSMDWIWRILFLVGAATGAHSGPQVQLQESGGGLAQAGGSLRLSCAASGRTFSMGWFRQAPGKEREFVAAITYSGGSPYYASSVRGRFTISRDNAKNTVYLQMNSLKPEDTAVYYCAANPTYGSDWNAENWGQGTQVTVSSTRGSIPEDTFFPSPESSCDVKLVEKSFETDTNLNFQNLSVIGFRILLLKVAGFNLLMTLRLWSSRAKRSGSGVKQTLNFDLLKLAGDVESNPGPSRGHMTEYKPTVRLATRDDVPRAVRTLAAAFADYPATRHTVDPDRHIERVTELQELFLTRVGLDIGKVWVADDGAAVAVWTTPESVEAGAVFAEIGPRMAELSGSRLAAQQQMEGLLAPHRPKEPAWFLATVGVSPDHQGKGLGSAVVLPGVEAAERAGVPAFLETSAPRNLPFYERLGFTVTADVEVPEGPRTWCMTRKPGA

SEQ ID NO: 14878 - protein, 428 aa, Artificial Sequence
  Synthetic Polypeptide
MALPVTALLLPLALLLHAARPQLQLQESGPGLVKPSETLSLTCTVSGDSISSGDYYWGWIRQPPGKGLEWIGHIYYSGVTYYNPSLKSRVTISVDTSRNQFSLKLSSVTAADTAVYYCTREDSSNWRSRGQGTLVTVSSLEGSGRADCGFTSESYQQGVLSATILYEILLGKATLYAVLVSALVLMAMVKRKDSRGRAKRSGSGATNFSLLKQAGDVEENPGPTSMDWIWRILFLVGAATGAHSGPQVQLQESGGGLAQAGGSLRLSCAASGRTFSMGWFRQAPGKEREFVAAITYSGGSPYYASSVRGRFTISRDNAKNTVYLQMNSLKPEDTAVYYCAANPTYGSDWNAENWGQGTQVTVSSTRGSIPEDTFFPSPESSCDVKLVEKSFETDTNLNFQNLSVIGFRILLLKVAGFNLLMTLRLWSS

SEQ ID NO: 14879 - protein, 670 aa, Artificial Sequence
  Synthetic Polypeptide
MALPVTALLLPLALLLHAARPQLQLQESGPGLVKPSETLSLTCTVSGDSISSGDYYWGWIRQPPGKGLEWIGHIYYSGVTYYNPSLKSRVTISVDTSRNQFSLKLSSVTAADTAVYYCTREDSSNWRSRGQGTLVTVSSLEDKTHTCPPCPAGRADCGFTSESYQQGVLSATILYEILLGKATLYAVLVSALVLMAMVKRKDSRGRAKRSGSGATNFSLLKQAGDVEENPGPTSMDWIWRILFLVGAATGAHSGPQVQLQESGGGLAQAGGSLRLSCAASGRTFSMGWFRQAPGKEREFVAAITYSGGSPYYASSVRGRFTISRDNAKNTVYLQMNSLKPEDTAVYYCAANPTYGSDWNAENWGQGTQVTVSSTRGSIPEDTFFPSPESSCDVKLVEKSFETDTNLNFQNLSVIGFRILLLKVAGFNLLMTLRLWSSRAKRSGSGVKQTLNFDLLKLAGDVESNPGPSRGHMTEYKPTVRLATRDDVPRAVRTLAAAFADYPATRHTVDPDRHIERVTELQELFLTRVGLDIGKVWVADDGAAVAVWTTPESVEAGAVFAEIGPRMAELSGSRLAAQQQMEGLLAPHRPKEPAWFLATVGVSPDHQGKGLGSAVVLPGVEAAERAGVPAFLETSAPRNLPFYERLGFTVTADVEVPEGPRTWCMTRKPGA

SEQ ID NO: 14880 - protein, 670 aa, Artificial Sequence
  Synthetic Polypeptide
MALPVTALLLPLALLLHAARPQLQLQESGPGLVKPSETLSLTCTVSGDSISSGDYYWGWIRQPPGKGLEWIGHIYYSGVTYYNPSLKSRVTISVDTSRNQFSLKLSSVTAADTAVYYCTREDSSNWRSRGQGTLVTVSSLEGSGRADCGFTSESYQQGVLSATILYEILLGKATLYAVLVSALVLMAMVKRKDSRGRAKRSGSGATNFSLLKQAGDVEENPGPTSMDWIWRILFLVGAATGAHSGPQVQLQESGGGLAQAGGSLRLSCAASGRTFSMGWFRQAPGKEREFVAAITYSGGSPYYASSVRGRFTISRDNAKNTVYLQMNSLKPEDTAVYYCAANPTYGSDWNAENWGQGTQVTVSSTRDKTHTCPPCPAIPEDTFFPSPESSCDVKLVEKSFETDTNLNFQNLSVIGFRILLLKVAGFNLLMTLRLWSSRAKRSGSGVKQTLNFDLLKLAGDVESNPGPSRGHMTEYKPTVRLATRDDVPRAVRTLAAAFADYPATRHTVDPDRHIERVTELQELFLTRVGLDIGKVWVADDGAAVAVWTTPESVEAGAVFAEIGPRMAELSGSRLAAQQQMEGLLAPHRPKEPAWFLATVGVSPDHQGKGLGSAVVLPGVEAAERAGVPAFLETSAPRNLPFYERLGFTVTADVEVPEGPRTWCMTRKPGA

SEQ ID NO: 14881 - protein, 679 aa, Artificial Sequence
  Synthetic Polypeptide
MALPVTALLLPLALLLHAARPQLQLQESGPGLVKPSETLSLTCTVSGDSISSGDYYWGWIRQPPGKGLEWIGHIYYSGVTYYNPSLKSRVTISVDTSRNQFSLKLSSVTAADTAVYYCTREDSSNWRSRGQGTLVTVSSLEDKTHTCPPCPAGRADCGFTSESYQQGVLSATILYEILLGKATLYAVLVSALVLMAMVKRKDSRGRAKRSGSGATNFSLLKQAGDVEENPGPTSMDWIWRILFLVGAATGAHSGPQVQLQESGGGLAQAGGSLRLSCAASGRTFSMGWFRQAPGKEREFVAAITYSGGSPYYASSVRGRFTISRDNAKNTVYLQMNSLKPEDTAVYYCAANPTYGSDWNAENWGQGTQVTVSSTRDKTHTCPPCPAIPEDTFFPSPESSCDVKLVEKSFETDTNLNFQNLSVIGFRILLLKVAGFNLLMTLRLWSSRAKRSGSGVKQTLNFDLLKLAGDVESNPGPSRGHMTEYKPTVRLATRDDVPRAVRTLAAAFADYPATRHTVDPDRHIERVTELQELFLTRVGLDIGKVWVADDGAAVAVWTTPESVEAGAVFAEIGPRMAELSGSRLAAQQQMEGLLAPHRPKEPAWFLATVGVSPDHQGKGLGSAVVLPGVEAAERAGVPAFLETSAPRNLPFYERLGFTVTADVEVPEGPRTWCMTRKPGA

SEQ ID NO: 14882 - protein, 446 aa, Artificial Sequence
  Synthetic Polypeptide
MALPVTALLLPLALLLHAARPQLQLQESGPGLVKPSETLSLTCTVSGDSISSGDYYWGWIRQPPGKGLEWIGHIYYSGVTYYNPSLKSRVTISVDTSRNQFSLKLSSVTAADTAVYYCTREDSSNWRSRGQGTLVTVSSLEDKTHTCPPCPAGRADCGFTSESYQQGVLSATILYEILLGKATLYAVLVSALVLMAMVKRKDSRGRAKRSGSGATNFSLLKQAGDVEENPGPTSMDWIWRILFLVGAATGAHSGPQVQLQESGGGLAQAGGSLRLSCAASGRTFSMGWFRQAPGKEREFVAAITYSGGSPYYASSVRGRFTISRDNAKNTVYLQMNSLKPEDTAVYYCAANPTYGSDWNAENWGQGTQVTVSSTRDKTHTCPPCPAIPEDTFFPSPESSCDVKLVEKSFETDTNLNFQNLSVIGFRILLLKVAGFNLLMTLRLWSS

SEQ ID NO: 14883 - protein, 437 aa, Artificial Sequence
  Synthetic Polypeptide
MALPVTALLLPLALLLHAARPQLQLQESGPGLVKPSETLSLTCTVSGDSISSGDYYWGWIRQPPGKGLEWIGHIYYSGVTYYNPSLKSRVTISVDTSRNQFSLKLSSVTAADTAVYYCTREDSSNWRSRGQGTLVTVSSLEGSGRADCGFTSESYQQGVLSATILYEILLGKATLYAVLVSALVLMAMVKRKDSRGRAKRSGSGATNFSLLKQAGDVEENPGPTSMDWIWRILFLVGAATGAHSGPQVQLQESGGGLAQAGGSLRLSCAASGRTFSMGWFRQAPGKEREFVAAITYSGGSPYYASSVRGRFTISRDNAKNTVYLQMNSLKPEDTAVYYCAANPTYGSDWNAENWGQGTQVTVSSTRDKTHTCPPCPAIPEDTFFPSPESSCDVKLVEKSFETDTNLNFQNLSVIGFRILLLKVAGFNLLMTLRLWSS

SEQ ID NO: 14884 - protein, 888 aa, Artificial Sequence
  Synthetic Polypeptide
MALPVTALLLPLALLLHAARPQLQLQESGPGLVKPSETLSLTCTVSGDSISSGDYYWGWIRQPPGKGLEWIGHIYYSGVTYYNPSLKSRVTISVDTSRNQFSLKLSSVTAADTAVYYCTREDSSNWRSRGQGTLVTVSSLEGQPKANPTVTLFPPSSEELQANKATLVCLISDFYPGAVTVAWKADGSPVKAGVETTKPSKQSNNKYAASSYLSLTPEQWKSHRSYSCQVTHEGSTVEKTVAPTECSPIKTDVITMDPKDNCSKDANDTLLLQLTNTSAYYMYLLLLLKSVVYFAIITCCLLRRTAFCCNGEKSRAKRSGSGATNFSLLKQAGDVEENPGPTSMDWIWRILFLVGAATGAHSGPQVQLQESGGGLAQAGGSLRLSCAASGRTFSMGWFRQAPGKEREFVAAITYSGGSPYYASSVRGRFTISRDNAKNTVYLQMNSLKPEDTAVYYCAANPTYGSDWNAENWGQGTQVTVSSTRASTKGPSVFPLAPSSKSTSGGTAALGCLVKDYFPEPVTVSWNSGALTSGVHTFPAVLQSSGLYSLSSVVTVPSSSLGTQTYICNVNHKPSNTKVDKRVEPKSCEVKTDSTDHVKPKETENTKQPSKSCHKPKAIVHTEKVNMMSLTVLGLRMLFAKTVAVNFLLTAKLFFLRAKRSGSGVKQTLNFDLLKLAGDVESNPGPSRGHMTEYKPTVRLATRDDVPRAVRTLAAAFADYPATRHTVDPDRHIERVTELQELFLTRVGLDIGKVWVADDGAAVAVWTTPESVEAGAVFAEIGPRMAELSGSRLAAQQQMEGLLAPHRPKEPAWFLATVGVSPDHQGKGLGSAVVLPGVEAAERAGVPAFLETSAPRNLPFYERLGFTVTADVEVPEGPRTWCMTRKPGA

SEQ ID NO: 14885 - protein, 655 aa, Artificial Sequence
  Synthetic Polypeptide
MALPVTALLLPLALLLHAARPQLQLQESGPGLVKPSETLSLTCTVSGDSISSGDYYWGWIRQPPGKGLEWIGHIYYSGVTYYNPSLKSRVTISVDTSRNQFSLKLSSVTAADTAVYYCTREDSSNWRSRGQGTLVTVSSLEGQPKANPTVTLFPPSSEELQANKATLVCLISDFYPGAVTVAWKADGSPVKAGVETTKPSKQSNNKYAASSYLSLTPEQWKSHRSYSCQVTHEGSTVEKTVAPTECSPIKTDVITMDPKDNCSKDANDTLLLQLTNTSAYYMYLLLLLKSVVYFAIITCCLLRRTAFCCNGEKSRAKRSGSGATNFSLLKQAGDVEENPGPTSMDWIWRILFLVGAATGAHSGPQVQLQESGGGLAQAGGSLRLSCAASGRTFSMGWFRQAPGKEREFVAAITYSGGSPYYASSVRGRFTISRDNAKNTVYLQMNSLKPEDTAVYYCAANPTYGSDWNAENWGQGTQVTVSSTRASTKGPSVFPLAPSSKSTSGGTAALGCLVKDYFPEPVTVSWNSGALTSGVHTFPAVLQSSGLYSLSSVVTVPSSSLGTQTYICNVNHKPSNTKVDKRVEPKSCEVKTDSTDHVKPKETENTKQPSKSCHKPKAIVHTEKVNMMSLTVLGLRMLFAKTVAVNFLLTAKLFFL

SEQ ID NO: 14886 - protein, 683 aa, Artificial Sequence
  Synthetic Polypeptide
MALPVTALLLPLALLLHAARPQLQLQESGPGLVKPSETLSLTCTVSGDSISSGDYYWGWIRQPPGKGLEWIGHIYYSGVTYYNPSLKSRVTISVDTSRNQFSLKLSSVTAADTAVYYCTREDSSNWRSRGQGTLVTVSSLEGSPIKTDVITMDPKDNCSKDANDTLLLQLTNTSAYYMYLLLLLKSVVYFAIITCCLLRRTAFCCNGEKSRAKRSGSGATNFSLLKQAGDVEENPGPTSMDWIWRILFLVGAATGAHSGPQVQLQESGGGLAQAGGSLRLSCAASGRTFSMGWFRQAPGKEREFVAAITYSGGSPYYASSVRGRFTISRDNAKNTVYLQMNSLKPEDTAVYYCAANPTYGSDWNAENWGQGTQVTVSSTRGSEVKTDSTDHVKPKETENTKQPSKSCHKPKAIVHTEKVNMMSLTVLGLRMLFAKTVAVNFLLTAKLFFLRAKRSGSGVKQTLNFDLLKLAGDVESNPGPSRGHMTEYKPTVRLATRDDVPRAVRTLAAAFADYPATRHTVDPDRHIERVTELQELFLTRVGLDIGKVWVADDGAAVAVWTTPESVEAGAVFAEIGPRMAELSGSRLAAQQQMEGLLAPHRPKEPAWFLATVGVSPDHQGKGLGSAVVLPGVEAAERAGVPAFLETSAPRNLPFYERLGFTVTADVEVPEGPRTWCMTRKPGA

SEQ ID NO: 14887 - protein, 450 aa, Artificial Sequence
  Synthetic Polypeptide
MALPVTALLLPLALLLHAARPQLQLQESGPGLVKPSETLSLTCTVSGDSISSGDYYWGWIRQPPGKGLEWIGHIYYSGVTYYNPSLKSRVTISVDTSRNQFSLKLSSVTAADTAVYYCTREDSSNWRSRGQGTLVTVSSLEGSPIKTDVITMDPKDNCSKDANDTLLLQLTNTSAYYMYLLLLLKSVVYFAIITCCLLRRTAFCCNGEKSRAKRSGSGATNFSLLKQAGDVEENPGPTSMDWIWRILFLVGAATGAHSGPQVQLQESGGGLAQAGGSLRLSCAASGRTFSMGWFRQAPGKEREFVAAITYSGGSPYYASSVRGRFTISRDNAKNTVYLQMNSLKPEDTAVYYCAANPTYGSDWNAENWGQGTQVTVSSTRGSEVKTDSTDHVKPKETENTKQPSKSCHKPKAIVHTEKVNMMSLTVLGLRMLFAKTVAVNFLLTAKLFFL

SEQ ID NO: 14888 - protein, 692 aa, Artificial Sequence
  Synthetic Polypeptide
MALPVTALLLPLALLLHAARPQLQLQESGPGLVKPSETLSLTCTVSGDSISSGDYYWGWIRQPPGKGLEWIGHIYYSGVTYYNPSLKSRVTISVDTSRNQFSLKLSSVTAADTAVYYCTREDSSNWRSRGQGTLVTVSSLEDKTHTCPPCPAPIKTDVITMDPKDNCSKDANDTLLLQLTNTSAYYMYLLLLLKSVVYFAIITCCLLRRTAFCCNGEKSRAKRSGSGATNFSLLKQAGDVEENPGPTSMDWIWRILFLVGAATGAHSGPQVQLQESGGGLAQAGGSLRLSCAASGRTFSMGWFRQAPGKEREFVAAITYSGGSPYYASSVRGRFTISRDNAKNTVYLQMNSLKPEDTAVYYCAANPTYGSDWNAENWGQGTQVTVSSTRGSEVKTDSTDHVKPKETENTKQPSKSCHKPKAIVHTEKVNMMSLTVLGLRMLFAKTVAVNFLLTAKLFFLRAKRSGSGVKQTLNFDLLKLAGDVESNPGPSRGHMTEYKPTVRLATRDDVPRAVRTLAAAFADYPATRHTVDPDRHIERVTELQELFLTRVGLDIGKVWVADDGAAVAVWTTPESVEAGAVFAEIGPRMAELSGSRLAAQQQMEGLLAPHRPKEPAWFLATVGVSPDHQGKGLGSAVVLPGVEAAERAGVPAFLETSAPRNLPFYERLGFTVTADVEVPEGPRTWCMTRKPGA

SEQ ID NO: 14889 - protein, 692 aa, Artificial Sequence
  Synthetic Polypeptide
MALPVTALLLPLALLLHAARPQLQLQESGPGLVKPSETLSLTCTVSGDSISSGDYYWGWIRQPPGKGLEWIGHIYYSGVTYYNPSLKSRVTISVDTSRNQFSLKLSSVTAADTAVYYCTREDSSNWRSRGQGTLVTVSSLEGSPIKTDVITMDPKDNCSKDANDTLLLQLTNTSAYYMYLLLLLKSVVYFAIITCCLLRRTAFCCNGEKSRAKRSGSGATNFSLLKQAGDVEENPGPTSMDWIWRILFLVGAATGAHSGPQVQLQESGGGLAQAGGSLRLSCAASGRTFSMGWFRQAPGKEREFVAAITYSGGSPYYASSVRGRFTISRDNAKNTVYLQMNSLKPEDTAVYYCAANPTYGSDWNAENWGQGTQVTVSSTRDKTHTCPPCPAEVKTDSTDHVKPKETENTKQPSKSCHKPKAIVHTEKVNMMSLTVLGLRMLFAKTVAVNFLLTAKLFFLRAKRSGSGVKQTLNFDLLKLAGDVESNPGPSRGHMTEYKPTVRLATRDDVPRAVRTLAAAFADYPATRHTVDPDRHIERVTELQELFLTRVGLDIGKVWVADDGAAVAVWTTPESVEAGAVFAEIGPRMAELSGSRLAAQQQMEGLLAPHRPKEPAWFLATVGVSPDHQGKGLGSAVVLPGVEAAERAGVPAFLETSAPRNLPFYERLGFTVTADVEVPEGPRTWCMTRKPGA

SEQ ID NO: 14890 - protein, 701 aa, Artificial Sequence
  Synthetic Polypeptide
MALPVTALLLPLALLLHAARPQLQLQESGPGLVKPSETLSLTCTVSGDSISSGDYYWGWIRQPPGKGLEWIGHIYYSGVTYYNPSLKSRVTISVDTSRNQFSLKLSSVTAADTAVYYCTREDSSNWRSRGQGTLVTVSSLEDKTHTCPPCPAPIKTDVITMDPKDNCSKDANDTLLLQLTNTSAYYMYLLLLLKSVVYFAIITCCLLRRTAFCCNGEKSRAKRSGSGATNFSLLKQAGDVEENPGPTSMDWIWRILFLVGAATGAHSGPQVQLQESGGGLAQAGGSLRLSCAASGRTFSMGWFRQAPGKEREFVAAITYSGGSPYYASSVRGRFTISRDNAKNTVYLQMNSLKPEDTAVYYCAANPTYGSDWNAENWGQGTQVTVSSTRDKTHTCPPCPAEVKTDSTDHVKPKETENTKQPSKSCHKPKAIVHTEKVNMMSLTVLGLRMLFAKTVAVNFLLTAKLFFLRAKRSGSGVKQTLNFDLLKLAGDVESNPGPSRGHMTEYKPTVRLATRDDVPRAVRTLAAAFADYPATRHTVDPDRHIERVTELQELFLTRVGLDIGKVWVADDGAAVAVWTTPESVEAGAVFAEIGPRMAELSGSRLAAQQQMEGLLAPHRPKEPAWFLATVGVSPDHQGKGLGSAVVLPGVEAAERAGVPAFLETSAPRNLPFYERLGFTVTADVEVPEGPRTWCMTRKPGA

SEQ ID NO: 14891 - protein, 468 aa, Artificial Sequence
  Synthetic Polypeptide
MALPVTALLLPLALLLHAARPQLQLQESGPGLVKPSETLSLTCTVSGDSISSGDYYWGWIRQPPGKGLEWIGHIYYSGVTYYNPSLKSRVTISVDTSRNQFSLKLSSVTAADTAVYYCTREDSSNWRSRGQGTLVTVSSLEDKTHTCPPCPAPIKTDVITMDPKDNCSKDANDTLLLQLTNTSAYYMYLLLLLKSVVYFAIITCCLLRRTAFCCNGEKSRAKRSGSGATNFSLLKQAGDVEENPGPTSMDWIWRILFLVGAATGAHSGPQVQLQESGGGLAQAGGSLRLSCAASGRTFSMGWFRQAPGKEREFVAAITYSGGSPYYASSVRGRFTISRDNAKNTVYLQMNSLKPEDTAVYYCAANPTYGSDWNAENWGQGTQVTVSSTRDKTHTCPPCPAEVKTDSTDHVKPKETENTKQPSKSCHKPKAIVHTEKVNMMSLTVLGLRMLFAKTVAVNFLLTAKLFFL

SEQ ID NO: 14892 - protein, 459 aa, Artificial Sequence
  Synthetic Polypeptide
MALPVTALLLPLALLLHAARPQLQLQESGPGLVKPSETLSLTCTVSGDSISSGDYYWGWIRQPPGKGLEWIGHIYYSGVTYYNPSLKSRVTISVDTSRNQFSLKLSSVTAADTAVYYCTREDSSNWRSRGQGTLVTVSSLEGSPIKTDVITMDPKDNCSKDANDTLLLQLTNTSAYYMYLLLLLKSVVYFAIITCCLLRRTAFCCNGEKSRAKRSGSGATNFSLLKQAGDVEENPGPTSMDWIWRILFLVGAATGAHSGPQVQLQESGGGLAQAGGSLRLSCAASGRTFSMGWFRQAPGKEREFVAAITYSGGSPYYASSVRGRFTISRDNAKNTVYLQMNSLKPEDTAVYYCAANPTYGSDWNAENWGQGTQVTVSSTRDKTHTCPPCPAEVKTDSTDHVKPKETENTKQPSKSCHKPKAIVHTEKVNMMSLTVLGLRMLFAKTVAVNFLLTAKLFFL

SEQ ID NO: 14893 - protein, 675 aa, Artificial Sequence
  Synthetic Polypeptide
MALPVTALLLPLALLLHAARPQLQLQESGPGLVKPSETLSLTCTVSGDSISSGDYYWGWIRQPPGKGLEWIGHIYYSGVTYYNPSLKSRVTISVDTSRNQFSLKLSSVTAADTAVYYCTREDSSNWRSRGQGTLVTVSSLEGSMDPKDNCSKDANDTLLLQLTNTSAYYMYLLLLLKSVVYFAIITCCLLRRTAFCCNGEKSRAKRSGSGATNFSLLKQAGDVEENPGPTSMDWIWRILFLVGAATGAHSGPQVQLQESGGGLAQAGGSLRLSCAASGRTFSMGWFRQAPGKEREFVAAITYSGGSPYYASSVRGRFTISRDNAKNTVYLQMNSLKPEDTAVYYCAANPTYGSDWNAENWGQGTQVTVSSTRGSEVKTDSTDHVKPKETENTKQPSKSCHKPKAIVHTEKVNMMSLTVLGLRMLFAKTVAVNFLLTAKLFFLRAKRSGSGVKQTLNFDLLKLAGDVESNPGPSRGHMTEYKPTVRLATRDDVPRAVRTLAAAFADYPATRHTVDPDRHIERVTELQELFLTRVGLDIGKVWVADDGAAVAVWTTPESVEAGAVFAEIGPRMAELSGSRLAAQQQMEGLLAPHRPKEPAWFLATVGVSPDHQGKGLGSAVVLPGVEAAERAGVPAFLETSAPRNLPFYERLGFTVTADVEVPEGPRTWCMTRKPGA

SEQ ID NO: 14894 - protein, 676 aa, Artificial Sequence
  Synthetic Polypeptide
MALPVTALLLPLALLLHAARPQLQLQESGPGLVKPSETLSLTCTVSGDSISSGDYYWGWIRQPPGKGLEWIGHIYYSGVTYYNPSLKSRVTISVDTSRNQFSLKLSSVTAADTAVYYCTREDSSNWRSRGQGTLVTVSSLEGSPIKTDVITMDPKDNCSKDANDTLLLQLTNTSAYYMYLLLLLKSVVYFAIITCCLLRRTAFCCNGEKSRAKRSGSGATNFSLLKQAGDVEENPGPTSMDWIWRILFLVGAATGAHSGPQVQLQESGGGLAQAGGSLRLSCAASGRTFSMGWFRQAPGKEREFVAAITYSGGSPYYASSVRGRFTISRDNAKNTVYLQMNSLKPEDTAVYYCAANPTYGSDWNAENWGQGTQVTVSSTRGSDHVKPKETENTKQPSKSCHKPKAIVHTEKVNMMSLTVLGLRMLFAKTVAVNFLLTAKLFFLRAKRSGSGVKQTLNFDLLKLAGDVESNPGPSRGHMTEYKPTVRLATRDDVPRAVRTLAAAFADYPATRHTVDPDRHIERVTELQELFLTRVGLDIGKVWVADDGAAVAVWTTPESVEAGAVFAEIGPRMAELSGSRLAAQQQMEGLLAPHRPKEPAWFLATVGVSPDHQGKGLGSAVVLPGVEAAERAGVPAFLETSAPRNLPFYERLGFTVTADVEVPEGPRTWCMTRKPGA

SEQ ID NO: 14895 - protein, 668 aa, Artificial Sequence
  Synthetic Polypeptide
MALPVTALLLPLALLLHAARPQLQLQESGPGLVKPSETLSLTCTVSGDSISSGDYYWGWIRQPPGKGLEWIGHIYYSGVTYYNPSLKSRVTISVDTSRNQFSLKLSSVTAADTAVYYCTREDSSNWRSRGQGTLVTVSSLEGSMDPKDNCSKDANDTLLLQLTNTSAYYMYLLLLLKSVVYFAIITCCLLRRTAFCCNGEKSRAKRSGSGATNFSLLKQAGDVEENPGPTSMDWIWRILFLVGAATGAHSGPQVQLQESGGGLAQAGGSLRLSCAASGRTFSMGWFRQAPGKEREFVAAITYSGGSPYYASSVRGRFTISRDNAKNTVYLQMNSLKPEDTAVYYCAANPTYGSDWNAENWGQGTQVTVSSTRGSDHVKPKETENTKQPSKSCHKPKAIVHTEKVNMMSLTVLGLRMLFAKTVAVNFLLTAKLFFLRAKRSGSGVKQTLNFDLLKLAGDVESNPGPSRGHMTEYKPTVRLATRDDVPRAVRTLAAAFADYPATRHTVDPDRHIERVTELQELFLTRVGLDIGKVWVADDGAAVAVWTTPESVEAGAVFAEIGPRMAELSGSRLAAQQQMEGLLAPHRPKEPAWFLATVGVSPDHQGKGLGSAVVLPGVEAAERAGVPAFLETSAPRNLPFYERLGFTVTADVEVPEGPRTWCMTRKPGA

SEQ ID NO: 14896 - protein, 435 aa, Artificial Sequence
  Synthetic Polypeptide
MALPVTALLLPLALLLHAARPQLQLQESGPGLVKPSETLSLTCTVSGDSISSGDYYWGWIRQPPGKGLEWIGHIYYSGVTYYNPSLKSRVTISVDTSRNQFSLKLSSVTAADTAVYYCTREDSSNWRSRGQGTLVTVSSLEGSMDPKDNCSKDANDTLLLQLTNTSAYYMYLLLLLKSVVYFAIITCCLLRRTAFCCNGEKSRAKRSGSGATNFSLLKQAGDVEENPGPTSMDWIWRILFLVGAATGAHSGPQVQLQESGGGLAQAGGSLRLSCAASGRTFSMGWFRQAPGKEREFVAAITYSGGSPYYASSVRGRFTISRDNAKNTVYLQMNSLKPEDTAVYYCAANPTYGSDWNAENWGQGTQVTVSSTRGSDHVKPKETENTKQPSKSCHKPKAIVHTEKVNMMSLTVLGLRMLFAKTVAVNFLLTAKLFFL

SEQ ID NO: 14897 - protein, 677 aa, Artificial Sequence
  Synthetic Polypeptide
MALPVTALLLPLALLLHAARPQLQLQESGPGLVKPSETLSLTCTVSGDSISSGDYYWGWIRQPPGKGLEWIGHIYYSGVTYYNPSLKSRVTISVDTSRNQFSLKLSSVTAADTAVYYCTREDSSNWRSRGQGTLVTVSSLEDKTHTCPPCPAMDPKDNCSKDANDTLLLQLTNTSAYYMYLLLLLKSVVYFAIITCCLLRRTAFCCNGEKSRAKRSGSGATNFSLLKQAGDVEENPGPTSMDWIWRILFLVGAATGAHSGPQVQLQESGGGLAQAGGSLRLSCAASGRTFSMGWFRQAPGKEREFVAAITYSGGSPYYASSVRGRFTISRDNAKNTVYLQMNSLKPEDTAVYYCAANPTYGSDWNAENWGQGTQVTVSSTRGSDHVKPKETENTKQPSKSCHKPKAIVHTEKVNMMSLTVLGLRMLFAKTVAVNFLLTAKLFFLRAKRSGSGVKQTLNFDLLKLAGDVESNPGPSRGHMTEYKPTVRLATRDDVPRAVRTLAAAFADYPATRHTVDPDRHIERVTELQELFLTRVGLDIGKVWVADDGAAVAVWTTPESVEAGAVFAEIGPRMAELSGSRLAAQQQMEGLLAPHRPKEPAWFLATVGVSPDHQGKGLGSAVVLPGVEAAERAGVPAFLETSAPRNLPFYERLGFTVTADVEVPEGPRTWCMTRKPGA

SEQ ID NO: 14898 - protein, 686 aa, Artificial Sequence
  Synthetic Polypeptide
MALPVTALLLPLALLLHAARPQLQLQESGPGLVKPSETLSLTCTVSGDSISSGDYYWGWIRQPPGKGLEWIGHIYYSGVTYYNPSLKSRVTISVDTSRNQFSLKLSSVTAADTAVYYCTREDSSNWRSRGQGTLVTVSSLEDKTHTCPPCPAMDPKDNCSKDANDTLLLQLTNTSAYYMYLLLLLKSVVYFAIITCCLLRRTAFCCNGEKSRAKRSGSGATNFSLLKQAGDVEENPGPTSMDWIWRILFLVGAATGAHSGPQVQLQESGGGLAQAGGSLRLSCAASGRTFSMGWFRQAPGKEREFVAAITYSGGSPYYASSVRGRFTISRDNAKNTVYLQMNSLKPEDTAVYYCAANPTYGSDWNAENWGQGTQVTVSSTRDKTHTCPPCPADHVKPKETENTKQPSKSCHKPKAIVHTEKVNMMSLTVLGLRMLFAKTVAVNFLLTAKLFFLRAKRSGSGVKQTLNFDLLKLAGDVESNPGPSRGHMTEYKPTVRLATRDDVPRAVRTLAAAFADYPATRHTVDPDRHIERVTELQELFLTRVGLDIGKVWVADDGAAVAVWTTPESVEAGAVFAEIGPRMAELSGSRLAAQQQMEGLLAPHRPKEPAWFLATVGVSPDHQGKGLGSAVVLPGVEAAERAGVPAFLETSAPRNLPFYERLGFTVTADVEVPEGPRTWCMTRKPGA

SEQ ID NO: 14899 - protein, 453 aa, Artificial Sequence
  Synthetic Polypeptide
MALPVTALLLPLALLLHAARPQLQLQESGPGLVKPSETLSLTCTVSGDSISSGDYYWGWIRQPPGKGLEWIGHIYYSGVTYYNPSLKSRVTISVDTSRNQFSLKLSSVTAADTAVYYCTREDSSNWRSRGQGTLVTVSSLEDKTHTCPPCPAMDPKDNCSKDANDTLLLQLTNTSAYYMYLLLLLKSVVYFAIITCCLLRRTAFCCNGEKSRAKRSGSGATNFSLLKQAGDVEENPGPTSMDWIWRILFLVGAATGAHSGPQVQLQESGGGLAQAGGSLRLSCAASGRTFSMGWFRQAPGKEREFVAAITYSGGSPYYASSVRGRFTISRDNAKNTVYLQMNSLKPEDTAVYYCAANPTYGSDWNAENWGQGTQVTVSSTRDKTHTCPPCPADHVKPKETENTKQPSKSCHKPKAIVHTEKVNMMSLTVLGLRMLFAKTVAVNFLLTAKLFFL

SEQ ID NO: 14900 - protein, 300 aa, Artificial Sequence
  Synthetic Polypeptide
MALPVTALLLPLALLLHAARPQLQLQESGPGLVKPSETLSLTCTVSGDSISSGDYYWGWIRQPPGKGLEWIGHIYYSGVTYYNPSLKSRVTISVDTSRNQFSLKLSSVTAADTAVYYCTREDSSNWRSRGQGTLVTVSSLEGQPKANPTVTLFPPSSEELQANKATLVCLISDFYPGAVTVAWKADGSPVKAGVETTKPSKQSNNKYAASSYLSLTPEQWKSHRSYSCQVTHEGSTVEKTVAPTECSGRADCGFTSESYQQGVLSATILYEILLGKATLYAVLVSALVLMAMVKRKDSRG

SEQ ID NO: 14901 - protein, 304 aa, Artificial Sequence
  Synthetic Polypeptide
MDWIWRILFLVGAATGAHSGPQVQLQESGGGLAQAGGSLRLSCAASGRTFSMGWFRQAPGKEREFVAAITYSGGSPYYASSVRGRFTISRDNAKNTVYLQMNSLKPEDTAVYYCAANPTYGSDWNAENWGQGTQVTVSSTRASTKGPSVFPLAPSSKSTSGGTAALGCLVKDYFPEPVTVSWNSGALTSGVHTFPAVLQSSGLYSLSSVVTVPSSSLGTQTYICNVNHKPSNTKVDKRVEPKSCIPEDTFFPSPESSCDVKLVEKSFETDTNLNFQNLSVIGFRILLLKVAGFNLLMTLRLWSS

SEQ ID NO: 14902 - protein, 314 aa, Artificial Sequence
  Synthetic Polypeptide
MALPVTALLLPLALLLHAARPQLQLQESGPGLVKPSETLSLTCTVSGDSISSGDYYWGWIRQPPGKGLEWIGHIYYSGVTYYNPSLKSRVTISVDTSRNQFSLKLSSVTAADTAVYYCTREDSSNWRSRGQGTLVTVSSLEGQPKANPTVTLFPPSSEELQANKATLVCLISDFYPGAVTVAWKADGSPVKAGVETTKPSKQSNNKYAASSYLSLTPEQWKSHRSYSCQVTHEGSTVEKTVAPTECSPIKTDVITMDPKDNCSKDANDTLLLQLTNTSAYYMYLLLLLKSVVYFAIITCCLLRRTAFCCNGEKS

SEQ ID NO: 14903 - protein, 312 aa, Artificial Sequence
  Synthetic Polypeptide
MDWIWRILFLVGAATGAHSGPQVQLQESGGGLAQAGGSLRLSCAASGRTFSMGWFRQAPGKEREFVAAITYSGGSPYYASSVRGRFTISRDNAKNTVYLQMNSLKPEDTAVYYCAANPTYGSDWNAENWGQGTQVTVSSTRASTKGPSVFPLAPSSKSTSGGTAALGCLVKDYFPEPVTVSWNSGALTSGVHTFPAVLQSSGLYSLSSVVTVPSSSLGTQTYICNVNHKPSNTKVDKRVEPKSCEVKTDSTDHVKPKETENTKQPSKSCHKPKAIVHTEKVNMMSLTVLGLRMLFAKTVAVNFLLTAKLFFL

SEQ ID NO: 14904 - protein, 806 aa, Artificial Sequence
  Synthetic Polypeptide
MDWIWRILFLVGAATGAHSLFNQEVQIPLTESYCGPCPKNWICYKNNCYQFFDESKNWYESQASCMSQNASLLKVYSKEDQDLLKLVKSYHWMGLVHIPTNGSWQWEDGSILSPNLLTIIEMQKGDCALYASSFKGYIENCSTPNTYICMQRTVGGGGSGGGGSGGGGSDLFNQEVQIPLTESYCGPCPKNWICYKNNCYQFFDESKNWYESQASCMSQNASLLKVYSKEDQDLLKLVKSYHWMGLVHIPTNGSWQWEDGSILSPNLLTIIEMQKGDCALYASSFKGYIENCSTPNTYICMQRTVGSGGGGSGGGGSGGGGSFEQVQLQQPGAELVKPGASVKMSCKASGYAFSSYWINWMKQKPGQGLEWIGQIYPGDGDTNYNGKFKGRATLTADTSSSTAYMQLSSLTSEDSAVYFCARSITTVVGCAMDYWGQGTSVTVSSGGGGSGGGGSGGGGSDIQMTQSPSSLSASVGDRVTITCKASDHINNWLAWYQQKPGQAPKLLIYGATTLETGVPSRFSGSGSGTDYTLTISSLQPEDFATYYCQQSWNTPWTFGQGTKLEIKRTREQKLISEEDLAKPTTTPAPRPPTPAPTIASQPLSLRPEACRPAAGGAVHTRGLDFACDIYIWAPLAGTCGVLLLSLVITLYCKRGRKKLLYIFKQPFMRPVQTTQEEDGCSCRFPEEEEGGCELRVKFSRSADAPAYQQGQNQLYNELNLGRREEYDVLDKRRGRDPEMGGKPRRKNPQEGLYNELQKDKMAEAYSEIGMKGERRRGKGHDGLYQGLSTATKDTYDALHMQALPPR

SEQ ID NO: 14905 - protein, 1161 aa, Artificial Sequence
  Synthetic Polypeptide
MALPVTALLLPLALLLHAARPDIQMTQSPSSLSASVGDRVTITCKASDHINNWLAWYQQKPGQAPKLLIYGATTLETGVPSRFSGSGSGTDYTLTISSLQPEDFATYYCQQSWNTPWTFGQGTKLEIKRLEIQNPDPAVYQLRDSKSSDKSVCLFTDFDSQTNVSQSKDSDVYITDKCVLDMRSMDFKSNSAVAWSNKSDFACANAFNNSIIPEDTFFPSSDVPCDVKLVEKSFETDTNLNFQNLSVIGFRILLLKVAGFNLLMTLRLWSSRAKRSGSGVKQTLNFDLLKLAGDVESNPGPTSMDWIWRILFLVGAATGAHSGPLFNQEVQIPLTESYCGPCPKNWICYKNNCYQFFDESKNWYESQASCMSQNASLLKVYSKEDQDLLKLVKSYHWMGLVHIPTNGSWQWEDGSILSPNLLTIIEMQKGDCALYASSFKGYIENCSTPNTYICMQRTVGGGGSGGGGSGGGGSDLFNQEVQIPLTESYCGPCPKNWICYKNNCYQFFDESKNWYESQASCMSQNASLLKVYSKEDQDLLKLVKSYHWMGLVHIPTNGSWQWEDGSILSPNLLTIIEMQKGDCALYASSFKGYIENCSTPNTYICMQRTVGSGGGGSGGGGSGGGGSFEQVQLQQPGAELVKPGASVKMSCKASGYAFSSYWINWMKQKPGQGLEWIGQIYPGDGDTNYNGKFKGRATLTADTSSSTAYMQLSSLTSEDSAVYFCARSITTVVGCAMDYWGQGTSVTVSSTREDLKNVFPPEVAVFEPSKAEIAHTQKATLVCLATGFYPDHVELSWWVNGKEVHSGVCTDPQPLKEQPALNDSRYCLSSRLRVSATFWQNPRNHFRCQVQFYGLSENDEWTQDRAKPVTQIVSAEAWGRADCGITSASYHQGVLSATILYEILLGKATLYAVLVSALVLMAMVKRKDSRGRAKRSGSGATNFSLLKQAGDVEENPGPSRGHMTEYKPTVRLATRDDVPRAVRTLAAAFADYPATRHTVDPDRHIERVTELQELFLTRVGLDIGKVWVADDGAAVAVWTTPESVEAGAVFAEIGPRMAELSGSRLAAQQQMEGLLAPHRPKEPAWFLATVGVSPDHQGKGLGSAVVLPGVEAAERAGVPAFLETSAPRNLPFYERLGFTVTADVEVPEGPRTWCMTRKPGA

SEQ ID NO: 14906 - protein, 1160 aa, Artificial Sequence
  Synthetic Polypeptide
MALPVTALLLPLALLLHAARPDIQMTQSPSSLSASVGDRVTITCKASDHINNWLAWYQQKPGQAPKLLIYGATTLETGVPSRFSGSGSGTDYTLTISSLQPEDFATYYCQQSWNTPWTFGQGTKLEIKRLEDLKNVFPPEVAVFEPSKAEIAHTQKATLVCLATGFYPDHVELSWWVNGKEVHSGVCTDPQPLKEQPALNDSRYCLSSRLRVSATFWQNPRNHFRCQVQFYGLSENDEWTQDRAKPVTQIVSAEAWGRADCGITSASYHQGVLSATILYEILLGKATLYAVLVSALVLMAMVKRKDSRGRAKRSGSGATNFSLLKQAGDVEENPGPTSMDWIWRILFLVGAATGAHSGPLFNQEVQIPLTESYCGPCPKNWICYKNNCYQFFDESKNWYESQASCMSQNASLLKVYSKEDQDLLKLVKSYHWMGLVHIPTNGSWQWEDGSILSPNLLTIIEMQKGDCALYASSFKGYIENCSTPNTYICMQRTVGGGGSGGGGSGGGGSDLFNQEVQIPLTESYCGPCPKNWICYKNNCYQFFDESKNWYESQASCMSQNASLLKVYSKEDQDLLKLVKSYHWMGLVHIPTNGSWQWEDGSILSPNLLTIIEMQKGDCALYASSFKGYIENCSTPNTYICMQRTVGSGGGGSGGGGSGGGGSFEQVQLQQPGAELVKPGASVKMSCKASGYAFSSYWINWMKQKPGQGLEWIGQIYPGDGDTNYNGKFKGRATLTADTSSSTAYMQLSSLTSEDSAVYFCARSITTVVGCAMDYWGQGTSVTVSSTRIQNPDPAVYQLRDSKSSDKSVCLFTDFDSQTNVSQSKDSDVYITDKCVLDMRSMDFKSNSAVAWSNKSDFACANAFNNSIIPEDTFFPSSDVPCDVKLVEKSFETDTNLNFQNLSVIGFRILLLKVAGFNLLMTLRLWSSRAKRSGSGVKQTLNFDLLKLAGDVESNPGPSRGHMTEYKPTVRLATRDDVPRAVRTLAAAFADYPATRHTVDPDRHIERVTELQELFLTRVGLDIGKVWVADDGAAVAVWTTPESVEAGAVFAEIGPRMAELSGSRLAAQQQMEGLLAPHRPKEPAWFLATVGVSPDHQGKGLGSAVVLPGVEAAERAGVPAFLETSAPRNLPFYERLGFTVTADVEVPEGPRTWCMTRKPGA

SEQ ID NO: 14907 - protein, 1158 aa, Artificial Sequence
  Synthetic Polypeptide
MALPVTALLLPLALLLHAARPDIQMTQSPSSLSASVGDRVTITCKASDHINNWLAWYQQKPGQAPKLLIYGATTLETGVPSRFSGSGSGTDYTLTISSLQPEDFATYYCQQSWNTPWTFGQGTKLEIKRLEDLKNVFPPEVAVFEPSEAEISHTQKATLVCLATGFYPDHVELSWWVNGKEVHSGVCTDPQPLKEQPALNDSRYCLSSRLRVSATFWQNPRNHFRCQVQFYGLSENDEWTQDRAKPVTQIVSAEAWGRADCGFTSESYQQGVLSATILYEILLGKATLYAVLVSALVLMAMVKRKDSRGRAKRSGSGATNFSLLKQAGDVEENPGPTSMDWIWRILFLVGAATGAHSLFNQEVQIPLTESYCGPCPKNWICYKNNCYQFFDESKNWYESQASCMSQNASLLKVYSKEDQDLLKLVKSYHWMGLVHIPTNGSWQWEDGSILSPNLLTIIEMQKGDCALYASSFKGYIENCSTPNTYICMQRTVGGGGSGGGGSGGGGSDLFNQEVQIPLTESYCGPCPKNWICYKNNCYQFFDESKNWYESQASCMSQNASLLKVYSKEDQDLLKLVKSYHWMGLVHIPTNGSWQWEDGSILSPNLLTIIEMQKGDCALYASSFKGYIENCSTPNTYICMQRTVGSGGGGSGGGGSGGGGSFEQVQLQQPGAELVKPGASVKMSCKASGYAFSSYWINWMKQKPGQGLEWIGQIYPGDGDTNYNGKFKGRATLTADTSSSTAYMQLSSLTSEDSAVYFCARSITTVVGCAMDYWGQGTSVTVSSTRIQNPDPAVYQLRDSKSSDKSVCLFTDFDSQTNVSQSKDSDVYITDKCVLDMRSMDFKSNSAVAWSNKSDFACANAFNNSIIPEDTFFPSPESSCDVKLVEKSFETDTNLNFQNLSVIGFRILLLKVAGFNLLMTLRLWSSRAKRSGSGVKQTLNFDLLKLAGDVESNPGPSRGHMTEYKPTVRLATRDDVPRAVRTLAAAFADYPATRHTVDPDRHIERVTELQELFLTRVGLDIGKVWVADDGAAVAVWTTPESVEAGAVFAEIGPRMAELSGSRLAAQQQMEGLLAPHRPKEPAWFLATVGVSPDHQGKGLGSAVVLPGVEAAERAGVPAFLETSAPRNLPFYERLGFTVTADVEVPEGPRTWCMTRKPGA

SEQ ID NO: 14908 - protein, 927 aa, Artificial Sequence
  Synthetic Polypeptide
MALPVTALLLPLALLLHAARPDIQMTQSPSSLSASVGDRVTITCKASDHINNWLAWYQQKPGQAPKLLIYGATTLETGVPSRFSGSGSGTDYTLTISSLQPEDFATYYCQQSWNTPWTFGQGTKLEIKRLEDLKNVFPPEVAVFEPSEAEISHTQKATLVCLATGFYPDHVELSWWVNGKEVHSGVCTDPQPLKEQPALNDSRYCLSSRLRVSATFWQNPRNHFRCQVQFYGLSENDEWTQDRAKPVTQIVSAEAWGRADCGFTSESYQQGVLSATILYEILLGKATLYAVLVSALVLMAMVKRKDSRGRAKRSGSGATNFSLLKQAGDVEENPGPTSMDWIWRILFLVGAATGAHSGPLFNQEVQIPLTESYCGPCPKNWICYKNNCYQFFDESKNWYESQASCMSQNASLLKVYSKEDQDLLKLVKSYHWMGLVHIPTNGSWQWEDGSILSPNLLTIIEMQKGDCALYASSFKGYIENCSTPNTYICMQRTVGGGGSGGGGSGGGGSDLFNQEVQIPLTESYCGPCPKNWICYKNNCYQFFDESKNWYESQASCMSQNASLLKVYSKEDQDLLKLVKSYHWMGLVHIPTNGSWQWEDGSILSPNLLTIIEMQKGDCALYASSFKGYIENCSTPNTYICMQRTVGSGGGGSGGGGSGGGGSFEQVQLQQPGAELVKPGASVKMSCKASGYAFSSYWINWMKQKPGQGLEWIGQIYPGDGDTNYNGKFKGRATLTADTSSSTAYMQLSSLTSEDSAVYFCARSITTVVGCAMDYWGQGTSVTVSSTRIQNPDPAVYQLRDSKSSDKSVCLFTDFDSQTNVSQSKDSDVYITDKCVLDMRSMDFKSNSAVAWSNKSDFACANAFNNSIIPEDTFFPSPESSCDVKLVEKSFETDTNLNFQNLSVIGFRILLLKVAGFNLLMTLRLWSS

SEQ ID NO: 14909 - protein, 1152 aa, Artificial Sequence
  Synthetic Polypeptide
MALPVTALLLPLALLLHAARPDIQMTQSPSSLSASVGDRVTITCKASDHINNWLAWYQQKPGQAPKLLIYGATTLETGVPSRFSGSGSGTDYTLTISSLQPEDFATYYCQQSWNTPWTFGQGTKLEIKRLEDLKNVFPPEVAVFEPSEAEISHTQKATLVCLATGFYPDHVELSWWVNGKEVHSGVCTDPQPLKEQPALNDSRYCLSSRLRVSATFWQNPRNHFRCQVQFYGLSENDEWTQDRAKPVTQIVSAEAWGRADCGFTSESYQQGVLSATILYEILLGKATLYAVLVSALVLMAMVKRKDSRGRAKRSGSGATNFSLLKQAGDVEENPGPTSMDWIWRILFLVGAATGAHSGPLFNQEVQIPLTESYCGPCPKNWICYKNNCYQFFDESKNWYESQASCMSQNASLLKVYSKEDQDLLKLVKSYHWMGLVHIPTNGSWQWEDGSILSPNLLTIIEMQKGDCALYASSFKGYIENCSTPNTYICMQRTVGGGGSGGGGSGGGGSDLFNQEVQIPLTESYCGPCPKNWICYKNNCYQFFDESKNWYESQASCMSQNASLLKVYSKEDQDLLKLVKSYHWMGLVHIPTNGSWQWEDGSILSPNLLTIIEMQKGDCALYASSFKGYIENCSTPNTYICMQRTVGSGGGGSGGGGSGGGGSFEQVQLQQPGAELVKPGASVKMSCKASGYAFSSYWINWMKQKPGQGLEWIGQIYPGDGDTNYNGKFKGRATLTADTSSSTAYMQLSSLTSEDSAVYFCARSITTVVGCAMDYWGQGTSVTVSSTRIQNPDPAVYQLRDSKSSDKSVCLFTDFDSQTNVSQSKDSDVYITDKCVLDMRSMDFKSNSAVAWSNKSDFACANAFNNSIIPEDTFFPSPESSCDVKLVEKSFETDTNLNFQNLSVIGFRILLLKVAGFNLLMTLRLWSSRAKRSGSGVKQTLNFDLLKLAGDVESNPGPSRGGIHTMATYEVLCEVARKLGTDDREVVLFLLNVFIPQPTLAQLIGALRALKEEGRLTFPLLAECLFRAGRRDLLRDLLHLDPRFLERHLAGTMSYFSPYQLTVLHVDGELCARDIRSLIFLSKDTIGSRSTPQTFLHWVYCMENLDLLGPTDVDALMSMLRSLSRVDLQRQVQTLMGLHLSGPSHSQHYRHTP

SEQ ID NO: 14910 - protein, 931 aa, Artificial Sequence
  Synthetic Polypeptide
MALPVTALLLPLALLLHAARPDIQMTQSPSSLSASVGDRVTITCKASDHINNWLAWYQQKPGQAPKLLIYGATTLETGVPSRFSGSGSGTDYTLTISSLQPEDFATYYCQQSWNTPWTFGQGTKLEIKRLEIQNPDPAVYQLRDSKSSDKSVCLFTDFDSQTNVSQSKDSDVYITDKCVLDMRSMDFKSNSAVAWSNKSDFACANAFNNSIIPEDTFFPSPESSCDVKLVEKSFETDTNLNFQNLSVIGFRILLLKVAGFNLLMTLRLWSSRAKRSGSGVKQTLNFDLLKLAGDVESNPGPTSMDWIWRILFLVGAATGAHSGPLFNQEVQIPLTESYCGPCPKNWICYKNNCYQFFDESKNWYESQASCMSQNASLLKVYSKEDQDLLKLVKSYHWMGLVHIPTNGSWQWEDGSILSPNLLTIIEMQKGDCALYASSFKGYIENCSTPNTYICMQRTVGGGGSGGGGSGGGGSDLFNQEVQIPLTESYCGPCPKNWICYKNNCYQFFDESKNWYESQASCMSQNASLLKVYSKEDQDLLKLVKSYHWMGLVHIPTNGSWQWEDGSILSPNLLTIIEMQKGDCALYASSFKGYIENCSTPNTYICMQRTVGSGGGGSGGGGSGGGGSFEQVQLQQPGAELVKPGASVKMSCKASGYAFSSYWINWMKQKPGQGLEWIGQIYPGDGDTNYNGKFKGRATLTADTSSSTAYMQLSSLTSEDSAVYFCARSITTVVGCAMDYWGQGTSVTVSSTREDLKNVFPPEVAVFEPSEAEISHTQKATLVCLATGFYPDHVELSWWVNGKEVHSGVCTDPQPLKEQPALNDSRYCLSSRLRVSATFWQNPRNHFRCQVQFYGLSENDEWTQDRAKPVTQIVSAEAWGRADCGFTSESYQQGVLSATILYEILLGKATLYAVLVSALVLMAMVKRKDSRG

SEQ ID NO: 14911 - protein, 1153 aa, Artificial Sequence
  Synthetic Polypeptide
MALPVTALLLPLALLLHAARPDIQMTQSPSSLSASVGDRVTITCKASDHINNWLAWYQQKPGQAPKLLIYGATTLETGVPSRFSGSGSGTDYTLTISSLQPEDFATYYCQQSWNTPWTFGQGTKLEIKRLEIQNPDPAVYQLRDSKSSDKSVCLFTDFDSQTNVSQSKDSDVYITDKCVLDMRSMDFKSNSAVAWSNKSDFACANAFNNSIIPEDTFFPSPESSCDVKLVEKSFETDTNLNFQNLSVIGFRILLLKVAGFNLLMTLRLWSSRAKRSGSGVKQTLNFDLLKLAGDVESNPGPTSMDWIWRILFLVGAATGAHSGPLFNQEVQIPLTESYCGPCPKNWICYKNNCYQFFDESKNWYESQASCMSQNASLLKVYSKEDQDLLKLVKSYHWMGLVHIPTNGSWQWEDGSILSPNLLTIIEMQKGDCALYASSFKGYIENCSTPNTYICMQRTVGGGGSGGGGSGGGGSDLFNQEVQIPLTESYCGPCPKNWICYKNNCYQFFDESKNWYESQASCMSQNASLLKVYSKEDQDLLKLVKSYHWMGLVHIPTNGSWQWEDGSILSPNLLTIIEMQKGDCALYASSFKGYIENCSTPNTYICMQRTVGSGGGGSGGGGSGGGGSFEQVQLQQPGAELVKPGASVKMSCKASGYAFSSYWINWMKQKPGQGLEWIGQIYPGDGDTNYNGKFKGRATLTADTSSSTAYMQLSSLTSEDSAVYFCARSITTVVGCAMDYWGQGTSVTVSSTREDLKNVFPPEVAVFEPSEAEISHTQKATLVCLATGFYPDHVELSWWVNGKEVHSGVCTDPQPLKEQPALNDSRYCLSSRLRVSATFWQNPRNHFRCQVQFYGLSENDEWTQDRAKPVTQIVSAEAWGRADCGFTSESYQQGVLSATILYEILLGKATLYAVLVSALVLMAMVKRKDSRGRAKRSGSGATNFSLLKQAGDVEENPGPSRGGIHTMATYEVLCEVARKLGTDDREVVLFLLNVFIPQPTLAQLIGALRALKEEGRLTFPLLAECLFRAGRRDLLRDLLHLDPRFLERHLAGTMSYFSPYQLTVLHVDGELCARDIRSLIFLSKDTIGSRSTPQTFLHWVYCMENLDLLGPTDVDALMSMLRSLSRVDLQRQVQTLMGLHLSGPSHSQHYRHTP

SEQ ID NO: 14912 - protein, 1160 aa, Artificial Sequence
  Synthetic Polypeptide
MALPVTALLLPLALLLHAARPDIQMTQSPSSLSASVGDRVTITCKASDHINNWLAWYQQKPGQAPKLLIYGATTLETGVPSRFSGSGSGTDYTLTISSLQPEDFATYYCQQSWNTPWTFGQGTKLEIKRLEDLKNVFPPEVAVFEPSEAEISHTQKATLVCLATGFYPDHVELSWWVNGKEVHSGVSTDPQPLKEQPALNDSRYCLSSRLRVSATFWQNPRNHFRCQVQFYGLSENDEWTQDRAKPVTQIVSAEAWGRADCGFTSESYQQGVLSATILYEILLGKATLYAVLVSALVLMAMVKRKDSRGRAKRSGSGATNFSLLKQAGDVEENPGPTSMDWIWRILFLVGAATGAHSGPLFNQEVQIPLTESYCGPCPKNWICYKNNCYQFFDESKNWYESQASCMSQNASLLKVYSKEDQDLLKLVKSYHWMGLVHIPTNGSWQWEDGSILSPNLLTIIEMQKGDCALYASSFKGYIENCSTPNTYICMQRTVGGGGSGGGGSGGGGSDLFNQEVQIPLTESYCGPCPKNWICYKNNCYQFFDESKNWYESQASCMSQNASLLKVYSKEDQDLLKLVKSYHWMGLVHIPTNGSWQWEDGSILSPNLLTIIEMQKGDCALYASSFKGYIENCSTPNTYICMQRTVGSGGGGSGGGGSGGGGSFEQVQLQQPGAELVKPGASVKMSCKASGYAFSSYWINWMKQKPGQGLEWIGQIYPGDGDTNYNGKFKGRATLTADTSSSTAYMQLSSLTSEDSAVYFCARSITTVVGCAMDYWGQGTSVTVSSTRIQNPDPAVYQLRDSKSSDKSVCLFTDFDSQTNVSQSKDSDVYITDKTVLDMRSMDFKSNSAVAWSNKSDFACANAFNNSIIPEDTFFPSPESSCDVKLVEKSFETDTNLNFQNLSVIGFRILLLKVAGFNLLMTLRLWSSRAKRSGSGVKQTLNFDLLKLAGDVESNPGPSRGHMTEYKPTVRLATRDDVPRAVRTLAAAFADYPATRHTVDPDRHIERVTELQELFLTRVGLDIGKVWVADDGAAVAVWTTPESVEAGAVFAEIGPRMAELSGSRLAAQQQMEGLLAPHRPKEPAWFLATVGVSPDHQGKGLGSAVVLPGVEAAERAGVPAFLETSAPRNLPFYERLGFTVTADVEVPEGPRTWCMTRKPGA

SEQ ID NO: 14913 - protein, 1242 aa, Artificial Sequence
  Synthetic Polypeptide
MALPVTALLLPLALLLHAARPDIQMTQSPSSLSASVGDRVTITCKASDHINNWLAWYQQKPGQAPKLLIYGATTLETGVPSRFSGSGSGTDYTLTISSLQPEDFATYYCQQSWNTPWTFGQGTKLEIKRLEDLKNVFPPEVAVFEPSEAEISHTQKATLVCLATGFYPDHVELSWWVNGKEVHSGVSTDPQPLKEQPALNDSRYCLSSRLRVSATFWQNPRNHFRCQVQFYGLSENDEWTQDRAKPVTQIVSAEAWGRADCGFTSESYQQGVLSATILYEILLGKATLYAVLVSALVLMAMVKRKDSRGRAKRSGSGATNFSLLKQAGDVEENPGPTSMDWIWRILFLVGAATGAHSGPLFNQEVQIPLTESYCGPCPKNWICYKNNCYQFFDESKNWYESQASCMSQNASLLKVYSKEDQDLLKLVKSYHWMGLVHIPTNGSWQWEDGSILSPNLLTIIEMQKGDCALYASSFKGYIENCSTPNTYICMQRTVGGGGSGGGGSGGGGSDLFNQEVQIPLTESYCGPCPKNWICYKNNCYQFFDESKNWYESQASCMSQNASLLKVYSKEDQDLLKLVKSYHWMGLVHIPTNGSWQWEDGSILSPNLLTIIEMQKGDCALYASSFKGYIENCSTPNTYICMQRTVGSGGGGSGGGGSGGGGSFEQVQLQQPGAELVKPGASVKMSCKASGYAFSSYWINWMKQKPGQGLEWIGQIYPGDGDTNYNGKFKGRATLTADTSSSTAYMQLSSLTSEDSAVYFCARSITTVVGCAMDYWGQGTSVTVSSTREQKLISEEDGSGTPFPSLAPPIMLLVDGKQQMVVVCLVLDVAPPGLDSPIWFSAGNGSALDAFTYGPSPATDGTWTNLAHLSLPSEELASWEPLVCHTGPGAEGHSRSTQPMHLSGEASTARTCPQEPLRGTPGGALWLGVLRLLLFKLLLFDLLLTCSCLCDPAGPLPSPATTTRLRALGSHRLHPATETGGREATSSPRPQPRDRRWGDTPPGRKPGSPVRAKRSGSGVKQTLNFDLLKLAGDVESNPGPSRGHMTEYKPTVRLATRDDVPRAVRTLAAAFADYPATRHTVDPDRHIERVTELQELFLTRVGLDIGKVWVADDGAAVAVWTTPESVEAGAVFAEIGPRMAELSGSRLAAQQQMEGLLAPHRPKEPAWFLATVGVSPDHQGKGLGSAVVLPGVEAAERAGVPAFLETSAPRNLPFYERLGFTVTADVEVPEGPRTWCMTRKPGA

SEQ ID NO: 14914 - protein, 1197 aa, Artificial Sequence
  Synthetic Polypeptide
MALPVTALLLPLALLLHAARPDIQMTQSPSSLSASVGDRVTITCKASDHINNWLAWYQQKPGQAPKLLIYGATTLETGVPSRFSGSGSGTDYTLTISSLQPEDFATYYCQQSWNTPWTFGQGTKLEIKRLEGKPIPNPLLGLDSTGSGDKQLDADVSPKPTIFLPSIAETKLQKAGTYLCLLEKFFPDVIKIHWQEKKSNTILGSQEGNTMKTNDTYMKFSWLTVPEKSLDKEHRCIVRHENNKNGVDQEIIFPPIKTDVITMDPKDNCSKDANDTLLLQLTNTSAYYMYLLLLLKSVVYFAIITCCLLRRTAFCCNGEKSRAKRSGSGATNFSLLKQAGDVEENPGPTSMDWIWRILFLVGAATGAHSGPLFNQEVQIPLTESYCGPCPKNWICYKNNCYQFFDESKNWYESQASCMSQNASLLKVYSKEDQDLLKLVKSYHWMGLVHIPTNGSWQWEDGSILSPNLLTIIEMQKGDCALYASSFKGYIENCSTPNTYICMQRTVGGGGSGGGGSGGGGSDLFNQEVQIPLTESYCGPCPKNWICYKNNCYQFFDESKNWYESQASCMSQNASLLKVYSKEDQDLLKLVKSYHWMGLVHIPTNGSWQWEDGSILSPNLLTIIEMQKGDCALYASSFKGYIENCSTPNTYICMQRTVGSGGGGSGGGGSGGGGSFEQVQLQQPGAELVKPGASVKMSCKASGYAFSSYWINWMKQKPGQGLEWIGQIYPGDGDTNYNGKFKGRATLTADTSSSTAYMQLSSLTSEDSAVYFCARSITTVVGCAMDYWGQGTSVTVSSTREQKLISEEDGSGSQPHTKPSVFVMKNGTNVACLVKEFYPKDIRINLVSSKKITEFDPAIVISPSGKYNAVKLGKYEDSNSVTCSVQHDNKTVHSTDFEVKTDSTDHVKPKETENTKQPSKSCHKPKAIVHTEKVNMMSLTVLGLRMLFAKTVAVNFLLTAKLFFLRAKRSGSGVKQTLNFDLLKLAGDVESNPGPSRGHMTEYKPTVRLATRDDVPRAVRTLAAAFADYPATRHTVDPDRHIERVTELQELFLTRVGLDIGKVWVADDGAAVAVWTTPESVEAGAVFAEIGPRMAELSGSRLAAQQQMEGLLAPHRPKEPAWFLATVGVSPDHQGKGLGSAVVLPGVEAAERAGVPAFLETSAPRNLPFYERLGFTVTADVEVPEGPRTWCMTRKPGA

SEQ ID NO: 14915 - protein, 935 aa, Artificial Sequence
  Synthetic Polypeptide
MALPVTALLLPLALLLHAARPDIQMTQSPSSLSASVGDRVTITCKASDHINNWLAWYQQKPGQAPKLLIYGATTLETGVPSRFSGSGSGTDYTLTISSLQPEDFATYYCQQSWNTPWTFGQGTKLEIKRLESQPHTKPSVFVMKNGTNVACLVKEFYPKDIRINLVSSKKITEFDPAIVISPSGKYNAVKLGKYEDSNSVTCSVQHDNKTVHSTDFEVKTDSTDHVKPKETENTKQPSKSCHKPKAIVHTEKVNMMSLTVLGLRMLFAKTVAVNFLLTAKLFFLRAKRSGSGATNFSLLKQAGDVEENPGPTSMDWIWRILFLVGAATGAHSGPLFNQEVQIPLTESYCGPCPKNWICYKNNCYQFFDESKNWYESQASCMSQNASLLKVYSKEDQDLLKLVKSYHWMGLVHIPTNGSWQWEDGSILSPNLLTIIEMQKGDCALYASSFKGYIENCSTPNTYICMQRTVGGGGSGGGGSGGGGSDLFNQEVQIPLTESYCGPCPKNWICYKNNCYQFFDESKNWYESQASCMSQNASLLKVYSKEDQDLLKLVKSYHWMGLVHIPTNGSWQWEDGSILSPNLLTIIEMQKGDCALYASSFKGYIENCSTPNTYICMQRTVGSGGGGSGGGGSGGGGSFEQVQLQQPGAELVKPGASVKMSCKASGYAFSSYWINWMKQKPGQGLEWIGQIYPGDGDTNYNGKFKGRATLTADTSSSTAYMQLSSLTSEDSAVYFCARSITTVVGCAMDYWGQGTSVTVSSTRDKQLDADVSPKPTIFLPSIAETKLQKAGTYLCLLEKFFPDVIKIHWQEKKSNTILGSQEGNTMKTNDTYMKFSWLTVPEKSLDKEHRCIVRHENNKNGVDQEIIFPPIKTDVITMDPKDNCSKDANDTLLLQLTNTSAYYMYLLLLLKSVVYFAIITCCLLRRTAFCCNGEKS

SEQ ID NO: 14916 - protein, 1337 aa, Artificial Sequence
  Synthetic Polypeptide
MALPVTALLLPLALLLHAARPDIQMTQSPSSLSASVGDRVTITCKASDHINNWLAWYQQKPGQAPKLLIYGATTLETGVPSRFSGSGSGTDYTLTISSLQPEDFATYYCQQSWNTPWTFGQGTKLEIKRGQPKANPTVTLFPPSSEELQANKATLVCLISDFYPGAVTVAWKADGSPVKAGVETTKPSKQSNNKYAASSYLSLTPEQWKSHRSYSCQVTHEGSTVEKTVAPTECSGSQSFGLLDPKLCYLLDGILFIYGVILTALFLRVKFSRSADAPAYQQGQNQLYNELNLGRREEYDVLDKRRGRDPEMGGKPQRRKNPQEGLYNELQKDKMAEAYSEIGMKGERRRGKGHDGLYQGLSTATKDTYDALHMQALPPRRAKRSGSGATNFSLLKQAGDVEENPGPTSMDWIWRILFLVGAATGAHSGPLFNQEVQIPLTESYCGPCPKNWICYKNNCYQFFDESKNWYESQASCMSQNASLLKVYSKEDQDLLKLVKSYHWMGLVHIPTNGSWQWEDGSILSPNLLTIIEMQKGDCALYASSFKGYIENCSTPNTYICMQRTVGGGGSGGGGSGGGGSDLFNQEVQIPLTESYCGPCPKNWICYKNNCYQFFDESKNWYESQASCMSQNASLLKVYSKEDQDLLKLVKSYHWMGLVHIPTNGSWQWEDGSILSPNLLTIIEMQKGDCALYASSFKGYIENCSTPNTYICMQRTVGSGGGGSGGGGSGGGGSFEQVQLQQPGAELVKPGASVKMSCKASGYAFSSYWINWMKQKPGQGLEWIGQIYPGDGDTNYNGKFKGRATLTADTSSSTAYMQLSSLTSEDSAVYFCARSITTVVGCAMDYWGQGTSVTVSSASTKGPSVFPLAPSSKSTSGGTAALGCLVKDYFPEPVTVSWNSGALTSGVHTFPAVLQSSGLYSLSSVVTVPSSSLGTQTYICNVNHKPSNTKVDKRVEPKSCGTQSFGLLDPKLCYLLDGILFIYGVILTALFLRVKFSRSADAPAYQQGQNQLYNELNLGRREEYDVLDKRRGRDPEMGGKPQRRKNPQEGLYNELQKDKMAEAYSEIGMKGERRRGKGHDGLYQGLSTATKDTYDALHMQALPPRRAKRSGSGVKQTLNFDLLKLAGDVESNPGPSRGHMTEYKPTVRLATRDDVPRAVRTLAAAFADYPATRHTVDPDRHIERVTELQELFLTRVGLDIGKVWVADDGAAVAVWTTPESVEAGAVFAEIGPRMAELSGSRLAAQQQMEGLLAPHRPKEPAWFLATVGVSPDHQGKGLGSAVVLPGVEAAERAGVPAFLETSAPRNLPFYERLGFTVTADVEVPEGPRTWCMTRKPGA

SEQ ID NO: 14917 - protein, 1123 aa, Artificial Sequence
  Synthetic Polypeptide
MALPVTALLLPLALLLHAARPDIQMTQSPSSLSASVGDRVTITCKASDHINNWLAWYQQKPGQAPKLLIYGATTLETGVPSRFSGSGSGTDYTLTISSLQPEDFATYYCQQSWNTPWTFGQGTKLEIKRLEDLKNVFPPEVAVFEPSEAEISHTQKATLVCLATGFYPDHVELSWWVNGKEVHSGVSTDPQPLKEQPALNDSRYCLSSRLRVSATFWQNPRNHFRCQVQFYGLSENDEWTQDRAKPVTQIVSAEAWGRADCGSQSFGLLDPKLCYLLDGILFIYGVILTALFLRVKFSRSADAPAYQQGQNQLYNELNLGRREEYDVLDKRRGRDPEMGGKPQRRKNPQEGLYNELQKDKMAEAYSEIGMKGERRRGKGHDGLYQGLSTATKDTYDALHMQALPPRRAKRSGSGATNFSLLKQAGDVEENPGPTSMDWIWRILFLVGAATGAHSGPLFNQEVQIPLTESYCGPCPKNWICYKNNCYQFFDESKNWYESQASCMSQNASLLKVYSKEDQDLLKLVKSYHWMGLVHIPTNGSWQWEDGSILSPNLLTIIEMQKGDCALYASSFKGYIENCSTPNTYICMQRTVGGGGSGGGGSGGGGSDLFNQEVQIPLTESYCGPCPKNWICYKNNCYQFFDESKNWYESQASCMSQNASLLKVYSKEDQDLLKLVKSYHWMGLVHIPTNGSWQWEDGSILSPNLLTIIEMQKGDCALYASSFKGYIENCSTPNTYICMQRTVGSGGGGSGGGGSGGGGSFEQVQLQQPGAELVKPGASVKMSCKASGYAFSSYWINWMKQKPGQGLEWIGQIYPGDGDTNYNGKFKGRATLTADTSSSTAYMQLSSLTSEDSAVYFCARSITTVVGCAMDYWGQGTSVTVSSTRIQNPDPAVYQLRDSKSSDKSVCLFTDFDSQTNVSQSKDSDVYITDKTVLDMRSMDFKSNSAVAWSNKSDFACANAFNNSIIPEDTFFPSPESSCGTQSFGLLDPKLCYLLDGILFIYGVILTALFLRVKFSRSADAPAYQQGQNQLYNELNLGRREEYDVLDKRRGRDPEMGGKPQRRKNPQEGLYNELQKDKMAEAYSEIGMKGERRRGKGHDGLYQGLSTATKDTYDALHMQALPPR

SEQ ID NO: 14918 - protein, 1123 aa, Artificial Sequence
  Synthetic Polypeptide
MALPVTALLLPLALLLHAARPDIQMTQSPSSLSASVGDRVTITCKASDHINNWLAWYQQKPGQAPKLLIYGATTLETGVPSRFSGSGSGTDYTLTISSLQPEDFATYYCQQSWNTPWTFGQGTKLEIKRLEDLKNVFPPEVAVFEPSKAEIAHTQKATLVCLATGFYPDHVELSWWVNGKEVHSGVCTDPQPLKEQPALNDSRYCLSSRLRVSATFWQNPRNHFRCQVQFYGLSENDEWTQDRAKPVTQIVSAEAWGRADCGSQSFGLLDPKLCYLLDGILFIYGVILTALFLRVKFSRSADAPAYQQGQNQLYNELNLGRREEYDVLDKRRGRDPEMGGKPQRRKNPQEGLYNELQKDKMAEAYSEIGMKGERRRGKGHDGLYQGLSTATKDTYDALHMQALPPRRAKRSGSGATNFSLLKQAGDVEENPGPTSMDWIWRILFLVGAATGAHSGPLFNQEVQIPLTESYCGPCPKNWICYKNNCYQFFDESKNWYESQASCMSQNASLLKVYSKEDQDLLKLVKSYHWMGLVHIPTNGSWQWEDGSILSPNLLTIIEMQKGDCALYASSFKGYIENCSTPNTYICMQRTVGGGGSGGGGSGGGGSDLFNQEVQIPLTESYCGPCPKNWICYKNNCYQFFDESKNWYESQASCMSQNASLLKVYSKEDQDLLKLVKSYHWMGLVHIPTNGSWQWEDGSILSPNLLTIIEMQKGDCALYASSFKGYIENCSTPNTYICMQRTVGSGGGGSGGGGSGGGGSFEQVQLQQPGAELVKPGASVKMSCKASGYAFSSYWINWMKQKPGQGLEWIGQIYPGDGDTNYNGKFKGRATLTADTSSSTAYMQLSSLTSEDSAVYFCARSITTVVGCAMDYWGQGTSVTVSSTRIQNPDPAVYQLRDSKSSDKSVCLFTDFDSQTNVSQSKDSDVYITDKCVLDMRSMDFKSNSAVAWSNKSDFACANAFNNSIIPEDTFFPSSDVPCGTQSFGLLDPKLCYLLDGILFIYGVILTALFLRVKFSRSADAPAYQQGQNQLYNELNLGRREEYDVLDKRRGRDPEMGGKPQRRKNPQEGLYNELQKDKMAEAYSEIGMKGERRRGKGHDGLYQGLSTATKDTYDALHMQALPPR

SEQ ID NO: 14919 - protein, 1194 aa, Artificial Sequence
  Synthetic Polypeptide
MALPVTALLLPLALLLHAARPDIQMTQSPSSLSASVGDRVTITCKASDHINNWLAWYQQKPGQAPKLLIYGATTLETGVPSRFSGSGSGTDYTLTISSLQPEDFATYYCQQSWNTPWTFGQGTKLEIKRLEGKPIPNPLLGLDSTGSGEDLKNVFPPEVAVFEPSEAEISHTQKATLVCLATGFYPDHVELSWWVNGKEVHSGVSTDPQPLKEQPALNDSRYCLSSRLRVSATFWQNPRNHFRCQVQFYGLSENDEWTQDRAKPVTQIVSAEAWGRADCGSQSFGLLDPKLCYLLDGILFIYGVILTALFLRVKFSRSADAPAYQQGQNQLYNELNLGRREEYDVLDKRRGRDPEMGGKPQRRKNPQEGLYNELQKDKMAEAYSEIGMKGERRRGKGHDGLYQGLSTATKDTYDALHMQALPPRRAKRSGSGATNFSLLKQAGDVEENPGPTSMDWIWRILFLVGAATGAHSGPLFNQEVQIPLTESYCGPCPKNWICYKNNCYQFFDESKNWYESQASCMSQNASLLKVYSKEDQDLLKLVKSYHWMGLVHIPTNGSWQWEDGSILSPNLLTIIEMQKGDCALYASSFKGYIENCSTPNTYICMQRTVGGGGSGGGGSGGGGSDLFNQEVQIPLTESYCGPCPKNWICYKNNCYQFFDESKNWYESQASCMSQNASLLKVYSKEDQDLLKLVKSYHWMGLVHIPTNGSWQWEDGSILSPNLLTIIEMQKGDCALYASSFKGYIENCSTPNTYICMQRTVGSGGGGSGGGGSGGGGSFEQVQLQQPGAELVKPGASVKMSCKASGYAFSSYWINWMKQKPGQGLEWIGQIYPGDGDTNYNGKFKGRATLTADTSSSTAYMQLSSLTSEDSAVYFCARSITTVVGCAMDYWGQGTSVTVSSTREQKLISEEDGSGIQNPDPAVYQLRDSKSSDKSVCLFTDFDSQTNVSQSKDSDVYITDKTVLDMRSMDFKSNSAVAWSNKSDFACANAFNNSIIPEDTFFPSPESSCGTQSFGLLDPKLCYLLDGILFIYGVILTALFLRSKRSRLLHSDYMNMTPRRPGPTRKHYQPYAPPRDFAAYRSRVKFSRSADAPAYQQGQNQLYNELNLGRREEYDVLDKRRGRDPEMGGKPQRRKNPQEGLYNELQKDKMAEAYSEIGMKGERRRGKGHDGLYQGLSTATKDTYDALHMQALPPR

SEQ ID NO: 14920 - protein, 1235 aa, Artificial Sequence
  Synthetic Polypeptide
MALPVTALLLPLALLLHAARPDIQMTQSPSSLSASVGDRVTITCKASDHINNWLAWYQQKPGQAPKLLIYGATTLETGVPSRFSGSGSGTDYTLTISSLQPEDFATYYCQQSWNTPWTFGQGTKLEIKRLEGKPIPNPLLGLDSTGSGEDLKNVFPPEVAVFEPSEAEISHTQKATLVCLATGFYPDHVELSWWVNGKEVHSGVSTDPQPLKEQPALNDSRYCLSSRLRVSATFWQNPRNHFRCQVQFYGLSENDEWTQDRAKPVTQIVSAEAWGRADCGSQSFGLLDPKLCYLLDGILFIYGVILTALFLRSKRSRLLHSDYMNMTPRRPGPTRKHYQPYAPPRDFAAYRSRVKFSRSADAPAYQQGQNQLYNELNLGRREEYDVLDKRRGRDPEMGGKPQRRKNPQEGLYNELQKDKMAEAYSEIGMKGERRRGKGHDGLYQGLSTATKDTYDALHMQALPPRRAKRSGSGATNFSLLKQAGDVEENPGPTSMDWIWRILFLVGAATGAHSGPLFNQEVQIPLTESYCGPCPKNWICYKNNCYQFFDESKNWYESQASCMSQNASLLKVYSKEDQDLLKLVKSYHWMGLVHIPTNGSWQWEDGSILSPNLLTIIEMQKGDCALYASSFKGYIENCSTPNTYICMQRTVGGGGSGGGGSGGGGSDLFNQEVQIPLTESYCGPCPKNWICYKNNCYQFFDESKNWYESQASCMSQNASLLKVYSKEDQDLLKLVKSYHWMGLVHIPTNGSWQWEDGSILSPNLLTIIEMQKGDCALYASSFKGYIENCSTPNTYICMQRTVGSGGGGSGGGGSGGGGSFEQVQLQQPGAELVKPGASVKMSCKASGYAFSSYWINWMKQKPGQGLEWIGQIYPGDGDTNYNGKFKGRATLTADTSSSTAYMQLSSLTSEDSAVYFCARSITTVVGCAMDYWGQGTSVTVSSTREQKLISEEDGSGIQNPDPAVYQLRDSKSSDKSVCLFTDFDSQTNVSQSKDSDVYITDKTVLDMRSMDFKSNSAVAWSNKSDFACANAFNNSIIPEDTFFPSPESSCGTQSFGLLDPKLCYLLDGILFIYGVILTALFLRSKRSRLLHSDYMNMTPRRPGPTRKHYQPYAPPRDFAAYRSRVKFSRSADAPAYQQGQNQLYNELNLGRREEYDVLDKRRGRDPEMGGKPQRRKNPQEGLYNELQKDKMAEAYSEIGMKGERRRGKGHDGLYQGLSTATKDTYDALHMQALPPR

SEQ ID NO: 14921 - protein, 1196 aa, Artificial Sequence
  Synthetic Polypeptide
MALPVTALLLPLALLLHAARPDIQMTQSPSSLSASVGDRVTITCKASDHINNWLAWYQQKPGQAPKLLIYGATTLETGVPSRFSGSGSGTDYTLTISSLQPEDFATYYCQQSWNTPWTFGQGTKLEIKRLEGKPIPNPLLGLDSTGSGEDLKNVFPPEVAVFEPSEAEISHTQKATLVCLATGFYPDHVELSWWVNGKEVHSGVSTDPQPLKEQPALNDSRYCLSSRLRVSATFWQNPRNHFRCQVQFYGLSENDEWTQDRAKPVTQIVSAEAWGRADCGSQSFGLLDPKLCYLLDGILFIYGVILTALFLRVKFSRSADAPAYQQGQNQLYNELNLGRREEYDVLDKRRGRDPEMGGKPQRRKNPQEGLYNELQKDKMAEAYSEIGMKGERRRGKGHDGLYQGLSTATKDTYDALHMQALPPRRAKRSGSGATNFSLLKQAGDVEENPGPTSMDWIWRILFLVGAATGAHSGPLFNQEVQIPLTESYCGPCPKNWICYKNNCYQFFDESKNWYESQASCMSQNASLLKVYSKEDQDLLKLVKSYHWMGLVHIPTNGSWQWEDGSILSPNLLTIIEMQKGDCALYASSFKGYIENCSTPNTYICMQRTVGGGGSGGGGSGGGGSDLFNQEVQIPLTESYCGPCPKNWICYKNNCYQFFDESKNWYESQASCMSQNASLLKVYSKEDQDLLKLVKSYHWMGLVHIPTNGSWQWEDGSILSPNLLTIIEMQKGDCALYASSFKGYIENCSTPNTYICMQRTVGSGGGGSGGGGSGGGGSFEQVQLQQPGAELVKPGASVKMSCKASGYAFSSYWINWMKQKPGQGLEWIGQIYPGDGDTNYNGKFKGRATLTADTSSSTAYMQLSSLTSEDSAVYFCARSITTVVGCAMDYWGQGTSVTVSSTREQKLISEEDLGSGIQNPDPAVYQLRDSKSSDKSVCLFTDFDSQTNVSQSKDSDVYITDKTVLDMRSMDFKSNSAVAWSNKSDFACANAFNNSIIPEDTFFPSPESSCGTQSFGLLDPKLCYLLDGILFIYGVILTALFLKRGRKKLLYIFKQPFMRPVQTTQEEDGCSCRFPEEEEGGCELRVKFSRSADAPAYQQGQNQLYNELNLGRREEYDVLDKRRGRDPEMGGKPQRRKNPQEGLYNELQKDKMAEAYSEIGMKGERRRGKGHDGLYQGLSTATKDTYDALHMQALPPR

SEQ ID NO: 14922 - protein, 1238 aa, Artificial Sequence
  Synthetic Polypeptide
MALPVTALLLPLALLLHAARPDIQMTQSPSSLSASVGDRVTITCKASDHINNWLAWYQQKPGQAPKLLIYGATTLETGVPSRFSGSGSGTDYTLTISSLQPEDFATYYCQQSWNTPWTFGQGTKLEIKRLEGKPIPNPLLGLDSTGSGEDLKNVFPPEVAVFEPSEAEISHTQKATLVCLATGFYPDHVELSWWVNGKEVHSGVSTDPQPLKEQPALNDSRYCLSSRLRVSATFWQNPRNHFRCQVQFYGLSENDEWTQDRAKPVTQIVSAEAWGRADCGSQSFGLLDPKLCYLLDGILFIYGVILTALFLKRGRKKLLYIFKQPFMRPVQTTQEEDGCSCRFPEEEEGGCELRVKFSRSADAPAYQQGQNQLYNELNLGRREEYDVLDKRRGRDPEMGGKPQRRKNPQEGLYNELQKDKMAEAYSEIGMKGERRRGKGHDGLYQGLSTATKDTYDALHMQALPPRRAKRSGSGATNFSLLKQAGDVEENPGPTSMDWIWRILFLVGAATGAHSGPLFNQEVQIPLTESYCGPCPKNWICYKNNCYQFFDESKNWYESQASCMSQNASLLKVYSKEDQDLLKLVKSYHWMGLVHIPTNGSWQWEDGSILSPNLLTIIEMQKGDCALYASSFKGYIENCSTPNTYICMQRTVGGGGSGGGGSGGGGSDLFNQEVQIPLTESYCGPCPKNWICYKNNCYQFFDESKNWYESQASCMSQNASLLKVYSKEDQDLLKLVKSYHWMGLVHIPTNGSWQWEDGSILSPNLLTIIEMQKGDCALYASSFKGYIENCSTPNTYICMQRTVGSGGGGSGGGGSGGGGSFEQVQLQQPGAELVKPGASVKMSCKASGYAFSSYWINWMKQKPGQGLEWIGQIYPGDGDTNYNGKFKGRATLTADTSSSTAYMQLSSLTSEDSAVYFCARSITTVVGCAMDYWGQGTSVTVSSTREQKLISEEDLGSGIQNPDPAVYQLRDSKSSDKSVCLFTDFDSQTNVSQSKDSDVYITDKTVLDMRSMDFKSNSAVAWSNKSDFACANAFNNSIIPEDTFFPSPESSCGTQSFGLLDPKLCYLLDGILFIYGVILTALFLKRGRKKLLYIFKQPFMRPVQTTQEEDGCSCRFPEEEEGGCELRVKFSRSADAPAYQQGQNQLYNELNLGRREEYDVLDKRRGRDPEMGGKPQRRKNPQEGLYNELQKDKMAEAYSEIGMKGERRRGKGHDGLYQGLSTATKDTYDALHMQALPPR

SEQ ID NO: 14923 - protein, 1128 aa, Artificial Sequence
  Synthetic Polypeptide
MALPVTALLLPLALLLHAARPDIQMTQSPSSLSASVGDRVTITCKASDHINNWLAWYQQKPGQAPKLLIYGATTLETGVPSRFSGSGSGTDYTLTISSLQPEDFATYYCQQSWNTPWTFGQGTKLEIKRLEQSFGLLDPKLCYLLDGILFIYGVILTALFLRVKFSRSADAPAYQQGQNQLYNELNLGRREEYDVLDKRRGRDPEMGGKPQRRKNPQEGLYNELQKDKMAEAYSEIGMKGERRRGKGHDGLYQGLSTATKDTYDALHMQALPPRRAKRSGSGATNFSLLKQAGDVEENPGPTSMDWIWRILFLVGAATGAHSGPLFNQEVQIPLTESYCGPCPKNWICYKNNCYQFFDESKNWYESQASCMSQNASLLKVYSKEDQDLLKLVKSYHWMGLVHIPTNGSWQWEDGSILSPNLLTIIEMQKGDCALYASSFKGYIENCSTPNTYICMQRTVGGGGSGGGGSGGGGSDLFNQEVQIPLTESYCGPCPKNWICYKNNCYQFFDESKNWYESQASCMSQNASLLKVYSKEDQDLLKLVKSYHWMGLVHIPTNGSWQWEDGSILSPNLLTIIEMQKGDCALYASSFKGYIENCSTPNTYICMQRTVGSGGGGSGGGGSGGGGSFEQVQLQQPGAELVKPGASVKMSCKASGYAFSSYWINWMKQKPGQGLEWIGQIYPGDGDTNYNGKFKGRATLTADTSSSTAYMQLSSLTSEDSAVYFCARSITTVVGCAMDYWGQGTSVTVSSTRQSFGLLDPKLCYLLDGILFIYGVILTALFLRVKFSRSADAPAYQQGQNQLYNELNLGRREEYDVLDKRRGRDPEMGGKPQRRKNPQEGLYNELQKDKMAEAYSEIGMKGERRRGKGHDGLYQGLSTATKDTYDALHMQALPPRRAKRSGSGVKQTLNFDLLKLAGDVESNPGPSRGHMTEYKPTVRLATRDDVPRAVRTLAAAFADYPATRHTVDPDRHIERVTELQELFLTRVGLDIGKVWVADDGAAVAVWTTPESVEAGAVFAEIGPRMAELSGSRLAAQQQMEGLLAPHRPKEPAWFLATVGVSPDHQGKGLGSAVVLPGVEAAERAGVPAFLETSAPRNLPFYERLGFTVTADVEVPEGPRTWCMTRKPGA

SEQ ID NO: 14924 - protein, 953 aa, Artificial Sequence
  Synthetic Polypeptide
MALPVTALLLPLALLLHAARPDIQMTQSPSSLSASVGDRVTITCKASDHINNWLAWYQQKPGQAPKLLIYGATTLETGVPSRFSGSGSGTDYTLTISSLQPEDFATYYCQQSWNTPWTFGQGTKLEIKRLEGQPKANPTVTLFPPSSEELQANKATLVCLISDFYPGAVTVAWKADGSPVKAGVETTKPSKQSNNKYAASSYLSLTPEQWKSHRSYSCQVTHEGSTVEKTVAPTECSPIKTDVITMDPKDNCSKDANDTLLLQLTNTSAYYMYLLLLLKSVVYFAIITCCLLRRTAFCCNGEKSRAKRSGSGATNFSLLKQAGDVEENPGPTSMDWIWRILFLVGAATGAHSGPLFNQEVQIPLTESYCGPCPKNWICYKNNCYQFFDESKNWYESQASCMSQNASLLKVYSKEDQDLLKLVKSYHWMGLVHIPTNGSWQWEDGSILSPNLLTIIEMQKGDCALYASSFKGYIENCSTPNTYICMQRTVGGGGSGGGGSGGGGSDLFNQEVQIPLTESYCGPCPKNWICYKNNCYQFFDESKNWYESQASCMSQNASLLKVYSKEDQDLLKLVKSYHWMGLVHIPTNGSWQWEDGSILSPNLLTIIEMQKGDCALYASSFKGYIENCSTPNTYICMQRTVGSGGGGSGGGGSGGGGSFEQVQLQQPGAELVKPGASVKMSCKASGYAFSSYWINWMKQKPGQGLEWIGQIYPGDGDTNYNGKFKGRATLTADTSSSTAYMQLSSLTSEDSAVYFCARSITTVVGCAMDYWGQGTSVTVSSTRASTKGPSVFPLAPSSKSTSGGTAALGCLVKDYFPEPVTVSWNSGALTSGVHTFPAVLQSSGLYSLSSVVTVPSSSLGTQTYICNVNHKPSNTKVDKRVEPKSCEVKTDSTDHVKPKETENTKQPSKSCHKPKAIVHTEKVNMMSLTVLGLRMLFAKTVAVNFLLTAKLFFL

SEQ ID NO: 14925 - protein, 931 aa, Artificial Sequence
  Synthetic Polypeptide
MALPVTALLLPLALLLHAARPDIQMTQSPSSLSASVGDRVTITCKASDHINNWLAWYQQKPGQAPKLLIYGATTLETGVPSRFSGSGSGTDYTLTISSLQPEDFATYYCQQSWNTPWTFGQGTKLEIKRLEGQPKANPTVTLFPPSSEELQANKATLVCLISDFYPGAVTVAWKADGSPVKAGVETTKPSKQSNNKYAASSYLSLTPEQWKSHRSYSCQVTHEGSTVEKTVAPTECSGRADCGITSASYHQGVLSATILYEILLGKATLYAVLVSALVLMAMVKRKDSRGRAKRSGSGATNFSLLKQAGDVEENPGPTSMDWIWRILFLVGAATGAHSGPLFNQEVQIPLTESYCGPCPKNWICYKNNCYQFFDESKNWYESQASCMSQNASLLKVYSKEDQDLLKLVKSYHWMGLVHIPTNGSWQWEDGSILSPNLLTIIEMQKGDCALYASSFKGYIENCSTPNTYICMQRTVGGGGSGGGGSGGGGSDLFNQEVQIPLTESYCGPCPKNWICYKNNCYQFFDESKNWYESQASCMSQNASLLKVYSKEDQDLLKLVKSYHWMGLVHIPTNGSWQWEDGSILSPNLLTIIEMQKGDCALYASSFKGYIENCSTPNTYICMQRTVGSGGGGSGGGGSGGGGSFEQVQLQQPGAELVKPGASVKMSCKASGYAFSSYWINWMKQKPGQGLEWIGQIYPGDGDTNYNGKFKGRATLTADTSSSTAYMQLSSLTSEDSAVYFCARSITTVVGCAMDYWGQGTSVTVSSTRASTKGPSVFPLAPSSKSTSGGTAALGCLVKDYFPEPVTVSWNSGALTSGVHTFPAVLQSSGLYSLSSVVTVPSSSLGTQTYICNVNHKPSNTKVDKRVEPKSCIPEDTFFPSSDVPCDVKLVEKSFETDTNLNFQNLSVIGFRILLLKVAGFNLLMTLRLWSS

SEQ ID NO: 14926 - protein, 931 aa, Artificial Sequence
  Synthetic Polypeptide
MALPVTALLLPLALLLHAARPDIQMTQSPSSLSASVGDRVTITCKASDHINNWLAWYQQKPGQAPKLLIYGATTLETGVPSRFSGSGSGTDYTLTISSLQPEDFATYYCQQSWNTPWTFGQGTKLEIKRLEGQPKANPTVTLFPPSSEELQANKATLVCLISDFYPGAVTVAWKADGSPVKAGVETTKPSKQSNNKYAASSYLSLTPEQWKSHRSYSCQVTHEGSTVEKTVAPTECSGRADCGFTSESYQQGVLSATILYEILLGKATLYAVLVSALVLMAMVKRKDSRGRAKRSGSGATNFSLLKQAGDVEENPGPTSMDWIWRILFLVGAATGAHSGPLFNQEVQIPLTESYCGPCPKNWICYKNNCYQFFDESKNWYESQASCMSQNASLLKVYSKEDQDLLKLVKSYHWMGLVHIPTNGSWQWEDGSILSPNLLTIIEMQKGDCALYASSFKGYIENCSTPNTYICMQRTVGGGGSGGGGSGGGGSDLFNQEVQIPLTESYCGPCPKNWICYKNNCYQFFDESKNWYESQASCMSQNASLLKVYSKEDQDLLKLVKSYHWMGLVHIPTNGSWQWEDGSILSPNLLTIIEMQKGDCALYASSFKGYIENCSTPNTYICMQRTVGSGGGGSGGGGSGGGGSFEQVQLQQPGAELVKPGASVKMSCKASGYAFSSYWINWMKQKPGQGLEWIGQIYPGDGDTNYNGKFKGRATLTADTSSSTAYMQLSSLTSEDSAVYFCARSITTVVGCAMDYWGQGTSVTVSSTRASTKGPSVFPLAPSSKSTSGGTAALGCLVKDYFPEPVTVSWNSGALTSGVHTFPAVLQSSGLYSLSSVVTVPSSSLGTQTYICNVNHKPSNTKVDKRVEPKSCIPEDTFFPSPESSCDVKLVEKSFETDTNLNFQNLSVIGFRILLLKVAGFNLLMTLRLWSS

SEQ ID NO: 14927 - protein, 759 aa, Artificial Sequence
  Synthetic Polypeptide
MDWIWRILFLVGAATGAHSLFNQEVQIPLTESYCGPCPKNWICYKNNCYQFFDESKNWYESQASCMSQNASLLKVYSKEDQDLLKLVKSYHWMGLVHIPTNGSWQWEDGSILSPNLLTIIEMQKGDCALYASSFKGYIENCSTPNTYICMQRTVGGGGSGGGGSGGGGSDLFNQEVQIPLTESYCGPCPKNWICYKNNCYQFFDESKNWYESQASCMSQNASLLKVYSKEDQDLLKLVKSYHWMGLVHIPTNGSWQWEDGSILSPNLLTIIEMQKGDCALYASSFKGYIENCSTPNTYICMQRTVGSGGGGSGGGGSGGGGSFEQVQLQQPGAELVKPGASVKMSCKASGYAFSSYWINWMKQKPGQGLEWIGQIYPGDGDTNYNGKFKGRATLTADTSSSTAYMQLSSLTSEDSAVYFCARSITTVVGCAMDYWGQGTSVTVSSGGGGSGGGGSGGGGSDIQMTQSPSSLSASVGDRVTITCKASDHINNWLAWYQQKPGQAPKLLIYGATTLETGVPSRFSGSGSGTDYTLTISSLQPEDFATYYCQQSWNTPWTFGQGTKLEIKRTRGGGSDGNEEMGGITQTPYKVSISGTTVILTCPQYPGSEILWQHNDKNIGGDEDDKNIGSDEDHLSLKEFSELEQSGYYVCYPRGSKPEDANFYLYLRARVCENCMEMDVMSVATIVIVDICITGGLLLLVYYWSKNRKAKAKPVTRGAGAGGRQRGQNKERPPPVPNPDYEPIRKGQRDLYSGLNQRRI

SEQ ID NO: 14928 - protein, 724 aa, Artificial Sequence
  Synthetic Polypeptide
MDWIWRILFLVGAATGAHSLFNQEVQIPLTESYCGPCPKNWICYKNNCYQFFDESKNWYESQASCMSQNASLLKVYSKEDQDLLKLVKSYHWMGLVHIPTNGSWQWEDGSILSPNLLTIIEMQKGDCALYASSFKGYIENCSTPNTYICMQRTVGGGGSGGGGSGGGGSDLFNQEVQIPLTESYCGPCPKNWICYKNNCYQFFDESKNWYESQASCMSQNASLLKVYSKEDQDLLKLVKSYHWMGLVHIPTNGSWQWEDGSILSPNLLTIIEMQKGDCALYASSFKGYIENCSTPNTYICMQRTVGSGGGGSGGGGSGGGGSFEQVQLQQPGAELVKPGASVKMSCKASGYAFSSYWINWMKQKPGQGLEWIGQIYPGDGDTNYNGKFKGRATLTADTSSSTAYMQLSSLTSEDSAVYFCARSITTVVGCAMDYWGQGTSVTVSSGGGGSGGGGSGGGGSDIQMTQSPSSLSASVGDRVTITCKASDHINNWLAWYQQKPGQAPKLLIYGATTLETGVPSRFSGSGSGTDYTLTISSLQPEDFATYYCQQSWNTPWTFGQGTKLEIKRTRGGGSFKIPIEELEDRVFVNCNTSITWVEGTVGTLLSDITRLDLGKRILDPRGIYRCNGTDIYKDKESTVQVHYRMCQSCVELDPATVAGIIVTDVIATLLLALGVFCFAGHETGRLSGAADTQALLRNDQVYQPLRDRDDAQYSHLGGNWARNK

SEQ ID NO: 14929 - protein, 734 aa, Artificial Sequence
  Synthetic Polypeptide
MDWIWRILFLVGAATGAHSLFNQEVQIPLTESYCGPCPKNWICYKNNCYQFFDESKNWYESQASCMSQNASLLKVYSKEDQDLLKLVKSYHWMGLVHIPTNGSWQWEDGSILSPNLLTIIEMQKGDCALYASSFKGYIENCSTPNTYICMQRTVGGGGSGGGGSGGGGSDLFNQEVQIPLTESYCGPCPKNWICYKNNCYQFFDESKNWYESQASCMSQNASLLKVYSKEDQDLLKLVKSYHWMGLVHIPTNGSWQWEDGSILSPNLLTIIEMQKGDCALYASSFKGYIENCSTPNTYICMQRTVGSGGGGSGGGGSGGGGSFEQVQLQQPGAELVKPGASVKMSCKASGYAFSSYWINWMKQKPGQGLEWIGQIYPGDGDTNYNGKFKGRATLTADTSSSTAYMQLSSLTSEDSAVYFCARSITTVVGCAMDYWGQGTSVTVSSGGGGSGGGGSGGGGSDIQMTQSPSSLSASVGDRVTITCKASDHINNWLAWYQQKPGQAPKLLIYGATTLETGVPSRFSGSGSGTDYTLTISSLQPEDFATYYCQQSWNTPWTFGQGTKLEIKRTRGGGSQSIKGNHLVKVYDYQEDGSVLLTCDAEAKNITWFKDGKMIGFLTEDKKKWNLGSNAKDPRGMYQCKGSQNKSKPLQVYYRMCQNCIELNAATISGFLFAEIVSIFVLAVGVYFIAGQDGVRQSRASDKQTLLPNDQLYQPLKDREDDQYSHLQGNQLRRN

SEQ ID NO: 14930 - protein, 717 aa, Artificial Sequence
  Synthetic Polypeptide
MDWIWRILFLVGAATGAHSLFNQEVQIPLTESYCGPCPKNWICYKNNCYQFFDESKNWYESQASCMSQNASLLKVYSKEDQDLLKLVKSYHWMGLVHIPTNGSWQWEDGSILSPNLLTIIEMQKGDCALYASSFKGYIENCSTPNTYICMQRTVGGGGSGGGGSGGGGSDLFNQEVQIPLTESYCGPCPKNWICYKNNCYQFFDESKNWYESQASCMSQNASLLKVYSKEDQDLLKLVKSYHWMGLVHIPTNGSWQWEDGSILSPNLLTIIEMQKGDCALYASSFKGYIENCSTPNTYICMQRTVGSGGGGSGGGGSGGGGSFEQVQLQQPGAELVKPGASVKMSCKASGYAFSSYWINWMKQKPGQGLEWIGQIYPGDGDTNYNGKFKGRATLTADTSSSTAYMQLSSLTSEDSAVYFCARSITTVVGCAMDYWGQGTSVTVSSGGGGSGGGGSGGGGSDIQMTQSPSSLSASVGDRVTITCKASDHINNWLAWYQQKPGQAPKLLIYGATTLETGVPSRFSGSGSGTDYTLTISSLQPEDFATYYCQQSWNTPWTFGQGTKLEIKRTRGGGSQSFGLLDPKLCYLLDGILFIYGVILTALFLRVKFSRSADAPAYQQGQNQLYNELNLGRREEYDVLDKRRGRDPEMGGKPQRRKNPQEGLYNELQKDKMAEAYSEIGMKGERRRGKGHDGLYQGLSTATKDTYDALHMQALPPR

SEQ ID NO: 14931 - protein, 755 aa, Artificial Sequence
  Synthetic Polypeptide
MDWIWRILFLVGAATGAHSGPLFNQEVQIPLTESYCGPCPKNWICYKNNCYQFFDESKNWYESQASCMSQNASLLKVYSKEDQDLLKLVKSYHWMGLVHIPTNGSWQWEDGSILSPNLLTIIEMQKGDCALYASSFKGYIENCSTPNTYICMQRTVGGGGSGGGGSGGGGSDLFNQEVQIPLTESYCGPCPKNWICYKNNCYQFFDESKNWYESQASCMSQNASLLKVYSKEDQDLLKLVKSYHWMGLVHIPTNGSWQWEDGSILSPNLLTIIEMQKGDCALYASSFKGYIENCSTPNTYICMQRTVGSGGGGSGGGGSGGGGSFEQVQLQQPGAELVKPGASVKMSCKASGYAFSSYWINWMKQKPGQGLEWIGQIYPGDGDTNYNGKFKGRATLTADTSSSTAYMQLSSLTSEDSAVYFCARSITTVVGCAMDYWGQGTSVTVSSTRIQNPDPAVYQLRDSKSSDKSVCLFTDFDSQTNVSQSKDSDVYITDKTVLDMRSMDFKSNSAVAWSNKSDFACANAFNNSIIPEDTFFPSPESSCDVKLVEKSFETDTNLNFQNLSVIGFRILLLKVAGFNLLMTLRLWSSRAKRSGSGVKQTLNFDLLKLAGDVESNPGPSRGHMAKPLSQEESTLIERATATINSIPISEDYSVASAALSSDGRIFTGVNVYHFTGGPCAELVVLGTAAAAAAGNLTCIVAIGNENRGILSPCGRCRQVLLDLHPGIKAIVKDSDGQPTAVGIRELLPSGYVWEG

SEQ ID NO: 14932 - protein, 589 aa, Artificial Sequence
  Synthetic Polypeptide
MDWIWRILFLVGAATGAHSGPLFNQEVQIPLTESYCGPCPKNWICYKNNCYQFFDESKNWYESQASCMSQNASLLKVYSKEDQDLLKLVKSYHWMGLVHIPTNGSWQWEDGSILSPNLLTIIEMQKGDCALYASSFKGYIENCSTPNTYICMQRTVGGGGSGGGGSGGGGSDLFNQEVQIPLTESYCGPCPKNWICYKNNCYQFFDESKNWYESQASCMSQNASLLKVYSKEDQDLLKLVKSYHWMGLVHIPTNGSWQWEDGSILSPNLLTIIEMQKGDCALYASSFKGYIENCSTPNTYICMQRTVGSGGGGSGGGGSGGGGSFEQVQLQQPGAELVKPGASVKMSCKASGYAFSSYWINWMKQKPGQGLEWIGQIYPGDGDTNYNGKFKGRATLTADTSSSTAYMQLSSLTSEDSAVYFCARSITTVVGCAMDYWGQGTSVTVSSTRIQNPDPAVYQLRDSKSSDKSVCLFTDFDSQTNVSQSKDSDVYITDKTVLDMRSMDFKSNSAVAWSNKSDFACANAFNNSIIPEDTFFPSPESSCDVKLVEKSFETDTNLNFQNLSVIGFRILLLKVAGFNLLMTLRLWSS

SEQ ID NO: 14933 - protein, 767 aa, Artificial Sequence
  Synthetic Polypeptide
MDWIWRILFLVGAATGAHSGPLFNQEVQIPLTESYCGPCPKNWICYKNNCYQFFDESKNWYESQASCMSQNASLLKVYSKEDQDLLKLVKSYHWMGLVHIPTNGSWQWEDGSILSPNLLTIIEMQKGDCALYASSFKGYIENCSTPNTYICMQRTVGGGGSGGGGSGGGGSDLFNQEVQIPLTESYCGPCPKNWICYKNNCYQFFDESKNWYESQASCMSQNASLLKVYSKEDQDLLKLVKSYHWMGLVHIPTNGSWQWEDGSILSPNLLTIIEMQKGDCALYASSFKGYIENCSTPNTYICMQRTVGSGGGGSGGGGSGGGGSFEQVQLQQPGAELVKPGASVKMSCKASGYAFSSYWINWMKQKPGQGLEWIGQIYPGDGDTNYNGKFKGRATLTADTSSSTAYMQLSSLTSEDSAVYFCARSITTVVGCAMDYWGQGTSVTVSSTREQKLISEEDGSGIQNPDPAVYQLRDSKSSDKSVCLFTDFDSQTNVSQSKDSDVYITDKCVLDMRSMDFKSNSAVAWSNKSDFACANAFNNSIIPEDTFFPSPESSCDVKLVEKSFETDTNLNFQNLSVIGFRILLLKVAGFNLLMTLRLWSSRAKRSGSGVKQTLNFDLLKLAGDVESNPGPSRGHMAKPLSQEESTLIERATATINSIPISEDYSVASAALSSDGRIFTGVNVYHFTGGPCAELVVLGTAAAAAAGNLTCIVAIGNENRGILSPCGRCRQVLLDLHPGIKAIVKDSDGQPTAVGIRELLPSGYVWEG

SEQ ID NO: 14934 - protein, 601 aa, Artificial Sequence
  Synthetic Polypeptide
MDWIWRILFLVGAATGAHSGPLFNQEVQIPLTESYCGPCPKNWICYKNNCYQFFDESKNWYESQASCMSQNASLLKVYSKEDQDLLKLVKSYHWMGLVHIPTNGSWQWEDGSILSPNLLTIIEMQKGDCALYASSFKGYIENCSTPNTYICMQRTVGGGGSGGGGSGGGGSDLFNQEVQIPLTESYCGPCPKNWICYKNNCYQFFDESKNWYESQASCMSQNASLLKVYSKEDQDLLKLVKSYHWMGLVHIPTNGSWQWEDGSILSPNLLTIIEMQKGDCALYASSFKGYIENCSTPNTYICMQRTVGSGGGGSGGGGSGGGGSFEQVQLQQPGAELVKPGASVKMSCKASGYAFSSYWINWMKQKPGQGLEWIGQIYPGDGDTNYNGKFKGRATLTADTSSSTAYMQLSSLTSEDSAVYFCARSITTVVGCAMDYWGQGTSVTVSSTREQKLISEEDGSGIQNPDPAVYQLRDSKSSDKSVCLFTDFDSQTNVSQSKDSDVYITDKCVLDMRSMDFKSNSAVAWSNKSDFACANAFNNSIIPEDTFFPSPESSCDVKLVEKSFETDTNLNFQNLSVIGFRILLLKVAGFNLLMTLRLWSS

SEQ ID NO: 14935 - protein, 641 aa, Artificial Sequence
  Synthetic Polypeptide
MALPVTALLLPLALLLHAARPACQVQLVESGGGLVQAGDSVTLSCTASGRTFSSYALAWFRQRPGKEREFVAGLRWGGPTNYADSVKDRFTISGDSAKHTMYLQMNSLKPEDTAVYYCGYNPGGWAVPSQYEYDSWGQGTQVTVSSGTGGGGSGGGGSGGGGSEFDIQMTQSPSSLSASVGDRVTITCKASDHINNWLAWYQQKPGQAPKLLIYGATTLETGVPSRFSGSGSGTDYTLTISSLQPEDFATYYCQQSWNTPWTFGQGTKLEIKRGGGGSGGGGSGGGGSQVQLQQPGAELVKPGASVKMSCKASGYAFSSYWINWMKQKPGQGLEWIGQIYPGDGDTNYNGKFKGRATLTADTSSSTAYMQLSSLTSEDSAVYFCARSITTVVGCAMDYWGQGTSVTVSSTREQKLISEEDLKIEVMYPPPYLDNEKSNGTIIHVKGKHLCPSPLFPGPSKPFWVLVVVGGVLACYSLLVTVAFIIFWVRSKRSRLLHSDYMNMTPRRPGPTRKHYQPYAPPRDFAAYRSRVKFSRSADAPAYQQGQNQLYNELNLGRREEYDVLDKRRGRDPEMGGKPRRKNPQEGLYNELQKDKMAEAYSEIGMKGERRRGKGHDGLYQGLSTATKDTYDALHMQALPPR

SEQ ID NO: 14936 - protein, 647 aa, Artificial Sequence
  Synthetic Polypeptide
MALPVTALLLPLALLLHAARPACQVQLVESGGGLVQAGDSVTLSCTASGRTFSSYALAWFRQRPGKEREFVAGLRWGGPTNYADSVKDRFTISGDSAKHTMYLQMNSLKPEDTAVYYCGYNPGGWAVPSQYEYDSWGQGTQVTVSSGTGGGGSGGGGSGGGGSEFDIQMTQSPSSLSASVGDRVTITCKASDHINNWLAWYQQKPGQAPKLLIYGATTLETGVPSRFSGSGSGTDYTLTISSLQPEDFATYYCQQSWNTPWTFGQGTKLEIKRGGGGSGGGGSGGGGSQVQLQQPGAELVKPGASVKMSCKASGYAFSSYWINWMKQKPGQGLEWIGQIYPGDGDTNYNGKFKGRATLTADTSSSTAYMQLSSLTSEDSAVYFCARSITTVVGCAMDYWGQGTSVTVSSTREQKLISEEDLAKPTTTPAPRPPTPAPTIASQPLSLRPEACRPAAGGAVHTRGLDFACDIYIWAPLAGTCGVLLLSLVITLYCKRGRKKLLYIFKQPFMRPVQTTQEEDGCSCRFPEEEEGGCELRVKFSRSADAPAYQQGQNQLYNELNLGRREEYDVLDKRRGRDPEMGGKPRRKNPQEGLYNELQKDKMAEAYSEIGMKGERRRGKGHDGLYQGLSTATKDTYDALHMQALPPR

SEQ ID NO: 14937 - protein, 1060 aa, Artificial Sequence
  Synthetic Polypeptide
MALPVTALLLPLALLLHAARPACQVQLVESGGGLVQAGDSVTLSCTASGRTFSSYALAWFRQRPGKEREFVAGLRWGGPTNYADSVKDRFTISGDSAKHTMYLQMNSLKPEDTAVYYCGYNPGGWAVPSQYEYDSWGQGTQVTVSSGTGGGGSGGGGSGGGGSEFDIQMTQSPSSLSASVGDRVTITCKASDHINNWLAWYQQKPGQAPKLLIYGATTLETGVPSRFSGSGSGTDYTLTISSLQPEDFATYYCQQSWNTPWTFGQGTKLEIKRGGGGSGGGGSGGGGSQVQLQQPGAELVKPGASVKMSCKASGYAFSSYWINWMKQKPGQGLEWIGQIYPGDGDTNYNGKFKGRATLTADTSSSTAYMQLSSLTSEDSAVYFCARSITTVVGCAMDYWGQGTSVTVSSTREQKLISEEDLAKPTTTPAPRPPTPAPTIASQPLSLRPEACRPAAGGAVHTRGLDFACDIYIWAPLAGTCGVLLLSLVITLYCGRARVKFSRSADAPAYQQGQNQLYNELNLGRREEYDVLDKRRGRDPEMGGKPRRKNPQEGLYNELQKDKMAEAYSEIGMKGERRRGKGHDGLYQGLSTATKDTYDALHMQALPPRSRGSGATNFSLLKQAGDVEENPGPGIHMATYEVLCEVARKLGTDDREVVLFLLNVFIPQPTLAQLIGALRALKEEGRLTFPLLAECLFRAGRRDLLRDLLHLDPRFLERHLAGTMSYFSPYQLTVLHVDGELCARDIRSLIFLSKDTIGSRSTPQTFLHWVYCMENLDLLGPTDVDALMSMLRSLSRVDLQRQVQTLMGLHLSGPSHSQHYRHTPLETDFYDYKDDDDKTSGSGEGRGSLLTCGDVEENPGPHMTEYKPTVRLATRDDVPRAVRTLAAAFADYPATRHTVDPDRHIERVTELQELFLTRVGLDIGKVWVADDGAAVAVWTTPESVEAGAVFAEIGPRMAELSGSRLAAQQQMEGLLAPHRPKEPAWFLATVGVSPDHQGKGLGSAVVLPGVEAAERAGVPAFLETSAPRNLPFYERLGFTVTADVEVPEGPRTWCMTRKPGA

SEQ ID NO: 14938 - protein, 1000 aa, Artificial Sequence
  Synthetic Polypeptide
MALPVTALLLPLALLLHAARPACQVQLVESGGGLVQAGDSVTLSCTASGRTFSSYALAWFRQRPGKEREFVAGLRWGGPTNYADSVKDRFTISGDSAKHTMYLQMNSLKPEDTAVYYCGYNPGGWAVPSQYEYDSWGQGTQVTVSSGTGGGGSGGGGSGGGGSEFDIQMTQSPSSLSASVGDRVTITCKASDHINNWLAWYQQKPGQAPKLLIYGATTLETGVPSRFSGSGSGTDYTLTISSLQPEDFATYYCQQSWNTPWTFGQGTKLEIKRLEIQNPDPAVYQLRDSKSSDKSVCLFTDFDSQTNVSQSKDSDVYITDKCVLDMRSMDFKSNSAVAWSNKSDFACANAFNNSIIPEDTFFPSSDVPCDVKLVEKSFETDTNLNFQNLSVIGFRILLLKVAGFNLLMTLRLWSSRAKRSGSGVKQTLNFDLLKLAGDVESNPGPTSMDWIWRILFLVGAATGAHSFEQVQLQQPGAELVKPGASVKMSCKASGYAFSSYWINWMKQKPGQGLEWIGQIYPGDGDTNYNGKFKGRATLTADTSSSTAYMQLSSLTSEDSAVYFCARSITTVVGCAMDYWGQGTSVTVSSTREDLKNVFPPEVAVFEPSKAEIAHTQKATLVCLATGFYPDHVELSWWVNGKEVHSGVCTDPQPLKEQPALNDSRYCLSSRLRVSATFWQNPRNHFRCQVQFYGLSENDEWTQDRAKPVTQIVSAEAWGRADCGITSASYHQGVLSATILYEILLGKATLYAVLVSALVLMAMVKRKDSRGRAKRSGSGATNFSLLKQAGDVEENPGPSRGHMTEYKPTVRLATRDDVPRAVRTLAAAFADYPATRHTVDPDRHIERVTELQELFLTRVGLDIGKVWVADDGAAVAVWTTPESVEAGAVFAEIGPRMAELSGSRLAAQQQMEGLLAPHRPKEPAWFLATVGVSPDHQGKGLGSAVVLPGVEAAERAGVPAFLETSAPRNLPFYERLGFTVTADVEVPEGPRTWCMTRKPGA

SEQ ID NO: 14939 - protein, 999 aa, Artificial Sequence
  Synthetic Polypeptide
MALPVTALLLPLALLLHAARPACQVQLVESGGGLVQAGDSVTLSCTASGRTFSSYALAWFRQRPGKEREFVAGLRWGGPTNYADSVKDRFTISGDSAKHTMYLQMNSLKPEDTAVYYCGYNPGGWAVPSQYEYDSWGQGTQVTVSSGTGGGGSGGGGSGGGGSEFDIQMTQSPSSLSASVGDRVTITCKASDHINNWLAWYQQKPGQAPKLLIYGATTLETGVPSRFSGSGSGTDYTLTISSLQPEDFATYYCQQSWNTPWTFGQGTKLEIKRLEDLKNVFPPEVAVFEPSKAEIAHTQKATLVCLATGFYPDHVELSWWVNGKEVHSGVCTDPQPLKEQPALNDSRYCLSSRLRVSATFWQNPRNHFRCQVQFYGLSENDEWTQDRAKPVTQIVSAEAWGRADCGITSASYHQGVLSATILYEILLGKATLYAVLVSALVLMAMVKRKDSRGRAKRSGSGATNFSLLKQAGDVEENPGPTSMDWIWRILFLVGAATGAHSFEQVQLQQPGAELVKPGASVKMSCKASGYAFSSYWINWMKQKPGQGLEWIGQIYPGDGDTNYNGKFKGRATLTADTSSSTAYMQLSSLTSEDSAVYFCARSITTVVGCAMDYWGQGTSVTVSSTRIQNPDPAVYQLRDSKSSDKSVCLFTDFDSQTNVSQSKDSDVYITDKCVLDMRSMDFKSNSAVAWSNKSDFACANAFNNSIIPEDTFFPSSDVPCDVKLVEKSFETDTNLNFQNLSVIGFRILLLKVAGFNLLMTLRLWSSRAKRSGSGVKQTLNFDLLKLAGDVESNPGPSRGHMTEYKPTVRLATRDDVPRAVRTLAAAFADYPATRHTVDPDRHIERVTELQELFLTRVGLDIGKVWVADDGAAVAVWTTPESVEAGAVFAEIGPRMAELSGSRLAAQQQMEGLLAPHRPKEPAWFLATVGVSPDHQGKGLGSAVVLPGVEAAERAGVPAFLETSAPRNLPFYERLGFTVTADVEVPEGPRTWCMTRKPGA

SEQ ID NO: 14940 - protein, 766 aa, Artificial Sequence
  Synthetic Polypeptide
MALPVTALLLPLALLLHAARPACQVQLVESGGGLVQAGDSVTLSCTASGRTFSSYALAWFRQRPGKEREFVAGLRWGGPTNYADSVKDRFTISGDSAKHTMYLQMNSLKPEDTAVYYCGYNPGGWAVPSQYEYDSWGQGTQVTVSSGTGGGGSGGGGSGGGGSEFDIQMTQSPSSLSASVGDRVTITCKASDHINNWLAWYQQKPGQAPKLLIYGATTLETGVPSRFSGSGSGTDYTLTISSLQPEDFATYYCQQSWNTPWTFGQGTKLEIKRLEDLKNVFPPEVAVFEPSEAEISHTQKATLVCLATGFYPDHVELSWWVNGKEVHSGVCTDPQPLKEQPALNDSRYCLSSRLRVSATFWQNPRNHFRCQVQFYGLSENDEWTQDRAKPVTQIVSAEAWGRADCGFTSESYQQGVLSATILYEILLGKATLYAVLVSALVLMAMVKRKDSRGRAKRSGSGATNFSLLKQAGDVEENPGPTSMDWIWRILFLVGAATGAHSFEQVQLQQPGAELVKPGASVKMSCKASGYAFSSYWINWMKQKPGQGLEWIGQIYPGDGDTNYNGKFKGRATLTADTSSSTAYMQLSSLTSEDSAVYFCARSITTVVGCAMDYWGQGTSVTVSSTRIQNPDPAVYQLRDSKSSDKSVCLFTDFDSQTNVSQSKDSDVYITDKCVLDMRSMDFKSNSAVAWSNKSDFACANAFNNSIIPEDTFFPSPESSCDVKLVEKSFETDTNLNFQNLSVIGFRILLLKVAGFNLLMTLRLWSS

SEQ ID NO: 14941 - protein, 991 aa, Artificial Sequence
  Synthetic Polypeptide
MALPVTALLLPLALLLHAARPACQVQLVESGGGLVQAGDSVTLSCTASGRTFSSYALAWFRQRPGKEREFVAGLRWGGPTNYADSVKDRFTISGDSAKHTMYLQMNSLKPEDTAVYYCGYNPGGWAVPSQYEYDSWGQGTQVTVSSGTGGGGSGGGGSGGGGSEFDIQMTQSPSSLSASVGDRVTITCKASDHINNWLAWYQQKPGQAPKLLIYGATTLETGVPSRFSGSGSGTDYTLTISSLQPEDFATYYCQQSWNTPWTFGQGTKLEIKRLEDLKNVFPPEVAVFEPSEAEISHTQKATLVCLATGFYPDHVELSWWVNGKEVHSGVCTDPQPLKEQPALNDSRYCLSSRLRVSATFWQNPRNHFRCQVQFYGLSENDEWTQDRAKPVTQIVSAEAWGRADCGFTSESYQQGVLSATILYEILLGKATLYAVLVSALVLMAMVKRKDSRGRAKRSGSGATNFSLLKQAGDVEENPGPTSMDWIWRILFLVGAATGAHSFEQVQLQQPGAELVKPGASVKMSCKASGYAFSSYWINWMKQKPGQGLEWIGQIYPGDGDTNYNGKFKGRATLTADTSSSTAYMQLSSLTSEDSAVYFCARSITTVVGCAMDYWGQGTSVTVSSTRIQNPDPAVYQLRDSKSSDKSVCLFTDFDSQTNVSQSKDSDVYITDKCVLDMRSMDFKSNSAVAWSNKSDFACANAFNNSIIPEDTFFPSPESSCDVKLVEKSFETDTNLNFQNLSVIGFRILLLKVAGFNLLMTLRLWSSRAKRSGSGVKQTLNFDLLKLAGDVESNPGPSRGGIHTMATYEVLCEVARKLGTDDREVVLFLLNVFIPQPTLAQLIGALRALKEEGRLTFPLLAECLFRAGRRDLLRDLLHLDPRFLERHLAGTMSYFSPYQLTVLHVDGELCARDIRSLIFLSKDTIGSRSTPQTFLHWVYCMENLDLLGPTDVDALMSMLRSLSRVDLQRQVQTLMGLHLSGPSHSQHYRHTP

SEQ ID NO: 14942 - protein, 770 aa, Artificial Sequence
  Synthetic Polypeptide
MALPVTALLLPLALLLHAARPACQVQLVESGGGLVQAGDSVTLSCTASGRTFSSYALAWFRQRPGKEREFVAGLRWGGPTNYADSVKDRFTISGDSAKHTMYLQMNSLKPEDTAVYYCGYNPGGWAVPSQYEYDSWGQGTQVTVSSGTGGGGSGGGGSGGGGSEFDIQMTQSPSSLSASVGDRVTITCKASDHINNWLAWYQQKPGQAPKLLIYGATTLETGVPSRFSGSGSGTDYTLTISSLQPEDFATYYCQQSWNTPWTFGQGTKLEIKRLEIQNPDPAVYQLRDSKSSDKSVCLFTDFDSQTNVSQSKDSDVYITDKCVLDMRSMDFKSNSAVAWSNKSDFACANAFNNSIIPEDTFFPSPESSCDVKLVEKSFETDTNLNFQNLSVIGFRILLLKVAGFNLLMTLRLWSSRAKRSGSGVKQTLNFDLLKLAGDVESNPGPTSMDWIWRILFLVGAATGAHSFEQVQLQQPGAELVKPGASVKMSCKASGYAFSSYWINWMKQKPGQGLEWIGQIYPGDGDTNYNGKFKGRATLTADTSSSTAYMQLSSLTSEDSAVYFCARSITTVVGCAMDYWGQGTSVTVSSTREDLKNVFPPEVAVFEPSEAEISHTQKATLVCLATGFYPDHVELSWWVNGKEVHSGVCTDPQPLKEQPALNDSRYCLSSRLRVSATFWQNPRNHFRCQVQFYGLSENDEWTQDRAKPVTQIVSAEAWGRADCGFTSESYQQGVLSATILYEILLGKATLYAVLVSALVLMAMVKRKDSRG

SEQ ID NO: 14943 - protein, 992 aa, Artificial Sequence
  Synthetic Polypeptide
MALPVTALLLPLALLLHAARPACQVQLVESGGGLVQAGDSVTLSCTASGRTFSSYALAWFRQRPGKEREFVAGLRWGGPTNYADSVKDRFTISGDSAKHTMYLQMNSLKPEDTAVYYCGYNPGGWAVPSQYEYDSWGQGTQVTVSSGTGGGGSGGGGSGGGGSEFDIQMTQSPSSLSASVGDRVTITCKASDHINNWLAWYQQKPGQAPKLLIYGATTLETGVPSRFSGSGSGTDYTLTISSLQPEDFATYYCQQSWNTPWTFGQGTKLEIKRLEIQNPDPAVYQLRDSKSSDKSVCLFTDFDSQTNVSQSKDSDVYITDKCVLDMRSMDFKSNSAVAWSNKSDFACANAFNNSIIPEDTFFPSPESSCDVKLVEKSFETDTNLNFQNLSVIGFRILLLKVAGFNLLMTLRLWSSRAKRSGSGVKQTLNFDLLKLAGDVESNPGPTSMDWIWRILFLVGAATGAHSFEQVQLQQPGAELVKPGASVKMSCKASGYAFSSYWINWMKQKPGQGLEWIGQIYPGDGDTNYNGKFKGRATLTADTSSSTAYMQLSSLTSEDSAVYFCARSITTVVGCAMDYWGQGTSVTVSSTREDLKNVFPPEVAVFEPSEAEISHTQKATLVCLATGFYPDHVELSWWVNGKEVHSGVCTDPQPLKEQPALNDSRYCLSSRLRVSATFWQNPRNHFRCQVQFYGLSENDEWTQDRAKPVTQIVSAEAWGRADCGFTSESYQQGVLSATILYEILLGKATLYAVLVSALVLMAMVKRKDSRGRAKRSGSGATNFSLLKQAGDVEENPGPSRGGIHTMATYEVLCEVARKLGTDDREVVLFLLNVFIPQPTLAQLIGALRALKEEGRLTFPLLAECLFRAGRRDLLRDLLHLDPRFLERHLAGTMSYFSPYQLTVLHVDGELCARDIRSLIFLSKDTIGSRSTPQTFLHWVYCMENLDLLGPTDVDALMSMLRSLSRVDLQRQVQTLMGLHLSGPSHSQHYRHTP

SEQ ID NO: 14944 - protein, 1044 aa, Artificial Sequence
  Synthetic Polypeptide
MALPVTALLLPLALLLHAARPLEGKPIPNPLLGLDSTGSGEDLKNVFPPEVAVFEPSKAEIAHTQKATLVCLATGFYPDHVELSWWVNGKEVHSGVCTDPQPLKEQPALNDSRYCLSSRLRVSATFWQNPRNHFRCQVQFYGLSENDEWTQDRAKPVTQIVSAEAWGRADCGITSASYHQGVLSATILYEILLGKATLYAVLVSALVLMAMVKRKDSRGRAKRSGSGATNFSLLKQAGDVEENPGPTSMALPVTALLLPLALLLHAARPACQVQLVESGGGLVQAGDSVTLSCTASGRTFSSYALAWFRQRPGKEREFVAGLRWGGPTNYADSVKDRFTISGDSAKHTMYLQMNSLKPEDTAVYYCGYNPGGWAVPSQYEYDSWGQGTQVTVSSGTGGGGSGGGGSGGGGSEFDIQMTQSPSSLSASVGDRVTITCKASDHINNWLAWYQQKPGQAPKLLIYGATTLETGVPSRFSGSGSGTDYTLTISSLQPEDFATYYCQQSWNTPWTFGQGTKLEIKRGGGGSGGGGSGGGGSQVQLQQPGAELVKPGASVKMSCKASGYAFSSYWINWMKQKPGQGLEWIGQIYPGDGDTNYNGKFKGRATLTADTSSSTAYMQLSSLTSEDSAVYFCARSITTVVGCAMDYWGQGTSVTVSSTREQKLISEEDGSGIQNPDPAVYQLRDSKSSDKSVCLFTDFDSQTNVSQSKDSDVYITDKCVLDMRSMDFKSNSAVAWSNKSDFACANAFNNSIIPEDTFFPSSDVPCDVKLVEKSFETDTNLNFQNLSVIGFRILLLKVAGFNLLMTLRLWSSRAKRSGSGVKQTLNFDLLKLAGDVESNPGPSRGHMTEYKPTVRLATRDDVPRAVRTLAAAFADYPATRHTVDPDRHIERVTELQELFLTRVGLDIGKVWVADDGAAVAVWTTPESVEAGAVFAEIGPRMAELSGSRLAAQQQMEGLLAPHRPKEPAWFLATVGVSPDHQGKGLGSAVVLPGVEAAERAGVPAFLETSAPRNLPFYERLGFTVTADVEVPEGPRTWCMTRKPGA

SEQ ID NO: 14945 - protein, 1045 aa, Artificial Sequence
  Synthetic Polypeptide
MALPVTALLLPLALLLHAARPLEQKLISEEDLGSGDRPDPAVYQLRDSKSSDKSVCLFTDFDSQTNVSQSKDSDVYITDKCVLDMRSMDFKSNSAVAWSNKSDFACANAFNNSIIPEDTFFPSPESSCDVKLVEKSFETDTNLNFQNLSVIGFRILLLKVAGFNLLMTLRLWSSSSRAKRSGSGVKQTLNFDLLKLAGDVESNPGPTSMALPVTALLLPLALLLHAARPACQVQLVESGGGLVQAGDSVTLSCTASGRTFSSYALAWFRQRPGKEREFVAGLRWGGPTNYADSVKDRFTISGDSAKHTMYLQMNSLKPEDTAVYYCGYNPGGWAVPSQYEYDSWGQGTQVTVSSGTGGGGSGGGGSGGGGSEFDIQMTQSPSSLSASVGDRVTITCKASDHINNWLAWYQQKPGQAPKLLIYGATTLETGVPSRFSGSGSGTDYTLTISSLQPEDFATYYCQQSWNTPWTFGQGTKLEIKRGGGGSGGGGSGGGGSQVQLQQPGAELVKPGASVKMSCKASGYAFSSYWINWMKQKPGQGLEWIGQIYPGDGDTNYNGKFKGRATLTADTSSSTAYMQLSSLTSEDSAVYFCARSITTVVGCAMDYWGQGTSVTVSSTRGKPIPNPLLGLDSTGSGEDLKNVFPPEVAVFEPSEAEISHTQKATLVCLATGFYPDHVELSWWVNGKEVHSGVCTDPQPLKEQPALNDSRYCLSSRLRVSATFWQNPRNHFRCQVQFYGLSENDEWTQDRAKPVTQIVSAEAWGRADCGFTSESYQQGVLSATILYEILLGKATLYAVLVSALVLMAMVKRKDSRGRAKRSGSGATNFSLLKQAGDVEENPGPSRGHMTEYKPTVRLATRDDVPRAVRTLAAAFADYPATRHTVDPDRHIERVTELQELFLTRVGLDIGKVWVADDGAAVAVWTTPESVEAGAVFAEIGPRMAELSGSRLAAQQQMEGLLAPHRPKEPAWFLATVGVSPDHQGKGLGSAVVLPGVEAAERAGVPAFLETSAPRNLPFYERLGFTVTADVEVPEGPRTWCMTRKPGA

SEQ ID NO: 14946 - protein, 999 aa, Artificial Sequence
  Synthetic Polypeptide
MALPVTALLLPLALLLHAARPACQVQLVESGGGLVQAGDSVTLSCTASGRTFSSYALAWFRQRPGKEREFVAGLRWGGPTNYADSVKDRFTISGDSAKHTMYLQMNSLKPEDTAVYYCGYNPGGWAVPSQYEYDSWGQGTQVTVSSGTGGGGSGGGGSGGGGSEFDIQMTQSPSSLSASVGDRVTITCKASDHINNWLAWYQQKPGQAPKLLIYGATTLETGVPSRFSGSGSGTDYTLTISSLQPEDFATYYCQQSWNTPWTFGQGTKLEIKRLEDLKNVFPPEVAVFEPSEAEISHTQKATLVCLATGFYPDHVELSWWVNGKEVHSGVSTDPQPLKEQPALNDSRYCLSSRLRVSATFWQNPRNHFRCQVQFYGLSENDEWTQDRAKPVTQIVSAEAWGRADCGFTSESYQQGVLSATILYEILLGKATLYAVLVSALVLMAMVKRKDSRGRAKRSGSGATNFSLLKQAGDVEENPGPTSMDWIWRILFLVGAATGAHSFEQVQLQQPGAELVKPGASVKMSCKASGYAFSSYWINWMKQKPGQGLEWIGQIYPGDGDTNYNGKFKGRATLTADTSSSTAYMQLSSLTSEDSAVYFCARSITTVVGCAMDYWGQGTSVTVSSTRIQNPDPAVYQLRDSKSSDKSVCLFTDFDSQTNVSQSKDSDVYITDKTVLDMRSMDFKSNSAVAWSNKSDFACANAFNNSIIPEDTFFPSPESSCDVKLVEKSFETDTNLNFQNLSVIGFRILLLKVAGFNLLMTLRLWSSRAKRSGSGVKQTLNFDLLKLAGDVESNPGPSRGHMTEYKPTVRLATRDDVPRAVRTLAAAFADYPATRHTVDPDRHIERVTELQELFLTRVGLDIGKVWVADDGAAVAVWTTPESVEAGAVFAEIGPRMAELSGSRLAAQQQMEGLLAPHRPKEPAWFLATVGVSPDHQGKGLGSAVVLPGVEAAERAGVPAFLETSAPRNLPFYERLGFTVTADVEVPEGPRTWCMTRKPGA

SEQ ID NO: 14947 - protein, 1081 aa, Artificial Sequence
  Synthetic Polypeptide
MALPVTALLLPLALLLHAARPACQVQLVESGGGLVQAGDSVTLSCTASGRTFSSYALAWFRQRPGKEREFVAGLRWGGPTNYADSVKDRFTISGDSAKHTMYLQMNSLKPEDTAVYYCGYNPGGWAVPSQYEYDSWGQGTQVTVSSGTGGGGSGGGGSGGGGSEFDIQMTQSPSSLSASVGDRVTITCKASDHINNWLAWYQQKPGQAPKLLIYGATTLETGVPSRFSGSGSGTDYTLTISSLQPEDFATYYCQQSWNTPWTFGQGTKLEIKRLEDLKNVFPPEVAVFEPSEAEISHTQKATLVCLATGFYPDHVELSWWVNGKEVHSGVSTDPQPLKEQPALNDSRYCLSSRLRVSATFWQNPRNHFRCQVQFYGLSENDEWTQDRAKPVTQIVSAEAWGRADCGFTSESYQQGVLSATILYEILLGKATLYAVLVSALVLMAMVKRKDSRGRAKRSGSGATNFSLLKQAGDVEENPGPTSMDWIWRILFLVGAATGAHSFEQVQLQQPGAELVKPGASVKMSCKASGYAFSSYWINWMKQKPGQGLEWIGQIYPGDGDTNYNGKFKGRATLTADTSSSTAYMQLSSLTSEDSAVYFCARSITTVVGCAMDYWGQGTSVTVSSTREQKLISEEDGSGTPFPSLAPPIMLLVDGKQQMVVVCLVLDVAPPGLDSPIWFSAGNGSALDAFTYGPSPATDGTWTNLAHLSLPSEELASWEPLVCHTGPGAEGHSRSTQPMHLSGEASTARTCPQEPLRGTPGGALWLGVLRLLLFKLLLFDLLLTCSCLCDPAGPLPSPATTTRLRALGSHRLHPATETGGREATSSPRPQPRDRRWGDTPPGRKPGSPVRAKRSGSGVKQTLNFDLLKLAGDVESNPGPSRGHMTEYKPTVRLATRDDVPRAVRTLAAAFADYPATRHTVDPDRHIERVTELQELFLTRVGLDIGKVWVADDGAAVAVWTTPESVEAGAVFAEIGPRMAELSGSRLAAQQQMEGLLAPHRPKEPAWFLATVGVSPDHQGKGLGSAVVLPGVEAAERAGVPAFLETSAPRNLPFYERLGFTVTADVEVPEGPRTWCMTRKPGA

SEQ ID NO: 14948 - protein, 1099 aa, Artificial Sequence
  Synthetic Polypeptide
MALPVTALLLPLALLLHAARPLEDLKNVFPPEVAVFEPSEAEISHTQKATLVCLATGFYPDHVELSWWVNGKEVHSGVSTDPQPLKEQPALNDSRYCLSSRLRVSATFWQNPRNHFRCQVQFYGLSENDEWTQDRAKPVTQIVSAEAWGRADCGFTSESYQQGVLSATILYEILLGKATLYAVLVSALVLMAMVKRKDSRGRAKRSGSGATNFSLLKQAGDVEENPGPTSMALPVTALLLPLALLLHAARPACQVQLVESGGGLVQAGDSVTLSCTASGRTFSSYALAWFRQRPGKEREFVAGLRWGGPTNYADSVKDRFTISGDSAKHTMYLQMNSLKPEDTAVYYCGYNPGGWAVPSQYEYDSWGQGTQVTVSSGTGGGGSGGGGSGGGGSEFDIQMTQSPSSLSASVGDRVTITCKASDHINNWLAWYQQKPGQAPKLLIYGATTLETGVPSRFSGSGSGTDYTLTISSLQPEDFATYYCQQSWNTPWTFGQGTKLEIKRGGGGSGGGGSGGGGSQVQLQQPGAELVKPGASVKMSCKASGYAFSSYWINWMKQKPGQGLEWIGQIYPGDGDTNYNGKFKGRATLTADTSSSTAYMQLSSLTSEDSAVYFCARSITTVVGCAMDYWGQGTSVTVSSTREQKLISEEDLGSGTPFPSLAPPIMLLVDGKQQMVVVCLVLDVAPPGLDSPIWFSAGNGSALDAFTYGPSPATDGTWTNLAHLSLPSEELASWEPLVCHTGPGAEGHSRSTQPMHLSGEASTARTCPQEPLRGTPGGALWLGVLRLLLFKLLLFDLLLTCSCLCDPAGPLPSPATTTRLRALGSHRLHPATETGGREATSSPRPQPRDRRWGDTPPGRKPGSPVRAKRSGSGVKQTLNFDLLKLAGDVESNPGPSRSRGHMTEYKPTVRLATRDDVPRAVRTLAAAFADYPATRHTVDPDRHIERVTELQELFLTRVGLDIGKVWVADDGAAVAVWTTPESVEAGAVFAEIGPRMAELSGSRLAAQQQMEGLLAPHRPKEPAWFLATVGVSPDHQGKGLGSAVVLPGVEAAERAGVPAFLETSAPRNLPFYERLGFTVTADVEVPEGPRTWCMTRKPGA

SEQ ID NO: 14949 - protein, 1036 aa, Artificial Sequence
  Synthetic Polypeptide
MALPVTALLLPLALLLHAARPACQVQLVESGGGLVQAGDSVTLSCTASGRTFSSYALAWFRQRPGKEREFVAGLRWGGPTNYADSVKDRFTISGDSAKHTMYLQMNSLKPEDTAVYYCGYNPGGWAVPSQYEYDSWGQGTQVTVSSGTGGGGSGGGGSGGGGSEFDIQMTQSPSSLSASVGDRVTITCKASDHINNWLAWYQQKPGQAPKLLIYGATTLETGVPSRFSGSGSGTDYTLTISSLQPEDFATYYCQQSWNTPWTFGQGTKLEIKRLEGKPIPNPLLGLDSTGSGDKQLDADVSPKPTIFLPSIAETKLQKAGTYLCLLEKFFPDVIKIHWQEKKSNTILGSQEGNTMKTNDTYMKFSWLTVPEKSLDKEHRCIVRHENNKNGVDQEIIFPPIKTDVITMDPKDNCSKDANDTLLLQLTNTSAYYMYLLLLLKSVVYFAIITCCLLRRTAFCCNGEKSRAKRSGSGATNFSLLKQAGDVEENPGPTSMDWIWRILFLVGAATGAHSFEQVQLQQPGAELVKPGASVKMSCKASGYAFSSYWINWMKQKPGQGLEWIGQIYPGDGDTNYNGKFKGRATLTADTSSSTAYMQLSSLTSEDSAVYFCARSITTVVGCAMDYWGQGTSVTVSSTREQKLISEEDGSGSQPHTKPSVFVMKNGTNVACLVKEFYPKDIRINLVSSKKITEFDPAIVISPSGKYNAVKLGKYEDSNSVTCSVQHDNKTVHSTDFEVKTDSTDHVKPKETENTKQPSKSCHKPKAIVHTEKVNMMSLTVLGLRMLFAKTVAVNFLLTAKLFFLRAKRSGSGVKQTLNFDLLKLAGDVESNPGPSRGHMTEYKPTVRLATRDDVPRAVRTLAAAFADYPATRHTVDPDRHIERVTELQELFLTRVGLDIGKVWVADDGAAVAVWTTPESVEAGAVFAEIGPRMAELSGSRLAAQQQMEGLLAPHRPKEPAWFLATVGVSPDHQGKGLGSAVVLPGVEAAERAGVPAFLETSAPRNLPFYERLGFTVTADVEVPEGPRTWCMTRKPGA

SEQ ID NO: 14950 - protein, 774 aa, Artificial Sequence
  Synthetic Polypeptide
MALPVTALLLPLALLLHAARPACQVQLVESGGGLVQAGDSVTLSCTASGRTFSSYALAWFRQRPGKEREFVAGLRWGGPTNYADSVKDRFTISGDSAKHTMYLQMNSLKPEDTAVYYCGYNPGGWAVPSQYEYDSWGQGTQVTVSSGTGGGGSGGGGSGGGGSEFDIQMTQSPSSLSASVGDRVTITCKASDHINNWLAWYQQKPGQAPKLLIYGATTLETGVPSRFSGSGSGTDYTLTISSLQPEDFATYYCQQSWNTPWTFGQGTKLEIKRLESQPHTKPSVFVMKNGTNVACLVKEFYPKDIRINLVSSKKITEFDPAIVISPSGKYNAVKLGKYEDSNSVTCSVQHDNKTVHSTDFEVKTDSTDHVKPKETENTKQPSKSCHKPKAIVHTEKVNMMSLTVLGLRMLFAKTVAVNFLLTAKLFFLRAKRSGSGATNFSLLKQAGDVEENPGPTSMDWIWRILFLVGAATGAHSFEQVQLQQPGAELVKPGASVKMSCKASGYAFSSYWINWMKQKPGQGLEWIGQIYPGDGDTNYNGKFKGRATLTADTSSSTAYMQLSSLTSEDSAVYFCARSITTVVGCAMDYWGQGTSVTVSSTRDKQLDADVSPKPTIFLPSIAETKLQKAGTYLCLLEKFFPDVIKIHWQEKKSNTILGSQEGNTMKTNDTYMKFSWLTVPEKSLDKEHRCIVRHENNKNGVDQEIIFPPIKTDVITMDPKDNCSKDANDTLLLQLTNTSAYYMYLLLLLKSVVYFAIITCCLLRRTAFCCNGEKS

SEQ ID NO: 14951 - protein, 1051 aa, Artificial Sequence
  Synthetic Polypeptide
MALPVTALLLPLALLLHAARPLEGKPIPNPLLGLDSTGSGDKQLDADVSPKPTIFLPSIAETKLQKAGTYLCLLEKFFPDVIKIHWQEKKSNTILGSQEGNTMKTNDTYMKFSWLTVPEKSLDKEHRCIVRHENNKNGVDQEIIFPPIKTDVITMDPKDNCSKDANDTLLLQLTNTSAYYMYLLLLLKSVVYFAIITCCLLRRTAFCCNGEKSRAKRSGSGATNFSLLKQAGDVEENPGPTSMALPVTALLLPLALLLHAARPACQVQLVESGGGLVQAGDSVTLSCTASGRTFSSYALAWFRQRPGKEREFVAGLRWGGPTNYADSVKDRFTISGDSAKHTMYLQMNSLKPEDTAVYYCGYNPGGWAVPSQYEYDSWGQGTQVTVSSGTGGGGSGGGGSGGGGSEFDIQMTQSPSSLSASVGDRVTITCKASDHINNWLAWYQQKPGQAPKLLIYGATTLETGVPSRFSGSGSGTDYTLTISSLQPEDFATYYCQQSWNTPWTFGQGTKLEIKRGGGGSGGGGSGGGGSQVQLQQPGAELVKPGASVKMSCKASGYAFSSYWINWMKQKPGQGLEWIGQIYPGDGDTNYNGKFKGRATLTADTSSSTAYMQLSSLTSEDSAVYFCARSITTVVGCAMDYWGQGTSVTVSSTREQKLISEEDGSGSQPHTKPSVFVMKNGTNVACLVKEFYPKDIRINLVSSKKITEFDPAIVISPSGKYNAVKLGKYEDSNSVTCSVQHDNKTVHSTDFEVKTDSTDHVKPKETENTKQPSKSCHKPKAIVHTEKVNMMSLTVLGLRMLFAKTVAVNFLLTAKLFFLRAKRSGSGVKQTLNFDLLKLAGDVESNPGPSRGHMTEYKPTVRLATRDDVPRAVRTLAAAFADYPATRHTVDPDRHIERVTELQELFLTRVGLDIGKVWVADDGAAVAVWTTPESVEAGAVFAEIGPRMAELSGSRLAAQQQMEGLLAPHRPKEPAWFLATVGVSPDHQGKGLGSAVVLPGVEAAERAGVPAFLETSAPRNLPFYERLGFTVTADVEVPEGPRTWCMTRKPGA

SEQ ID NO: 14952 - protein, 1176 aa, Artificial Sequence
  Synthetic Polypeptide
MALPVTALLLPLALLLHAARPACQVQLVESGGGLVQAGDSVTLSCTASGRTFSSYALAWFRQRPGKEREFVAGLRWGGPTNYADSVKDRFTISGDSAKHTMYLQMNSLKPEDTAVYYCGYNPGGWAVPSQYEYDSWGQGTQVTVSSGTGGGGSGGGGSGGGGSEFDIQMTQSPSSLSASVGDRVTITCKASDHINNWLAWYQQKPGQAPKLLIYGATTLETGVPSRFSGSGSGTDYTLTISSLQPEDFATYYCQQSWNTPWTFGQGTKLEIKRGQPKANPTVTLFPPSSEELQANKATLVCLISDFYPGAVTVAWKADGSPVKAGVETTKPSKQSNNKYAASSYLSLTPEQWKSHRSYSCQVTHEGSTVEKTVAPTECSGSQSFGLLDPKLCYLLDGILFIYGVILTALFLRVKFSRSADAPAYQQGQNQLYNELNLGRREEYDVLDKRRGRDPEMGGKPQRRKNPQEGLYNELQKDKMAEAYSEIGMKGERRRGKGHDGLYQGLSTATKDTYDALHMQALPPRRAKRSGSGATNFSLLKQAGDVEENPGPTSMDWIWRILFLVGAATGAHSFEQVQLQQPGAELVKPGASVKMSCKASGYAFSSYWINWMKQKPGQGLEWIGQIYPGDGDTNYNGKFKGRATLTADTSSSTAYMQLSSLTSEDSAVYFCARSITTVVGCAMDYWGQGTSVTVSSASTKGPSVFPLAPSSKSTSGGTAALGCLVKDYFPEPVTVSWNSGALTSGVHTFPAVLQSSGLYSLSSVVTVPSSSLGTQTYICNVNHKPSNTKVDKRVEPKSCGTQSFGLLDPKLCYLLDGILFIYGVILTALFLRVKFSRSADAPAYQQGQNQLYNELNLGRREEYDVLDKRRGRDPEMGGKPQRRKNPQEGLYNELQKDKMAEAYSEIGMKGERRRGKGHDGLYQGLSTATKDTYDALHMQALPPRRAKRSGSGVKQTLNFDLLKLAGDVESNPGPSRGHMTEYKPTVRLATRDDVPRAVRTLAAAFADYPATRHTVDPDRHIERVTELQELFLTRVGLDIGKVWVADDGAAVAVWTTPESVEAGAVFAEIGPRMAELSGSRLAAQQQMEGLLAPHRPKEPAWFLATVGVSPDHQGKGLGSAVVLPGVEAAERAGVPAFLETSAPRNLPFYERLGFTVTADVEVPEGPRTWCMTRKPGA

SEQ ID NO: 14953 - protein, 962 aa, Artificial Sequence
  Synthetic Polypeptide
MALPVTALLLPLALLLHAARPACQVQLVESGGGLVQAGDSVTLSCTASGRTFSSYALAWFRQRPGKEREFVAGLRWGGPTNYADSVKDRFTISGDSAKHTMYLQMNSLKPEDTAVYYCGYNPGGWAVPSQYEYDSWGQGTQVTVSSGTGGGGSGGGGSGGGGSEFDIQMTQSPSSLSASVGDRVTITCKASDHINNWLAWYQQKPGQAPKLLIYGATTLETGVPSRFSGSGSGTDYTLTISSLQPEDFATYYCQQSWNTPWTFGQGTKLEIKRLEDLKNVFPPEVAVFEPSEAEISHTQKATLVCLATGFYPDHVELSWWVNGKEVHSGVSTDPQPLKEQPALNDSRYCLSSRLRVSATFWQNPRNHFRCQVQFYGLSENDEWTQDRAKPVTQIVSAEAWGRADCGSQSFGLLDPKLCYLLDGILFIYGVILTALFLRVKFSRSADAPAYQQGQNQLYNELNLGRREEYDVLDKRRGRDPEMGGKPQRRKNPQEGLYNELQKDKMAEAYSEIGMKGERRRGKGHDGLYQGLSTATKDTYDALHMQALPPRRAKRSGSGATNFSLLKQAGDVEENPGPTSMDWIWRILFLVGAATGAHSFEQVQLQQPGAELVKPGASVKMSCKASGYAFSSYWINWMKQKPGQGLEWIGQIYPGDGDTNYNGKFKGRATLTADTSSSTAYMQLSSLTSEDSAVYFCARSITTVVGCAMDYWGQGTSVTVSSTRIQNPDPAVYQLRDSKSSDKSVCLFTDFDSQTNVSQSKDSDVYITDKTVLDMRSMDFKSNSAVAWSNKSDFACANAFNNSIIPEDTFFPSPESSCGTQSFGLLDPKLCYLLDGILFIYGVILTALFLRVKFSRSADAPAYQQGQNQLYNELNLGRREEYDVLDKRRGRDPEMGGKPQRRKNPQEGLYNELQKDKMAEAYSEIGMKGERRRGKGHDGLYQGLSTATKDTYDALHMQALPPR

SEQ ID NO: 14954 - protein, 962 aa, Artificial Sequence
  Synthetic Polypeptide
MALPVTALLLPLALLLHAARPACQVQLVESGGGLVQAGDSVTLSCTASGRTFSSYALAWFRQRPGKEREFVAGLRWGGPTNYADSVKDRFTISGDSAKHTMYLQMNSLKPEDTAVYYCGYNPGGWAVPSQYEYDSWGQGTQVTVSSGTGGGGSGGGGSGGGGSEFDIQMTQSPSSLSASVGDRVTITCKASDHINNWLAWYQQKPGQAPKLLIYGATTLETGVPSRFSGSGSGTDYTLTISSLQPEDFATYYCQQSWNTPWTFGQGTKLEIKRLEDLKNVFPPEVAVFEPSKAEIAHTQKATLVCLATGFYPDHVELSWWVNGKEVHSGVCTDPQPLKEQPALNDSRYCLSSRLRVSATFWQNPRNHFRCQVQFYGLSENDEWTQDRAKPVTQIVSAEAWGRADCGSQSFGLLDPKLCYLLDGILFIYGVILTALFLRVKFSRSADAPAYQQGQNQLYNELNLGRREEYDVLDKRRGRDPEMGGKPQRRKNPQEGLYNELQKDKMAEAYSEIGMKGERRRGKGHDGLYQGLSTATKDTYDALHMQALPPRRAKRSGSGATNFSLLKQAGDVEENPGPTSMDWIWRILFLVGAATGAHSFEQVQLQQPGAELVKPGASVKMSCKASGYAFSSYWINWMKQKPGQGLEWIGQIYPGDGDTNYNGKFKGRATLTADTSSSTAYMQLSSLTSEDSAVYFCARSITTVVGCAMDYWGQGTSVTVSSTRIQNPDPAVYQLRDSKSSDKSVCLFTDFDSQTNVSQSKDSDVYITDKCVLDMRSMDFKSNSAVAWSNKSDFACANAFNNSIIPEDTFFPSSDVPCGTQSFGLLDPKLCYLLDGILFIYGVILTALFLRVKFSRSADAPAYQQGQNQLYNELNLGRREEYDVLDKRRGRDPEMGGKPQRRKNPQEGLYNELQKDKMAEAYSEIGMKGERRRGKGHDGLYQGLSTATKDTYDALHMQALPPR

SEQ ID NO: 14955 - protein, 1033 aa, Artificial Sequence
  Synthetic Polypeptide
MALPVTALLLPLALLLHAARPACQVQLVESGGGLVQAGDSVTLSCTASGRTFSSYALAWFRQRPGKEREFVAGLRWGGPTNYADSVKDRFTISGDSAKHTMYLQMNSLKPEDTAVYYCGYNPGGWAVPSQYEYDSWGQGTQVTVSSGTGGGGSGGGGSGGGGSEFDIQMTQSPSSLSASVGDRVTITCKASDHINNWLAWYQQKPGQAPKLLIYGATTLETGVPSRFSGSGSGTDYTLTISSLQPEDFATYYCQQSWNTPWTFGQGTKLEIKRLEGKPIPNPLLGLDSTGSGEDLKNVFPPEVAVFEPSEAEISHTQKATLVCLATGFYPDHVELSWWVNGKEVHSGVSTDPQPLKEQPALNDSRYCLSSRLRVSATFWQNPRNHFRCQVQFYGLSENDEWTQDRAKPVTQIVSAEAWGRADCGSQSFGLLDPKLCYLLDGILFIYGVILTALFLRVKFSRSADAPAYQQGQNQLYNELNLGRREEYDVLDKRRGRDPEMGGKPQRRKNPQEGLYNELQKDKMAEAYSEIGMKGERRRGKGHDGLYQGLSTATKDTYDALHMQALPPRRAKRSGSGATNFSLLKQAGDVEENPGPTSMDWIWRILFLVGAATGAHSFEQVQLQQPGAELVKPGASVKMSCKASGYAFSSYWINWMKQKPGQGLEWIGQIYPGDGDTNYNGKFKGRATLTADTSSSTAYMQLSSLTSEDSAVYFCARSITTVVGCAMDYWGQGTSVTVSSTREQKLISEEDGSGIQNPDPAVYQLRDSKSSDKSVCLFTDFDSQTNVSQSKDSDVYITDKTVLDMRSMDFKSNSAVAWSNKSDFACANAFNNSIIPEDTFFPSPESSCGTQSFGLLDPKLCYLLDGILFIYGVILTALFLRSKRSRLLHSDYMNMTPRRPGPTRKHYQPYAPPRDFAAYRSRVKFSRSADAPAYQQGQNQLYNELNLGRREEYDVLDKRRGRDPEMGGKPQRRKNPQEGLYNELQKDKMAEAYSEIGMKGERRRGKGHDGLYQGLSTATKDTYDALHMQALPPR

SEQ ID NO: 14956 - protein, 1074 aa, Artificial Sequence
  Synthetic Polypeptide
MALPVTALLLPLALLLHAARPACQVQLVESGGGLVQAGDSVTLSCTASGRTFSSYALAWFRQRPGKEREFVAGLRWGGPTNYADSVKDRFTISGDSAKHTMYLQMNSLKPEDTAVYYCGYNPGGWAVPSQYEYDSWGQGTQVTVSSGTGGGGSGGGGSGGGGSEFDIQMTQSPSSLSASVGDRVTITCKASDHINNWLAWYQQKPGQAPKLLIYGATTLETGVPSRFSGSGSGTDYTLTISSLQPEDFATYYCQQSWNTPWTFGQGTKLEIKRLEGKPIPNPLLGLDSTGSGEDLKNVFPPEVAVFEPSEAEISHTQKATLVCLATGFYPDHVELSWWVNGKEVHSGVSTDPQPLKEQPALNDSRYCLSSRLRVSATFWQNPRNHFRCQVQFYGLSENDEWTQDRAKPVTQIVSAEAWGRADCGSQSFGLLDPKLCYLLDGILFIYGVILTALFLRSKRSRLLHSDYMNMTPRRPGPTRKHYQPYAPPRDFAAYRSRVKFSRSADAPAYQQGQNQLYNELNLGRREEYDVLDKRRGRDPEMGGKPQRRKNPQEGLYNELQKDKMAEAYSEIGMKGERRRGKGHDGLYQGLSTATKDTYDALHMQALPPRRAKRSGSGATNFSLLKQAGDVEENPGPTSMDWIWRILFLVGAATGAHSFEQVQLQQPGAELVKPGASVKMSCKASGYAFSSYWINWMKQKPGQGLEWIGQIYPGDGDTNYNGKFKGRATLTADTSSSTAYMQLSSLTSEDSAVYFCARSITTVVGCAMDYWGQGTSVTVSSTREQKLISEEDGSGIQNPDPAVYQLRDSKSSDKSVCLFTDFDSQTNVSQSKDSDVYITDKTVLDMRSMDFKSNSAVAWSNKSDFACANAFNNSIIPEDTFFPSPESSCGTQSFGLLDPKLCYLLDGILFIYGVILTALFLRSKRSRLLHSDYMNMTPRRPGPTRKHYQPYAPPRDFAAYRSRVKFSRSADAPAYQQGQNQLYNELNLGRREEYDVLDKRRGRDPEMGGKPQRRKNPQEGLYNELQKDKMAEAYSEIGMKGERRRGKGHDGLYQGLSTATKDTYDALHMQALPPR

SEQ ID NO: 14957 - protein, 1035 aa, Artificial Sequence
  Synthetic Polypeptide
MALPVTALLLPLALLLHAARPACQVQLVESGGGLVQAGDSVTLSCTASGRTFSSYALAWFRQRPGKEREFVAGLRWGGPTNYADSVKDRFTISGDSAKHTMYLQMNSLKPEDTAVYYCGYNPGGWAVPSQYEYDSWGQGTQVTVSSGTGGGGSGGGGSGGGGSEFDIQMTQSPSSLSASVGDRVTITCKASDHINNWLAWYQQKPGQAPKLLIYGATTLETGVPSRFSGSGSGTDYTLTISSLQPEDFATYYCQQSWNTPWTFGQGTKLEIKRLEGKPIPNPLLGLDSTGSGEDLKNVFPPEVAVFEPSEAEISHTQKATLVCLATGFYPDHVELSWWVNGKEVHSGVSTDPQPLKEQPALNDSRYCLSSRLRVSATFWQNPRNHFRCQVQFYGLSENDEWTQDRAKPVTQIVSAEAWGRADCGSQSFGLLDPKLCYLLDGILFIYGVILTALFLRVKFSRSADAPAYQQGQNQLYNELNLGRREEYDVLDKRRGRDPEMGGKPQRRKNPQEGLYNELQKDKMAEAYSEIGMKGERRRGKGHDGLYQGLSTATKDTYDALHMQALPPRRAKRSGSGATNFSLLKQAGDVEENPGPTSMDWIWRILFLVGAATGAHSFEQVQLQQPGAELVKPGASVKMSCKASGYAFSSYWINWMKQKPGQGLEWIGQIYPGDGDTNYNGKFKGRATLTADTSSSTAYMQLSSLTSEDSAVYFCARSITTVVGCAMDYWGQGTSVTVSSTREQKLISEEDLGSGIQNPDPAVYQLRDSKSSDKSVCLFTDFDSQTNVSQSKDSDVYITDKTVLDMRSMDFKSNSAVAWSNKSDFACANAFNNSIIPEDTFFPSPESSCGTQSFGLLDPKLCYLLDGILFIYGVILTALFLKRGRKKLLYIFKQPFMRPVQTTQEEDGCSCRFPEEEEGGCELRVKFSRSADAPAYQQGQNQLYNELNLGRREEYDVLDKRRGRDPEMGGKPQRRKNPQEGLYNELQKDKMAEAYSEIGMKGERRRGKGHDGLYQGLSTATKDTYDALHMQALPPR

SEQ ID NO: 14958 - protein, 1077 aa, Artificial Sequence
  Synthetic Polypeptide
MALPVTALLLPLALLLHAARPACQVQLVESGGGLVQAGDSVTLSCTASGRTFSSYALAWFRQRPGKEREFVAGLRWGGPTNYADSVKDRFTISGDSAKHTMYLQMNSLKPEDTAVYYCGYNPGGWAVPSQYEYDSWGQGTQVTVSSGTGGGGSGGGGSGGGGSEFDIQMTQSPSSLSASVGDRVTITCKASDHINNWLAWYQQKPGQAPKLLIYGATTLETGVPSRFSGSGSGTDYTLTISSLQPEDFATYYCQQSWNTPWTFGQGTKLEIKRLEGKPIPNPLLGLDSTGSGEDLKNVFPPEVAVFEPSEAEISHTQKATLVCLATGFYPDHVELSWWVNGKEVHSGVSTDPQPLKEQPALNDSRYCLSSRLRVSATFWQNPRNHFRCQVQFYGLSENDEWTQDRAKPVTQIVSAEAWGRADCGSQSFGLLDPKLCYLLDGILFIYGVILTALFLKRGRKKLLYIFKQPFMRPVQTTQEEDGCSCRFPEEEEGGCELRVKFSRSADAPAYQQGQNQLYNELNLGRREEYDVLDKRRGRDPEMGGKPQRRKNPQEGLYNELQKDKMAEAYSEIGMKGERRRGKGHDGLYQGLSTATKDTYDALHMQALPPRRAKRSGSGATNFSLLKQAGDVEENPGPTSMDWIWRILFLVGAATGAHSFEQVQLQQPGAELVKPGASVKMSCKASGYAFSSYWINWMKQKPGQGLEWIGQIYPGDGDTNYNGKFKGRATLTADTSSSTAYMQLSSLTSEDSAVYFCARSITTVVGCAMDYWGQGTSVTVSSTREQKLISEEDLGSGIQNPDPAVYQLRDSKSSDKSVCLFTDFDSQTNVSQSKDSDVYITDKTVLDMRSMDFKSNSAVAWSNKSDFACANAFNNSIIPEDTFFPSPESSCGTQSFGLLDPKLCYLLDGILFIYGVILTALFLKRGRKKLLYIFKQPFMRPVQTTQEEDGCSCRFPEEEEGGCELRVKFSRSADAPAYQQGQNQLYNELNLGRREEYDVLDKRRGRDPEMGGKPQRRKNPQEGLYNELQKDKMAEAYSEIGMKGERRRGKGHDGLYQGLSTATKDTYDALHMQALPPR

SEQ ID NO: 14959 - protein, 967 aa, Artificial Sequence
  Synthetic Polypeptide
MALPVTALLLPLALLLHAARPACQVQLVESGGGLVQAGDSVTLSCTASGRTFSSYALAWFRQRPGKEREFVAGLRWGGPTNYADSVKDRFTISGDSAKHTMYLQMNSLKPEDTAVYYCGYNPGGWAVPSQYEYDSWGQGTQVTVSSGTGGGGSGGGGSGGGGSEFDIQMTQSPSSLSASVGDRVTITCKASDHINNWLAWYQQKPGQAPKLLIYGATTLETGVPSRFSGSGSGTDYTLTISSLQPEDFATYYCQQSWNTPWTFGQGTKLEIKRLEQSFGLLDPKLCYLLDGILFIYGVILTALFLRVKFSRSADAPAYQQGQNQLYNELNLGRREEYDVLDKRRGRDPEMGGKPQRRKNPQEGLYNELQKDKMAEAYSEIGMKGERRRGKGHDGLYQGLSTATKDTYDALHMQALPPRRAKRSGSGATNFSLLKQAGDVEENPGPTSMDWIWRILFLVGAATGAHSFEQVQLQQPGAELVKPGASVKMSCKASGYAFSSYWINWMKQKPGQGLEWIGQIYPGDGDTNYNGKFKGRATLTADTSSSTAYMQLSSLTSEDSAVYFCARSITTVVGCAMDYWGQGTSVTVSSTRQSFGLLDPKLCYLLDGILFIYGVILTALFLRVKFSRSADAPAYQQGQNQLYNELNLGRREEYDVLDKRRGRDPEMGGKPQRRKNPQEGLYNELQKDKMAEAYSEIGMKGERRRGKGHDGLYQGLSTATKDTYDALHMQALPPRRAKRSGSGVKQTLNFDLLKLAGDVESNPGPSRGHMTEYKPTVRLATRDDVPRAVRTLAAAFADYPATRHTVDPDRHIERVTELQELFLTRVGLDIGKVWVADDGAAVAVWTTPESVEAGAVFAEIGPRMAELSGSRLAAQQQMEGLLAPHRPKEPAWFLATVGVSPDHQGKGLGSAVVLPGVEAAERAGVPAFLETSAPRNLPFYERLGFTVTADVEVPEGPRTWCMTRKPGA

SEQ ID NO: 14960 - protein, 792 aa, Artificial Sequence
  Synthetic Polypeptide
MALPVTALLLPLALLLHAARPACQVQLVESGGGLVQAGDSVTLSCTASGRTFSSYALAWFRQRPGKEREFVAGLRWGGPTNYADSVKDRFTISGDSAKHTMYLQMNSLKPEDTAVYYCGYNPGGWAVPSQYEYDSWGQGTQVTVSSGTGGGGSGGGGSGGGGSEFDIQMTQSPSSLSASVGDRVTITCKASDHINNWLAWYQQKPGQAPKLLIYGATTLETGVPSRFSGSGSGTDYTLTISSLQPEDFATYYCQQSWNTPWTFGQGTKLEIKRLEGQPKANPTVTLFPPSSEELQANKATLVCLISDFYPGAVTVAWKADGSPVKAGVETTKPSKQSNNKYAASSYLSLTPEQWKSHRSYSCQVTHEGSTVEKTVAPTECSPIKTDVITMDPKDNCSKDANDTLLLQLTNTSAYYMYLLLLLKSVVYFAIITCCLLRRTAFCCNGEKSRAKRSGSGATNFSLLKQAGDVEENPGPTSMDWIWRILFLVGAATGAHSFEQVQLQQPGAELVKPGASVKMSCKASGYAFSSYWINWMKQKPGQGLEWIGQIYPGDGDTNYNGKFKGRATLTADTSSSTAYMQLSSLTSEDSAVYFCARSITTVVGCAMDYWGQGTSVTVSSTRASTKGPSVFPLAPSSKSTSGGTAALGCLVKDYFPEPVTVSWNSGALTSGVHTFPAVLQSSGLYSLSSVVTVPSSSLGTQTYICNVNHKPSNTKVDKRVEPKSCEVKTDSTDHVKPKETENTKQPSKSCHKPKAIVHTEKVNMMSLTVLGLRMLFAKTVAVNFLLTAKLFFL

SEQ ID NO: 14961 - protein, 770 aa, Artificial Sequence
  Synthetic Polypeptide
MALPVTALLLPLALLLHAARPACQVQLVESGGGLVQAGDSVTLSCTASGRTFSSYALAWFRQRPGKEREFVAGLRWGGPTNYADSVKDRFTISGDSAKHTMYLQMNSLKPEDTAVYYCGYNPGGWAVPSQYEYDSWGQGTQVTVSSGTGGGGSGGGGSGGGGSEFDIQMTQSPSSLSASVGDRVTITCKASDHINNWLAWYQQKPGQAPKLLIYGATTLETGVPSRFSGSGSGTDYTLTISSLQPEDFATYYCQQSWNTPWTFGQGTKLEIKRLEGQPKANPTVTLFPPSSEELQANKATLVCLISDFYPGAVTVAWKADGSPVKAGVETTKPSKQSNNKYAASSYLSLTPEQWKSHRSYSCQVTHEGSTVEKTVAPTECSGRADCGITSASYHQGVLSATILYEILLGKATLYAVLVSALVLMAMVKRKDSRGRAKRSGSGATNFSLLKQAGDVEENPGPTSMDWIWRILFLVGAATGAHSFEQVQLQQPGAELVKPGASVKMSCKASGYAFSSYWINWMKQKPGQGLEWIGQIYPGDGDTNYNGKFKGRATLTADTSSSTAYMQLSSLTSEDSAVYFCARSITTVVGCAMDYWGQGTSVTVSSTRASTKGPSVFPLAPSSKSTSGGTAALGCLVKDYFPEPVTVSWNSGALTSGVHTFPAVLQSSGLYSLSSVVTVPSSSLGTQTYICNVNHKPSNTKVDKRVEPKSCIPEDTFFPSSDVPCDVKLVEKSFETDTNLNFQNLSVIGFRILLLKVAGFNLLMTLRLWSS

SEQ ID NO: 14962 - protein, 770 aa, Artificial Sequence
  Synthetic Polypeptide
MALPVTALLLPLALLLHAARPACQVQLVESGGGLVQAGDSVTLSCTASGRTFSSYALAWFRQRPGKEREFVAGLRWGGPTNYADSVKDRFTISGDSAKHTMYLQMNSLKPEDTAVYYCGYNPGGWAVPSQYEYDSWGQGTQVTVSSGTGGGGSGGGGSGGGGSEFDIQMTQSPSSLSASVGDRVTITCKASDHINNWLAWYQQKPGQAPKLLIYGATTLETGVPSRFSGSGSGTDYTLTISSLQPEDFATYYCQQSWNTPWTFGQGTKLEIKRLEGQPKANPTVTLFPPSSEELQANKATLVCLISDFYPGAVTVAWKADGSPVKAGVETTKPSKQSNNKYAASSYLSLTPEQWKSHRSYSCQVTHEGSTVEKTVAPTECSGRADCGFTSESYQQGVLSATILYEILLGKATLYAVLVSALVLMAMVKRKDSRGRAKRSGSGATNFSLLKQAGDVEENPGPTSMDWIWRILFLVGAATGAHSFEQVQLQQPGAELVKPGASVKMSCKASGYAFSSYWINWMKQKPGQGLEWIGQIYPGDGDTNYNGKFKGRATLTADTSSSTAYMQLSSLTSEDSAVYFCARSITTVVGCAMDYWGQGTSVTVSSTRASTKGPSVFPLAPSSKSTSGGTAALGCLVKDYFPEPVTVSWNSGALTSGVHTFPAVLQSSGLYSLSSVVTVPSSSLGTQTYICNVNHKPSNTKVDKRVEPKSCIPEDTFFPSPESSCDVKLVEKSFETDTNLNFQNLSVIGFRILLLKVAGFNLLMTLRLWSS

SEQ ID NO: 14963 - protein, 596 aa, Artificial Sequence
  Synthetic Polypeptide
MALPVTALLLPLALLLHAARPACQVQLVESGGGLVQAGDSVTLSCTASGRTFSSYALAWFRQRPGKEREFVAGLRWGGPTNYADSVKDRFTISGDSAKHTMYLQMNSLKPEDTAVYYCGYNPGGWAVPSQYEYDSWGQGTQVTVSSGTGGGGSGGGGSGGGGSEFDIQMTQSPSSLSASVGDRVTITCKASDHINNWLAWYQQKPGQAPKLLIYGATTLETGVPSRFSGSGSGTDYTLTISSLQPEDFATYYCQQSWNTPWTFGQGTKLEIKRGGGGSGGGGSGGGGSQVQLQQPGAELVKPGASVKMSCKASGYAFSSYWINWMKQKPGQGLEWIGQIYPGDGDTNYNGKFKGRATLTADTSSSTAYMQLSSLTSEDSAVYFCARSITTVVGCAMDYWGQGTSVTVSSTRDGNEEMGGITQTPYKVSISGTTVILTCPQYPGSEILWQHNDKNIGGDEDDKNIGSDEDHLSLKEFSELEQSGYYVCYPRGSKPEDANFYLYLRARVCENCMEMDVMSVATIVIVDICITGGLLLLVYYWSKNRKAKAKPVTRGAGAGGRQRGQNKERPPPVPNPDYEPIRKGQRDLYSGLNQRRI

SEQ ID NO: 14964 - protein, 561 aa, Artificial Sequence
  Synthetic Polypeptide
MALPVTALLLPLALLLHAARPACQVQLVESGGGLVQAGDSVTLSCTASGRTFSSYALAWFRQRPGKEREFVAGLRWGGPTNYADSVKDRFTISGDSAKHTMYLQMNSLKPEDTAVYYCGYNPGGWAVPSQYEYDSWGQGTQVTVSSGTGGGGSGGGGSGGGGSEFDIQMTQSPSSLSASVGDRVTITCKASDHINNWLAWYQQKPGQAPKLLIYGATTLETGVPSRFSGSGSGTDYTLTISSLQPEDFATYYCQQSWNTPWTFGQGTKLEIKRGGGGSGGGGSGGGGSQVQLQQPGAELVKPGASVKMSCKASGYAFSSYWINWMKQKPGQGLEWIGQIYPGDGDTNYNGKFKGRATLTADTSSSTAYMQLSSLTSEDSAVYFCARSITTVVGCAMDYWGQGTSVTVSSTRFKIPIEELEDRVFVNCNTSITWVEGTVGTLLSDITRLDLGKRILDPRGIYRCNGTDIYKDKESTVQVHYRMCQSCVELDPATVAGIIVTDVIATLLLALGVFCFAGHETGRLSGAADTQALLRNDQVYQPLRDRDDAQYSHLGGNWARNK

SEQ ID NO: 14965 - protein, 571 aa, Artificial Sequence
  Synthetic Polypeptide
MALPVTALLLPLALLLHAARPACQVQLVESGGGLVQAGDSVTLSCTASGRTFSSYALAWFRQRPGKEREFVAGLRWGGPTNYADSVKDRFTISGDSAKHTMYLQMNSLKPEDTAVYYCGYNPGGWAVPSQYEYDSWGQGTQVTVSSGTGGGGSGGGGSGGGGSEFDIQMTQSPSSLSASVGDRVTITCKASDHINNWLAWYQQKPGQAPKLLIYGATTLETGVPSRFSGSGSGTDYTLTISSLQPEDFATYYCQQSWNTPWTFGQGTKLEIKRGGGGSGGGGSGGGGSQVQLQQPGAELVKPGASVKMSCKASGYAFSSYWINWMKQKPGQGLEWIGQIYPGDGDTNYNGKFKGRATLTADTSSSTAYMQLSSLTSEDSAVYFCARSITTVVGCAMDYWGQGTSVTVSSTRQSIKGNHLVKVYDYQEDGSVLLTCDAEAKNITWFKDGKMIGFLTEDKKKWNLGSNAKDPRGMYQCKGSQNKSKPLQVYYRMCQNCIELNAATISGFLFAEIVSIFVLAVGVYFIAGQDGVRQSRASDKQTLLPNDQLYQPLKDREDDQYSHLQGNQLRRN

SEQ ID NO: 14966 - protein, 554 aa, Artificial Sequence
  Synthetic Polypeptide
MALPVTALLLPLALLLHAARPACQVQLVESGGGLVQAGDSVTLSCTASGRTFSSYALAWFRQRPGKEREFVAGLRWGGPTNYADSVKDRFTISGDSAKHTMYLQMNSLKPEDTAVYYCGYNPGGWAVPSQYEYDSWGQGTQVTVSSGTGGGGSGGGGSGGGGSEFDIQMTQSPSSLSASVGDRVTITCKASDHINNWLAWYQQKPGQAPKLLIYGATTLETGVPSRFSGSGSGTDYTLTISSLQPEDFATYYCQQSWNTPWTFGQGTKLEIKRGGGGSGGGGSGGGGSQVQLQQPGAELVKPGASVKMSCKASGYAFSSYWINWMKQKPGQGLEWIGQIYPGDGDTNYNGKFKGRATLTADTSSSTAYMQLSSLTSEDSAVYFCARSITTVVGCAMDYWGQGTSVTVSSTRQSFGLLDPKLCYLLDGILFIYGVILTALFLRVKFSRSADAPAYQQGQNQLYNELNLGRREEYDVLDKRRGRDPEMGGKPQRRKNPQEGLYNELQKDKMAEAYSEIGMKGERRRGKGHDGLYQGLSTATKDTYDALHMQALPPR

SEQ ID NO: 14967 - protein, 787 aa, Artificial Sequence
  Synthetic Polypeptide
MALPVTALLLPLALLLHAARPACQVQLVESGGGLVQAGDSVTLSCTASGRTFSSYALAWFRQRPGKEREFVAGLRWGGPTNYADSVKDRFTISGDSAKHTMYLQMNSLKPEDTAVYYCGYNPGGWAVPSQYEYDSWGQGTQVTVSSGTGGGGSGGGGSGGGGSEFDIQMTQSPSSLSASVGDRVTITCKASDHINNWLAWYQQKPGQAPKLLIYGATTLETGVPSRFSGSGSGTDYTLTISSLQPEDFATYYCQQSWNTPWTFGQGTKLEIKRGGGGSGGGGSGGGGSQVQLQQPGAELVKPGASVKMSCKASGYAFSSYWINWMKQKPGQGLEWIGQIYPGDGDTNYNGKFKGRATLTADTSSSTAYMQLSSLTSEDSAVYFCARSITTVVGCAMDYWGQGTSVTVSSTRGSGIQNPDPAVYQLRDSKSSDKSVCLFTDFDSQTNVSQSKDSDVYITDKTVLDMRSMDFKSNSAVAWSNKSDFACANAFNNSIIPEDTFFPSPESSCDVKLVEKSFETDTNLNFQNLSVIGFRILLLKVAGFNLLMTLRLWSSRAKRSGSGVKQTLNFDLLKLAGDVESNPGPSRGHMTEYKPTVRLATRDDVPRAVRTLAAAFADYPATRHTVDPDRHIERVTELQELFLTRVGLDIGKVWVADDGAAVAVWTTPESVEAGAVFAEIGPRMAELSGSRLAAQQQMEGLLAPHRPKEPAWFLATVGVSPDHQGKGLGSAVVLPGVEAAERAGVPAFLETSAPRNLPFYERLGFTVTADVEVPEGPRTWCMTRKPGA

SEQ ID NO: 14968 - protein, 819 aa, Artificial Sequence
  Synthetic Polypeptide
MALPVTALLLPLALLLHAARPACQVQLVESGGGLVQAGDSVTLSCTASGRTFSSYALAWFRQRPGKEREFVAGLRWGGPTNYADSVKDRFTISGDSAKHTMYLQMNSLKPEDTAVYYCGYNPGGWAVPSQYEYDSWGQGTQVTVSSGTGGGGSGGGGSGGGGSEFDIQMTQSPSSLSASVGDRVTITCKASDHINNWLAWYQQKPGQAPKLLIYGATTLETGVPSRFSGSGSGTDYTLTISSLQPEDFATYYCQQSWNTPWTFGQGTKLEIKRGGGGSGGGGSGGGGSQVQLQQPGAELVKPGASVKMSCKASGYAFSSYWINWMKQKPGQGLEWIGQIYPGDGDTNYNGKFKGRATLTADTSSSTAYMQLSSLTSEDSAVYFCARSITTVVGCAMDYWGQGTSVTVSSLEDLKNVFPPEVAVFEPSEAEISHTQKATLVCLATGFYPDHVELSWWVNGKEVHSGVSTDPQPLKEQPALNDSRYCLSSRLRVSATFWQNPRNHFRCQVQFYGLSENDEWTQDRAKPVTQIVSAEAWGRADCGFTSESYQQGVLSATILYEILLGKATLYAVLVSALVLMAMVKRKDSRGRAKRSGSGATNFSLLKQAGDVEENPGPTRGHMTEYKPTVRLATRDDVPRAVRTLAAAFADYPATRHTVDPDRHIERVTELQELFLTRVGLDIGKVWVADDGAAVAVWTTPESVEAGAVFAEIGPRMAELSGSRLAAQQQMEGLLAPHRPKEPAWFLATVGVSPDHQGKGLGSAVVLPGVEAAERAGVPAFLETSAPRNLPFYERLGFTVTADVEVPEGPRTWCMTRKPGA

SEQ ID NO: 14969 - protein, 869 aa, Artificial Sequence
  Synthetic Polypeptide
MALPVTALLLPLALLLHAARPACQVQLVESGGGLVQAGDSVTLSCTASGRTFSSYALAWFRQRPGKEREFVAGLRWGGPTNYADSVKDRFTISGDSAKHTMYLQMNSLKPEDTAVYYCGYNPGGWAVPSQYEYDSWGQGTQVTVSSGTGGGGSGGGGSGGGGSEFDIQMTQSPSSLSASVGDRVTITCKASDHINNWLAWYQQKPGQAPKLLIYGATTLETGVPSRFSGSGSGTDYTLTISSLQPEDFATYYCQQSWNTPWTFGQGTKLEIKRGGGGSGGGGSGGGGSQVQLQQPGAELVKPGASVKMSCKASGYAFSSYWINWMKQKPGQGLEWIGQIYPGDGDTNYNGKFKGRATLTADTSSSTAYMQLSSLTSEDSAVYFCARSITTVVGCAMDYWGQGTSVTVSSTREQKLISEEDLGSGTPFPSLAPPIMLLVDGKQQMVVVCLVLDVAPPGLDSPIWFSAGNGSALDAFTYGPSPATDGTWTNLAHLSLPSEELASWEPLVCHTGPGAEGHSRSTQPMHLSGEASTARTCPQEPLRGTPGGALWLGVLRLLLFKLLLFDLLLTCSCLCDPAGPLPSPATTTRLRALGSHRLHPATETGGREATSSPRPQPRDRRWGDTPPGRKPGSPVRAKRSGSGVKQTLNFDLLKLAGDVESNPGPSRSRGHMTEYKPTVRLATRDDVPRAVRTLAAAFADYPATRHTVDPDRHIERVTELQELFLTRVGLDIGKVWVADDGAAVAVWTTPESVEAGAVFAEIGPRMAELSGSRLAAQQQMEGLLAPHRPKEPAWFLATVGVSPDHQGKGLGSAVVLPGVEAAERAGVPAFLETSAPRNLPFYERLGFTVTADVEVPEGPRTWCMTRKPGA

SEQ ID NO: 14970 - protein, 683 aa, Artificial Sequence
  Synthetic Polypeptide
MALPVTALLLPLALLLHAARPACQVQLVESGGGLVQAGDSVTLSCTASGRTFSSYALAWFRQRPGKEREFVAGLRWGGPTNYADSVKDRFTISGDSAKHTMYLQMNSLKPEDTAVYYCGYNPGGWAVPSQYEYDSWGQGTQVTVSSGTGGGGSGGGGSGGGGSEFDIQMTQSPSSLSASVGDRVTITCKASDHINNWLAWYQQKPGQAPKLLIYGATTLETGVPSRFSGSGSGTDYTLTISSLQPEDFATYYCQQSWNTPWTFGQGTKLEIKRLEDLKNVFPPEVAVFEPSEAEISHTQKATLVCLATGFYPDHVELSWWVNGKEVHSGVSTDPQPLKEQPALNDSRYCLSSRLRVSATFWQNPRNHFRCQVQFYGLSENDEWTQDRAKPVTQIVSAEAWGRADCGFTSESYQQGVLSATILYEILLGKATLYAVLVSALVLMAMVKRKDSRGRAKRSGSGATNFSLLKQAGDVEENPGPTRGHMTEYKPTVRLATRDDVPRAVRTLAAAFADYPATRHTVDPDRHIERVTELQELFLTRVGLDIGKVWVADDGAAVAVWTTPESVEAGAVFAEIGPRMAELSGSRLAAQQQMEGLLAPHRPKEPAWFLATVGVSPDHQGKGLGSAVVLPGVEAAERAGVPAFLETSAPRNLPFYERLGFTVTADVEVPEGPRTWCMTRKPGA

SEQ ID NO: 14971 - protein, 453 aa, Artificial Sequence
  Synthetic Polypeptide
MALPVTALLLPLALLLHAARPACQVQLVESGGGLVQAGDSVTLSCTASGRTFSSYALAWFRQRPGKEREFVAGLRWGGPTNYADSVKDRFTISGDSAKHTMYLQMNSLKPEDTAVYYCGYNPGGWAVPSQYEYDSWGQGTQVTVSSGTGGGGSGGGGSGGGGSEFDIQMTQSPSSLSASVGDRVTITCKASDHINNWLAWYQQKPGQAPKLLIYGATTLETGVPSRFSGSGSGTDYTLTISSLQPEDFATYYCQQSWNTPWTFGQGTKLEIKRLEDLKNVFPPEVAVFEPSEAEISHTQKATLVCLATGFYPDHVELSWWVNGKEVHSGVSTDPQPLKEQPALNDSRYCLSSRLRVSATFWQNPRNHFRCQVQFYGLSENDEWTQDRAKPVTQIVSAEAWGRADCGFTSESYQQGVLSATILYEILLGKATLYAVLVSALVLMAMVKRKDSRG

SEQ ID NO: 14972 - protein, 450 aa, Artificial Sequence; identical to SEQ ID NO: 14845
  Synthetic Polypeptide

SEQ ID NO: 14973 - protein, 284 aa, Artificial Sequence; identical to SEQ ID NO: 14846
  Synthetic Polypeptide

SEQ ID NO: 14974 - protein, 701 aa, Artificial Sequence
  Synthetic Polypeptide
MALPVTALLLPLALLLHAARPACQVQLVESGGGLVQAGDSVTLSCTASGRTFSSYALAWFRQRPGKEREFVAGLRWGGPTNYADSVKDRFTISGDSAKHTMYLQMNSLKPEDTAVYYCGYNPGGWAVPSQYEYDSWGQGTQVTVSSGTGGGGSGGGGSGGGGSEFDIQMTQSPSSLSASVGDRVTITCKASDHINNWLAWYQQKPGQAPKLLIYGATTLETGVPSRFSGSGSGTDYTLTISSLQPEDFATYYCQQSWNTPWTFGQGTKLEIKRLEGKPIPNPLLGLDSTGSGEDLKNVFPPEVAVFEPSEAEISHTQKATLVCLATGFYPDHVELSWWVNGKEVHSGVCTDPQPLKEQPALNDSRYCLSSRLRVSATFWQNPRNHFRCQVQFYGLSENDEWTQDRAKPVTQIVSAEAWGRADCGFTSESYQQGVLSATILYEILLGKATLYAVLVSALVLMAMVKRKDSRGRAKRSGSGATNFSLLKQAGDVEENPGPTRGHMTEYKPTVRLATRDDVPRAVRTLAAAFADYPATRHTVDPDRHIERVTELQELFLTRVGLDIGKVWVADDGAAVAVWTTPESVEAGAVFAEIGPRMAELSGSRLAAQQQMEGLLAPHRPKEPAWFLATVGVSPDHQGKGLGSAVVLPGVEAAERAGVPAFLETSAPRNLPFYERLGFTVTADVEVPEGPRTWCMTRKPGA

SEQ ID NO: 14975 - protein, 471 aa, Artificial Sequence
  Synthetic Polypeptide
MALPVTALLLPLALLLHAARPACQVQLVESGGGLVQAGDSVTLSCTASGRTFSSYALAWFRQRPGKEREFVAGLRWGGPTNYADSVKDRFTISGDSAKHTMYLQMNSLKPEDTAVYYCGYNPGGWAVPSQYEYDSWGQGTQVTVSSGTGGGGSGGGGSGGGGSEFDIQMTQSPSSLSASVGDRVTITCKASDHINNWLAWYQQKPGQAPKLLIYGATTLETGVPSRFSGSGSGTDYTLTISSLQPEDFATYYCQQSWNTPWTFGQGTKLEIKRLEGKPIPNPLLGLDSTGSGEDLKNVFPPEVAVFEPSEAEISHTQKATLVCLATGFYPDHVELSWWVNGKEVHSGVCTDPQPLKEQPALNDSRYCLSSRLRVSATFWQNPRNHFRCQVQFYGLSENDEWTQDRAKPVTQIVSAEAWGRADCGFTSESYQQGVLSATILYEILLGKATLYAVLVSALVLMAMVKRKDSRG

SEQ ID NO: 14976 - protein, 462 aa, Artificial Sequence; identical to SEQ ID NO: 14849
  Synthetic Polypeptide

SEQ ID NO: 14977 - protein, 296 aa, Artificial Sequence; identical to SEQ ID NO: 14850
  Synthetic Polypeptide

SEQ ID NO: 14978 - protein, 787 aa, Artificial Sequence
  Synthetic Polypeptide
MALPVTALLLPLALLLHAARPACQVQLVESGGGLVQAGDSVTLSCTASGRTFSSYALAWFRQRPGKEREFVAGLRWGGPTNYADSVKDRFTISGDSAKHTMYLQMNSLKPEDTAVYYCGYNPGGWAVPSQYEYDSWGQGTQVTVSSGTGGGGSGGGGSGGGGSEFDIQMTQSPSSLSASVGDRVTITCKASDHINNWLAWYQQKPGQAPKLLIYGATTLETGVPSRFSGSGSGTDYTLTISSLQPEDFATYYCQQSWNTPWTFGQGTKLEIKRGGGGSGGGGSGGGGSQVQLQQPGAELVKPGASVKMSCKASGYAFSSYWINWMKQKPGQGLEWIGQIYPGDGDTNYNGKFKGRATLTADTSSSTAYMQLSSLTSEDSAVYFCARSITTVVGCAMDYWGQGTSVTVSSTRGSGIQNPDPAVYQLRDSKSSDKSVCLFTDFDSQTNVSQSKDSDVYITDKTVLDMRSMDFKSNSAVAWSNKSDFACANAFNNSIIPEDTFFPSSDVPCDVKLVEKSFETDTNLNFQNLSVIGFRILLLKVAGFNLLMTLRLWSSRAKRSGSGVKQTLNFDLLKLAGDVESNPGPSRGHMTEYKPTVRLATRDDVPRAVRTLAAAFADYPATRHTVDPDRHIERVTELQELFLTRVGLDIGKVWVADDGAAVAVWTTPESVEAGAVFAEIGPRMAELSGSRLAAQQQMEGLLAPHRPKEPAWFLATVGVSPDHQGKGLGSAVVLPGVEAAERAGVPAFLETSAPRNLPFYERLGFTVTADVEVPEGPRTWCMTRKPGA

SEQ ID NO: 14979 - protein, 819 aa, Artificial Sequence
  Synthetic Polypeptide
MALPVTALLLPLALLLHAARPACQVQLVESGGGLVQAGDSVTLSCTASGRTFSSYALAWFRQRPGKEREFVAGLRWGGPTNYADSVKDRFTISGDSAKHTMYLQMNSLKPEDTAVYYCGYNPGGWAVPSQYEYDSWGQGTQVTVSSGTGGGGSGGGGSGGGGSEFDIQMTQSPSSLSASVGDRVTITCKASDHINNWLAWYQQKPGQAPKLLIYGATTLETGVPSRFSGSGSGTDYTLTISSLQPEDFATYYCQQSWNTPWTFGQGTKLEIKRGGGGSGGGGSGGGGSQVQLQQPGAELVKPGASVKMSCKASGYAFSSYWINWMKQKPGQGLEWIGQIYPGDGDTNYNGKFKGRATLTADTSSSTAYMQLSSLTSEDSAVYFCARSITTVVGCAMDYWGQGTSVTVSSLEDLKNVFPPEVAVFEPSKAEIAHTQKATLVCLATGFYPDHVELSWWVNGKEVHSGVSTDPQPLKEQPALNDSRYCLSSRLRVSATFWQNPRNHFRCQVQFYGLSENDEWTQDRAKPVTQIVSAEAWGRADCGITSASYHQGVLSATILYEILLGKATLYAVLVSALVLMAMVKRKDSRGRAKRSGSGATNFSLLKQAGDVEENPGPTRGHMTEYKPTVRLATRDDVPRAVRTLAAAFADYPATRHTVDPDRHIERVTELQELFLTRVGLDIGKVWVADDGAAVAVWTTPESVEAGAVFAEIGPRMAELSGSRLAAQQQMEGLLAPHRPKEPAWFLATVGVSPDHQGKGLGSAVVLPGVEAAERAGVPAFLETSAPRNLPFYERLGFTVTADVEVPEGPRTWCMTRKPGA

SEQ ID NO: 14980 - protein, 1305 aa, Artificial Sequence
  Synthetic Polypeptide
MALPVTALLLPLALLLHAARPACQVQLVESGGGLVQAGDSVTLSCTASGRTFSSYALAWFRQRPGKEREFVAGLRWGGPTNYADSVKDRFTISGDSAKHTMYLQMNSLKPEDTAVYYCGYNPGGWAVPSQYEYDSWGQGTQVTVSSGTGGGGSGGGGSGGGGSEFDIQMTQSPSSLSASVGDRVTITCKASDHINNWLAWYQQKPGQAPKLLIYGATTLETGVPSRFSGSGSGTDYTLTISSLQPEDFATYYCQQSWNTPWTFGQGTKLEIKRLEIQNPDPAVYQLRDSKSSDKSVCLFTDFDSQTNVSQSKDSDVYITDKCVLDMRSMDFKSNSAVAWSNKSDFACANAFNNSIIPEDTFFPSSDVPCDVKLVEKSFETDTNLNFQNLSVIGFRILLLKVAGFNLLMTLRLWSSRAKRSGSGVKQTLNFDLLKLAGDVESNPGPTSMDWIWRILFLVGAATGAHSGPLFNQEVQIPLTESYCGPCPKNWICYKNNCYQFFDESKNWYESQASCMSQNASLLKVYSKEDQDLLKLVKSYHWMGLVHIPTNGSWQWEDGSILSPNLLTIIEMQKGDCALYASSFKGYIENCSTPNTYICMQRTVGGGGSGGGGSGGGGSDLFNQEVQIPLTESYCGPCPKNWICYKNNCYQFFDESKNWYESQASCMSQNASLLKVYSKEDQDLLKLVKSYHWMGLVHIPTNGSWQWEDGSILSPNLLTIIEMQKGDCALYASSFKGYIENCSTPNTYICMQRTVGSGGGGSGGGGSGGGGSFEQVQLQQPGAELVKPGASVKMSCKASGYAFSSYWINWMKQKPGQGLEWIGQIYPGDGDTNYNGKFKGRATLTADTSSSTAYMQLSSLTSEDSAVYFCARSITTVVGCAMDYWGQGTSVTVSSTREDLKNVFPPEVAVFEPSKAEIAHTQKATLVCLATGFYPDHVELSWWVNGKEVHSGVCTDPQPLKEQPALNDSRYCLSSRLRVSATFWQNPRNHFRCQVQFYGLSENDEWTQDRAKPVTQIVSAEAWGRADCGITSASYHQGVLSATILYEILLGKATLYAVLVSALVLMAMVKRKDSRGRAKRSGSGATNFSLLKQAGDVEENPGPSRGHMTEYKPTVRLATRDDVPRAVRTLAAAFADYPATRHTVDPDRHIERVTELQELFLTRVGLDIGKVWVADDGAAVAVWTTPESVEAGAVFAEIGPRMAELSGSRLAAQQQMEGLLAPHRPKEPAWFLATVGVSPDHQGKGLGSAVVLPGVEAAERAGVPAFLETSAPRNLPFYERLGFTVTADVEVPEGPRTWCMTRKPGA

SEQ ID NO: 14981 - protein, 1304 aa, Artificial Sequence
  Synthetic Polypeptide
MALPVTALLLPLALLLHAARPACQVQLVESGGGLVQAGDSVTLSCTASGRTFSSYALAWFRQRPGKEREFVAGLRWGGPTNYADSVKDRFTISGDSAKHTMYLQMNSLKPEDTAVYYCGYNPGGWAVPSQYEYDSWGQGTQVTVSSGTGGGGSGGGGSGGGGSEFDIQMTQSPSSLSASVGDRVTITCKASDHINNWLAWYQQKPGQAPKLLIYGATTLETGVPSRFSGSGSGTDYTLTISSLQPEDFATYYCQQSWNTPWTFGQGTKLEIKRLEDLKNVFPPEVAVFEPSKAEIAHTQKATLVCLATGFYPDHVELSWWVNGKEVHSGVCTDPQPLKEQPALNDSRYCLSSRLRVSATFWQNPRNHFRCQVQFYGLSENDEWTQDRAKPVTQIVSAEAWGRADCGITSASYHQGVLSATILYEILLGKATLYAVLVSALVLMAMVKRKDSRGRAKRSGSGATNFSLLKQAGDVEENPGPTSMDWIWRILFLVGAATGAHSGPLFNQEVQIPLTESYCGPCPKNWICYKNNCYQFFDESKNWYESQASCMSQNASLLKVYSKEDQDLLKLVKSYHWMGLVHIPTNGSWQWEDGSILSPNLLTIIEMQKGDCALYASSFKGYIENCSTPNTYICMQRTVGGGGSGGGGSGGGGSDLFNQEVQIPLTESYCGPCPKNWICYKNNCYQFFDESKNWYESQASCMSQNASLLKVYSKEDQDLLKLVKSYHWMGLVHIPTNGSWQWEDGSILSPNLLTIIEMQKGDCALYASSFKGYIENCSTPNTYICMQRTVGSGGGGSGGGGSGGGGSFEQVQLQQPGAELVKPGASVKMSCKASGYAFSSYWINWMKQKPGQGLEWIGQIYPGDGDTNYNGKFKGRATLTADTSSSTAYMQLSSLTSEDSAVYFCARSITTVVGCAMDYWGQGTSVTVSSTRIQNPDPAVYQLRDSKSSDKSVCLFTDFDSQTNVSQSKDSDVYITDKCVLDMRSMDFKSNSAVAWSNKSDFACANAFNNSIIPEDTFFPSSDVPCDVKLVEKSFETDTNLNFQNLSVIGFRILLLKVAGFNLLMTLRLWSSRAKRSGSGVKQTLNFDLLKLAGDVESNPGPSRGHMTEYKPTVRLATRDDVPRAVRTLAAAFADYPATRHTVDPDRHIERVTELQELFLTRVGLDIGKVWVADDGAAVAVWTTPESVEAGAVFAEIGPRMAELSGSRLAAQQQMEGLLAPHRPKEPAWFLATVGVSPDHQGKGLGSAVVLPGVEAAERAGVPAFLETSAPRNLPFYERLGFTVTADVEVPEGPRTWCMTRKPGA

SEQ ID NO: 14982 - protein, 1302 aa, Artificial Sequence
  Synthetic Polypeptide
MALPVTALLLPLALLLHAARPACQVQLVESGGGLVQAGDSVTLSCTASGRTFSSYALAWFRQRPGKEREFVAGLRWGGPTNYADSVKDRFTISGDSAKHTMYLQMNSLKPEDTAVYYCGYNPGGWAVPSQYEYDSWGQGTQVTVSSGTGGGGSGGGGSGGGGSEFDIQMTQSPSSLSASVGDRVTITCKASDHINNWLAWYQQKPGQAPKLLIYGATTLETGVPSRFSGSGSGTDYTLTISSLQPEDFATYYCQQSWNTPWTFGQGTKLEIKRLEDLKNVFPPEVAVFEPSEAEISHTQKATLVCLATGFYPDHVELSWWVNGKEVHSGVCTDPQPLKEQPALNDSRYCLSSRLRVSATFWQNPRNHFRCQVQFYGLSENDEWTQDRAKPVTQIVSAEAWGRADCGFTSESYQQGVLSATILYEILLGKATLYAVLVSALVLMAMVKRKDSRGRAKRSGSGATNFSLLKQAGDVEENPGPTSMDWIWRILFLVGAATGAHSLFNQEVQIPLTESYCGPCPKNWICYKNNCYQFFDESKNWYESQASCMSQNASLLKVYSKEDQDLLKLVKSYHWMGLVHIPTNGSWQWEDGSILSPNLLTIIEMQKGDCALYASSFKGYIENCSTPNTYICMQRTVGGGGSGGGGSGGGGSDLFNQEVQIPLTESYCGPCPKNWICYKNNCYQFFDESKNWYESQASCMSQNASLLKVYSKEDQDLLKLVKSYHWMGLVHIPTNGSWQWEDGSILSPNLLTIIEMQKGDCALYASSFKGYIENCSTPNTYICMQRTVGSGGGGSGGGGSGGGGSFEQVQLQQPGAELVKPGASVKMSCKASGYAFSSYWINWMKQKPGQGLEWIGQIYPGDGDTNYNGKFKGRATLTADTSSSTAYMQLSSLTSEDSAVYFCARSITTVVGCAMDYWGQGTSVTVSSTRIQNPDPAVYQLRDSKSSDKSVCLFTDFDSQTNVSQSKDSDVYITDKCVLDMRSMDFKSNSAVAWSNKSDFACANAFNNSIIPEDTFFPSPESSCDVKLVEKSFETDTNLNFQNLSVIGFRILLLKVAGFNLLMTLRLWSSRAKRSGSGVKQTLNFDLLKLAGDVESNPGPSRGHMTEYKPTVRLATRDDVPRAVRTLAAAFADYPATRHTVDPDRHIERVTELQELFLTRVGLDIGKVWVADDGAAVAVWTTPESVEAGAVFAEIGPRMAELSGSRLAAQQQMEGLLAPHRPKEPAWFLATVGVSPDHQGKGLGSAVVLPGVEAAERAGVPAFLETSAPRNLPFYERLGFTVTADVEVPEGPRTWCMTRKPGA

SEQ ID NO: 14983 - protein, 1071 aa, Artificial Sequence
  Synthetic Polypeptide
MALPVTALLLPLALLLHAARPACQVQLVESGGGLVQAGDSVTLSCTASGRTFSSYALAWFRQRPGKEREFVAGLRWGGPTNYADSVKDRFTISGDSAKHTMYLQMNSLKPEDTAVYYCGYNPGGWAVPSQYEYDSWGQGTQVTVSSGTGGGGSGGGGSGGGGSEFDIQMTQSPSSLSASVGDRVTITCKASDHINNWLAWYQQKPGQAPKLLIYGATTLETGVPSRFSGSGSGTDYTLTISSLQPEDFATYYCQQSWNTPWTFGQGTKLEIKRLEDLKNVFPPEVAVFEPSEAEISHTQKATLVCLATGFYPDHVELSWWVNGKEVHSGVCTDPQPLKEQPALNDSRYCLSSRLRVSATFWQNPRNHFRCQVQFYGLSENDEWTQDRAKPVTQIVSAEAWGRADCGFTSESYQQGVLSATILYEILLGKATLYAVLVSALVLMAMVKRKDSRGRAKRSGSGATNFSLLKQAGDVEENPGPTSMDWIWRILFLVGAATGAHSGPLFNQEVQIPLTESYCGPCPKNWICYKNNCYQFFDESKNWYESQASCMSQNASLLKVYSKEDQDLLKLVKSYHWMGLVHIPTNGSWQWEDGSILSPNLLTIIEMQKGDCALYASSFKGYIENCSTPNTYICMQRTVGGGGSGGGGSGGGGSDLFNQEVQIPLTESYCGPCPKNWICYKNNCYQFFDESKNWYESQASCMSQNASLLKVYSKEDQDLLKLVKSYHWMGLVHIPTNGSWQWEDGSILSPNLLTIIEMQKGDCALYASSFKGYIENCSTPNTYICMQRTVGSGGGGSGGGGSGGGGSFEQVQLQQPGAELVKPGASVKMSCKASGYAFSSYWINWMKQKPGQGLEWIGQIYPGDGDTNYNGKFKGRATLTADTSSSTAYMQLSSLTSEDSAVYFCARSITTVVGCAMDYWGQGTSVTVSSTRIQNPDPAVYQLRDSKSSDKSVCLFTDFDSQTNVSQSKDSDVYITDKCVLDMRSMDFKSNSAVAWSNKSDFACANAFNNSIIPEDTFFPSPESSCDVKLVEKSFETDTNLNFQNLSVIGFRILLLKVAGFNLLMTLRLWSS

SEQ ID NO: 14984 - protein, 1296 aa, Artificial Sequence
  Synthetic Polypeptide
MALPVTALLLPLALLLHAARPACQVQLVESGGGLVQAGDSVTLSCTASGRTFSSYALAWFRQRPGKEREFVAGLRWGGPTNYADSVKDRFTISGDSAKHTMYLQMNSLKPEDTAVYYCGYNPGGWAVPSQYEYDSWGQGTQVTVSSGTGGGGSGGGGSGGGGSEFDIQMTQSPSSLSASVGDRVTITCKASDHINNWLAWYQQKPGQAPKLLIYGATTLETGVPSRFSGSGSGTDYTLTISSLQPEDFATYYCQQSWNTPWTFGQGTKLEIKRLEDLKNVFPPEVAVFEPSEAEISHTQKATLVCLATGFYPDHVELSWWVNGKEVHSGVCTDPQPLKEQPALNDSRYCLSSRLRVSATFWQNPRNHFRCQVQFYGLSENDEWTQDRAKPVTQIVSAEAWGRADCGFTSESYQQGVLSATILYEILLGKATLYAVLVSALVLMAMVKRKDSRGRAKRSGSGATNFSLLKQAGDVEENPGPTSMDWIWRILFLVGAATGAHSGPLFNQEVQIPLTESYCGPCPKNWICYKNNCYQFFDESKNWYESQASCMSQNASLLKVYSKEDQDLLKLVKSYHWMGLVHIPTNGSWQWEDGSILSPNLLTIIEMQKGDCALYASSFKGYIENCSTPNTYICMQRTVGGGGSGGGGSGGGGSDLFNQEVQIPLTESYCGPCPKNWICYKNNCYQFFDESKNWYESQASCMSQNASLLKVYSKEDQDLLKLVKSYHWMGLVHIPTNGSWQWEDGSILSPNLLTIIEMQKGDCALYASSFKGYIENCSTPNTYICMQRTVGSGGGGSGGGGSGGGGSFEQVQLQQPGAELVKPGASVKMSCKASGYAFSSYWINWMKQKPGQGLEWIGQIYPGDGDTNYNGKFKGRATLTADTSSSTAYMQLSSLTSEDSAVYFCARSITTVVGCAMDYWGQGTSVTVSSTRIQNPDPAVYQLRDSKSSDKSVCLFTDFDSQTNVSQSKDSDVYITDKCVLDMRSMDFKSNSAVAWSNKSDFACANAFNNSIIPEDTFFPSPESSCDVKLVEKSFETDTNLNFQNLSVIGFRILLLKVAGFNLLMTLRLWSSRAKRSGSGVKQTLNFDLLKLAGDVESNPGPSRGGIHTMATYEVLCEVARKLGTDDREVVLFLLNVFIPQPTLAQLIGALRALKEEGRLTFPLLAECLFRAGRRDLLRDLLHLDPRFLERHLAGTMSYFSPYQLTVLHVDGELCARDIRSLIFLSKDTIGSRSTPQTFLHWVYCMENLDLLGPTDVDALMSMLRSLSRVDLQRQVQTLMGLHLSGPSHSQHYRHTP

SEQ ID NO: 14985 - protein, 1075 aa, Artificial Sequence
  Synthetic Polypeptide
MALPVTALLLPLALLLHAARPACQVQLVESGGGLVQAGDSVTLSCTASGRTFSSYALAWFRQRPGKEREFVAGLRWGGPTNYADSVKDRFTISGDSAKHTMYLQMNSLKPEDTAVYYCGYNPGGWAVPSQYEYDSWGQGTQVTVSSGTGGGGSGGGGSGGGGSEFDIQMTQSPSSLSASVGDRVTITCKASDHINNWLAWYQQKPGQAPKLLIYGATTLETGVPSRFSGSGSGTDYTLTISSLQPEDFATYYCQQSWNTPWTFGQGTKLEIKRLEIQNPDPAVYQLRDSKSSDKSVCLFTDFDSQTNVSQSKDSDVYITDKCVLDMRSMDFKSNSAVAWSNKSDFACANAFNNSIIPEDTFFPSPESSCDVKLVEKSFETDTNLNFQNLSVIGFRILLLKVAGFNLLMTLRLWSSRAKRSGSGVKQTLNFDLLKLAGDVESNPGPTSMDWIWRILFLVGAATGAHSGPLFNQEVQIPLTESYCGPCPKNWICYKNNCYQFFDESKNWYESQASCMSQNASLLKVYSKEDQDLLKLVKSYHWMGLVHIPTNGSWQWEDGSILSPNLLTIIEMQKGDCALYASSFKGYIENCSTPNTYICMQRTVGGGGSGGGGSGGGGSDLFNQEVQIPLTESYCGPCPKNWICYKNNCYQFFDESKNWYESQASCMSQNASLLKVYSKEDQDLLKLVKSYHWMGLVHIPTNGSWQWEDGSILSPNLLTIIEMQKGDCALYASSFKGYIENCSTPNTYICMQRTVGSGGGGSGGGGSGGGGSFEQVQLQQPGAELVKPGASVKMSCKASGYAFSSYWINWMKQKPGQGLEWIGQIYPGDGDTNYNGKFKGRATLTADTSSSTAYMQLSSLTSEDSAVYFCARSITTVVGCAMDYWGQGTSVTVSSTREDLKNVFPPEVAVFEPSEAEISHTQKATLVCLATGFYPDHVELSWWVNGKEVHSGVCTDPQPLKEQPALNDSRYCLSSRLRVSATFWQNPRNHFRCQVQFYGLSENDEWTQDRAKPVTQIVSAEAWGRADCGFTSESYQQGVLSATILYEILLGKATLYAVLVSALVLMAMVKRKDSRG

SEQ ID NO: 14986 - protein, 1297 aa, Artificial Sequence
  Synthetic Polypeptide
MALPVTALLLPLALLLHAARPACQVQLVESGGGLVQAGDSVTLSCTASGRTFSSYALAWFRQRPGKEREFVAGLRWGGPTNYADSVKDRFTISGDSAKHTMYLQMNSLKPEDTAVYYCGYNPGGWAVPSQYEYDSWGQGTQVTVSSGTGGGGSGGGGSGGGGSEFDIQMTQSPSSLSASVGDRVTITCKASDHINNWLAWYQQKPGQAPKLLIYGATTLETGVPSRFSGSGSGTDYTLTISSLQPEDFATYYCQQSWNTPWTFGQGTKLEIKRLEIQNPDPAVYQLRDSKSSDKSVCLFTDFDSQTNVSQSKDSDVYITDKCVLDMRSMDFKSNSAVAWSNKSDFACANAFNNSIIPEDTFFPSPESSCDVKLVEKSFETDTNLNFQNLSVIGFRILLLKVAGFNLLMTLRLWSSRAKRSGSGVKQTLNFDLLKLAGDVESNPGPTSMDWIWRILFLVGAATGAHSGPLFNQEVQIPLTESYCGPCPKNWICYKNNCYQFFDESKNWYESQASCMSQNASLLKVYSKEDQDLLKLVKSYHWMGLVHIPTNGSWQWEDGSILSPNLLTIIEMQKGDCALYASSFKGYIENCSTPNTYICMQRTVGGGGSGGGGSGGGGSDLFNQEVQIPLTESYCGPCPKNWICYKNNCYQFFDESKNWYESQASCMSQNASLLKVYSKEDQDLLKLVKSYHWMGLVHIPTNGSWQWEDGSILSPNLLTIIEMQKGDCALYASSFKGYIENCSTPNTYICMQRTVGSGGGGSGGGGSGGGGSFEQVQLQQPGAELVKPGASVKMSCKASGYAFSSYWINWMKQKPGQGLEWIGQIYPGDGDTNYNGKFKGRATLTADTSSSTAYMQLSSLTSEDSAVYFCARSITTVVGCAMDYWGQGTSVTVSSTREDLKNVFPPEVAVFEPSEAEISHTQKATLVCLATGFYPDHVELSWWVNGKEVHSGVCTDPQPLKEQPALNDSRYCLSSRLRVSATFWQNPRNHFRCQVQFYGLSENDEWTQDRAKPVTQIVSAEAWGRADCGFTSESYQQGVLSATILYEILLGKATLYAVLVSALVLMAMVKRKDSRGRAKRSGSGATNFSLLKQAGDVEENPGPSRGGIHTMATYEVLCEVARKLGTDDREVVLFLLNVFIPQPTLAQLIGALRALKEEGRLTFPLLAECLFRAGRRDLLRDLLHLDPRFLERHLAGTMSYFSPYQLTVLHVDGELCARDIRSLIFLSKDTIGSRSTPQTFLHWVYCMENLDLLGPTDVDALMSMLRSLSRVDLQRQVQTLMGLHLSGPSHSQHYRHTP

SEQ ID NO: 14987 - protein, 1304 aa, Artificial Sequence
  Synthetic Polypeptide
MALPVTALLLPLALLLHAARPACQVQLVESGGGLVQAGDSVTLSCTASGRTFSSYALAWFRQRPGKEREFVAGLRWGGPTNYADSVKDRFTISGDSAKHTMYLQMNSLKPEDTAVYYCGYNPGGWAVPSQYEYDSWGQGTQVTVSSGTGGGGSGGGGSGGGGSEFDIQMTQSPSSLSASVGDRVTITCKASDHINNWLAWYQQKPGQAPKLLIYGATTLETGVPSRFSGSGSGTDYTLTISSLQPEDFATYYCQQSWNTPWTFGQGTKLEIKRLEDLKNVFPPEVAVFEPSEAEISHTQKATLVCLATGFYPDHVELSWWVNGKEVHSGVSTDPQPLKEQPALNDSRYCLSSRLRVSATFWQNPRNHFRCQVQFYGLSENDEWTQDRAKPVTQIVSAEAWGRADCGFTSESYQQGVLSATILYEILLGKATLYAVLVSALVLMAMVKRKDSRGRAKRSGSGATNFSLLKQAGDVEENPGPTSMDWIWRILFLVGAATGAHSGPLFNQEVQIPLTESYCGPCPKNWICYKNNCYQFFDESKNWYESQASCMSQNASLLKVYSKEDQDLLKLVKSYHWMGLVHIPTNGSWQWEDGSILSPNLLTIIEMQKGDCALYASSFKGYIENCSTPNTYICMQRTVGGGGSGGGGSGGGGSDLFNQEVQIPLTESYCGPCPKNWICYKNNCYQFFDESKNWYESQASCMSQNASLLKVYSKEDQDLLKLVKSYHWMGLVHIPTNGSWQWEDGSILSPNLLTIIEMQKGDCALYASSFKGYIENCSTPNTYICMQRTVGSGGGGSGGGGSGGGGSFEQVQLQQPGAELVKPGASVKMSCKASGYAFSSYWINWMKQKPGQGLEWIGQIYPGDGDTNYNGKFKGRATLTADTSSSTAYMQLSSLTSEDSAVYFCARSITTVVGCAMDYWGQGTSVTVSSTRIQNPDPAVYQLRDSKSSDKSVCLFTDFDSQTNVSQSKDSDVYITDKTVLDMRSMDFKSNSAVAWSNKSDFACANAFNNSIIPEDTFFPSPESSCDVKLVEKSFETDTNLNFQNLSVIGFRILLLKVAGFNLLMTLRLWSSRAKRSGSGVKQTLNFDLLKLAGDVESNPGPSRGHMTEYKPTVRLATRDDVPRAVRTLAAAFADYPATRHTVDPDRHIERVTELQELFLTRVGLDIGKVWVADDGAAVAVWTTPESVEAGAVFAEIGPRMAELSGSRLAAQQQMEGLLAPHRPKEPAWFLATVGVSPDHQGKGLGSAVVLPGVEAAERAGVPAFLETSAPRNLPFYERLGFTVTADVEVPEGPRTWCMTRKPGA

SEQ ID NO: 14988 - protein, 1386 aa, Artificial Sequence
  Synthetic Polypeptide
MALPVTALLLPLALLLHAARPACQVQLVESGGGLVQAGDSVTLSCTASGRTFSSYALAWFRQRPGKEREFVAGLRWGGPTNYADSVKDRFTISGDSAKHTMYLQMNSLKPEDTAVYYCGYNPGGWAVPSQYEYDSWGQGTQVTVSSGTGGGGSGGGGSGGGGSEFDIQMTQSPSSLSASVGDRVTITCKASDHINNWLAWYQQKPGQAPKLLIYGATTLETGVPSRFSGSGSGTDYTLTISSLQPEDFATYYCQQSWNTPWTFGQGTKLEIKRLEDLKNVFPPEVAVFEPSEAEISHTQKATLVCLATGFYPDHVELSWWVNGKEVHSGVSTDPQPLKEQPALNDSRYCLSSRLRVSATFWQNPRNHFRCQVQFYGLSENDEWTQDRAKPVTQIVSAEAWGRADCGFTSESYQQGVLSATILYEILLGKATLYAVLVSALVLMAMVKRKDSRGRAKRSGSGATNFSLLKQAGDVEENPGPTSMDWIWRILFLVGAATGAHSGPLFNQEVQIPLTESYCGPCPKNWICYKNNCYQFFDESKNWYESQASCMSQNASLLKVYSKEDQDLLKLVKSYHWMGLVHIPTNGSWQWEDGSILSPNLLTIIEMQKGDCALYASSFKGYIENCSTPNTYICMQRTVGGGGSGGGGSGGGGSDLFNQEVQIPLTESYCGPCPKNWICYKNNCYQFFDESKNWYESQASCMSQNASLLKVYSKEDQDLLKLVKSYHWMGLVHIPTNGSWQWEDGSILSPNLLTIIEMQKGDCALYASSFKGYIENCSTPNTYICMQRTVGSGGGGSGGGGSGGGGSFEQVQLQQPGAELVKPGASVKMSCKASGYAFSSYWINWMKQKPGQGLEWIGQIYPGDGDTNYNGKFKGRATLTADTSSSTAYMQLSSLTSEDSAVYFCARSITTVVGCAMDYWGQGTSVTVSSTREQKLISEEDGSGTPFPSLAPPIMLLVDGKQQMVVVCLVLDVAPPGLDSPIWFSAGNGSALDAFTYGPSPATDGTWTNLAHLSLPSEELASWEPLVCHTGPGAEGHSRSTQPMHLSGEASTARTCPQEPLRGTPGGALWLGVLRLLLFKLLLFDLLLTCSCLCDPAGPLPSPATTTRLRALGSHRLHPATETGGREATSSPRPQPRDRRWGDTPPGRKPGSPVRAKRSGSGVKQTLNFDLLKLAGDVESNPGPSRGHMTEYKPTVRLATRDDVPRAVRTLAAAFADYPATRHTVDPDRHIERVTELQELFLTRVGLDIGKVWVADDGAAVAVWTTPESVEAGAVFAEIGPRMAELSGSRLAAQQQMEGLLAPHRPKEPAWFLATVGVSPDHQGKGLGSAVVLPGVEAAERAGVPAFLETSAPRNLPFYERLGFTVTADVEVPEGPRTWCMTRKPGA

SEQ ID NO: 14989 - protein, 1341 aa, Artificial Sequence
  Synthetic Polypeptide
MALPVTALLLPLALLLHAARPACQVQLVESGGGLVQAGDSVTLSCTASGRTFSSYALAWFRQRPGKEREFVAGLRWGGPTNYADSVKDRFTISGDSAKHTMYLQMNSLKPEDTAVYYCGYNPGGWAVPSQYEYDSWGQGTQVTVSSGTGGGGSGGGGSGGGGSEFDIQMTQSPSSLSASVGDRVTITCKASDHINNWLAWYQQKPGQAPKLLIYGATTLETGVPSRFSGSGSGTDYTLTISSLQPEDFATYYCQQSWNTPWTFGQGTKLEIKRLEGKPIPNPLLGLDSTGSGDKQLDADVSPKPTIFLPSIAETKLQKAGTYLCLLEKFFPDVIKIHWQEKKSNTILGSQEGNTMKTNDTYMKFSWLTVPEKSLDKEHRCIVRHENNKNGVDQEIIFPPIKTDVITMDPKDNCSKDANDTLLLQLTNTSAYYMYLLLLLKSVVYFAIITCCLLRRTAFCCNGEKSRAKRSGSGATNFSLLKQAGDVEENPGPTSMDWIWRILFLVGAATGAHSGPLFNQEVQIPLTESYCGPCPKNWICYKNNCYQFFDESKNWYESQASCMSQNASLLKVYSKEDQDLLKLVKSYHWMGLVHIPTNGSWQWEDGSILSPNLLTIIEMQKGDCALYASSFKGYIENCSTPNTYICMQRTVGGGGSGGGGSGGGGSDLFNQEVQIPLTESYCGPCPKNWICYKNNCYQFFDESKNWYESQASCMSQNASLLKVYSKEDQDLLKLVKSYHWMGLVHIPTNGSWQWEDGSILSPNLLTIIEMQKGDCALYASSFKGYIENCSTPNTYICMQRTVGSGGGGSGGGGSGGGGSFEQVQLQQPGAELVKPGASVKMSCKASGYAFSSYWINWMKQKPGQGLEWIGQIYPGDGDTNYNGKFKGRATLTADTSSSTAYMQLSSLTSEDSAVYFCARSITTVVGCAMDYWGQGTSVTVSSTREQKLISEEDGSGSQPHTKPSVFVMKNGTNVACLVKEFYPKDIRINLVSSKKITEFDPAIVISPSGKYNAVKLGKYEDSNSVTCSVQHDNKTVHSTDFEVKTDSTDHVKPKETENTKQPSKSCHKPKAIVHTEKVNMMSLTVLGLRMLFAKTVAVNFLLTAKLFFLRAKRSGSGVKQTLNFDLLKLAGDVESNPGPSRGHMTEYKPTVRLATRDDVPRAVRTLAAAFADYPATRHTVDPDRHIERVTELQELFLTRVGLDIGKVWVADDGAAVAVWTTPESVEAGAVFAEIGPRMAELSGSRLAAQQQMEGLLAPHRPKEPAWFLATVGVSPDHQGKGLGSAVVLPGVEAAERAGVPAFLETSAPRNLPFYERLGFTVTADVEVPEGPRTWCMTRKPGA

SEQ ID NO: 14990 - protein, 1079 aa, Artificial Sequence
  Synthetic Polypeptide
MALPVTALLLPLALLLHAARPACQVQLVESGGGLVQAGDSVTLSCTASGRTFSSYALAWFRQRPGKEREFVAGLRWGGPTNYADSVKDRFTISGDSAKHTMYLQMNSLKPEDTAVYYCGYNPGGWAVPSQYEYDSWGQGTQVTVSSGTGGGGSGGGGSGGGGSEFDIQMTQSPSSLSASVGDRVTITCKASDHINNWLAWYQQKPGQAPKLLIYGATTLETGVPSRFSGSGSGTDYTLTISSLQPEDFATYYCQQSWNTPWTFGQGTKLEIKRLESQPHTKPSVFVMKNGTNVACLVKEFYPKDIRINLVSSKKITEFDPAIVISPSGKYNAVKLGKYEDSNSVTCSVQHDNKTVHSTDFEVKTDSTDHVKPKETENTKQPSKSCHKPKAIVHTEKVNMMSLTVLGLRMLFAKTVAVNFLLTAKLFFLRAKRSGSGATNFSLLKQAGDVEENPGPTSMDWIWRILFLVGAATGAHSGPLFNQEVQIPLTESYCGPCPKNWICYKNNCYQFFDESKNWYESQASCMSQNASLLKVYSKEDQDLLKLVKSYHWMGLVHIPTNGSWQWEDGSILSPNLLTIIEMQKGDCALYASSFKGYIENCSTPNTYICMQRTVGGGGSGGGGSGGGGSDLFNQEVQIPLTESYCGPCPKNWICYKNNCYQFFDESKNWYESQASCMSQNASLLKVYSKEDQDLLKLVKSYHWMGLVHIPTNGSWQWEDGSILSPNLLTIIEMQKGDCALYASSFKGYIENCSTPNTYICMQRTVGSGGGGSGGGGSGGGGSFEQVQLQQPGAELVKPGASVKMSCKASGYAFSSYWINWMKQKPGQGLEWIGQIYPGDGDTNYNGKFKGRATLTADTSSSTAYMQLSSLTSEDSAVYFCARSITTVVGCAMDYWGQGTSVTVSSTRDKQLDADVSPKPTIFLPSIAETKLQKAGTYLCLLEKFFPDVIKIHWQEKKSNTILGSQEGNTMKTNDTYMKFSWLTVPEKSLDKEHRCIVRHENNKNGVDQEIIFPPIKTDVITMDPKDNCSKDANDTLLLQLTNTSAYYMYLLLLLKSVVYFAIITCCLLRRTAFCCNGEKS

SEQ ID NO: 14991 - protein, 1481 aa, Artificial Sequence
  Synthetic Polypeptide
MALPVTALLLPLALLLHAARPACQVQLVESGGGLVQAGDSVTLSCTASGRTFSSYALAWFRQRPGKEREFVAGLRWGGPTNYADSVKDRFTISGDSAKHTMYLQMNSLKPEDTAVYYCGYNPGGWAVPSQYEYDSWGQGTQVTVSSGTGGGGSGGGGSGGGGSEFDIQMTQSPSSLSASVGDRVTITCKASDHINNWLAWYQQKPGQAPKLLIYGATTLETGVPSRFSGSGSGTDYTLTISSLQPEDFATYYCQQSWNTPWTFGQGTKLEIKRGQPKANPTVTLFPPSSEELQANKATLVCLISDFYPGAVTVAWKADGSPVKAGVETTKPSKQSNNKYAASSYLSLTPEQWKSHRSYSCQVTHEGSTVEKTVAPTECSGSQSFGLLDPKLCYLLDGILFIYGVILTALFLRVKFSRSADAPAYQQGQNQLYNELNLGRREEYDVLDKRRGRDPEMGGKPQRRKNPQEGLYNELQKDKMAEAYSEIGMKGERRRGKGHDGLYQGLSTATKDTYDALHMQALPPRRAKRSGSGATNFSLLKQAGDVEENPGPTSMDWIWRILFLVGAATGAHSGPLFNQEVQIPLTESYCGPCPKNWICYKNNCYQFFDESKNWYESQASCMSQNASLLKVYSKEDQDLLKLVKSYHWMGLVHIPTNGSWQWEDGSILSPNLLTIIEMQKGDCALYASSFKGYIENCSTPNTYICMQRTVGGGGSGGGGSGGGGSDLFNQEVQIPLTESYCGPCPKNWICYKNNCYQFFDESKNWYESQASCMSQNASLLKVYSKEDQDLLKLVKSYHWMGLVHIPTNGSWQWEDGSILSPNLLTIIEMQKGDCALYASSFKGYIENCSTPNTYICMQRTVGSGGGGSGGGGSGGGGSFEQVQLQQPGAELVKPGASVKMSCKASGYAFSSYWINWMKQKPGQGLEWIGQIYPGDGDTNYNGKFKGRATLTADTSSSTAYMQLSSLTSEDSAVYFCARSITTVVGCAMDYWGQGTSVTVSSASTKGPSVFPLAPSSKSTSGGTAALGCLVKDYFPEPVTVSWNSGALTSGVHTFPAVLQSSGLYSLSSVVTVPSSSLGTQTYICNVNHKPSNTKVDKRVEPKSCGTQSFGLLDPKLCYLLDGILFIYGVILTALFLRVKFSRSADAPAYQQGQNQLYNELNLGRREEYDVLDKRRGRDPEMGGKPQRRKNPQEGLYNELQKDKMAEAYSEIGMKGERRRGKGHDGLYQGLSTATKDTYDALHMQALPPRRAKRSGSGVKQTLNFDLLKLAGDVESNPGPSRGHMTEYKPTVRLATRDDVPRAVRTLAAAFADYPATRHTVDPDRHIERVTELQELFLTRVGLDIGKVWVADDGAAVAVWTTPESVEAGAVFAEIGPRMAELSGSRLAAQQQMEGLLAPHRPKEPAWFLATVGVSPDHQGKGLGSAVVLPGVEAAERAGVPAFLETSAPRNLPFYERLGFTVTADVEVPEGPRTWCMTRKPGA

SEQ ID NO: 14992 - protein, 1267 aa, Artificial Sequence
  Synthetic Polypeptide
MALPVTALLLPLALLLHAARPACQVQLVESGGGLVQAGDSVTLSCTASGRTFSSYALAWFRQRPGKEREFVAGLRWGGPTNYADSVKDRFTISGDSAKHTMYLQMNSLKPEDTAVYYCGYNPGGWAVPSQYEYDSWGQGTQVTVSSGTGGGGSGGGGSGGGGSEFDIQMTQSPSSLSASVGDRVTITCKASDHINNWLAWYQQKPGQAPKLLIYGATTLETGVPSRFSGSGSGTDYTLTISSLQPEDFATYYCQQSWNTPWTFGQGTKLEIKRLEDLKNVFPPEVAVFEPSEAEISHTQKATLVCLATGFYPDHVELSWWVNGKEVHSGVSTDPQPLKEQPALNDSRYCLSSRLRVSATFWQNPRNHFRCQVQFYGLSENDEWTQDRAKPVTQIVSAEAWGRADCGSQSFGLLDPKLCYLLDGILFIYGVILTALFLRVKFSRSADAPAYQQGQNQLYNELNLGRREEYDVLDKRRGRDPEMGGKPQRRKNPQEGLYNELQKDKMAEAYSEIGMKGERRRGKGHDGLYQGLSTATKDTYDALHMQALPPRRAKRSGSGATNFSLLKQAGDVEENPGPTSMDWIWRILFLVGAATGAHSGPLFNQEVQIPLTESYCGPCPKNWICYKNNCYQFFDESKNWYESQASCMSQNASLLKVYSKEDQDLLKLVKSYHWMGLVHIPTNGSWQWEDGSILSPNLLTIIEMQKGDCALYASSFKGYIENCSTPNTYICMQRTVGGGGSGGGGSGGGGSDLFNQEVQIPLTESYCGPCPKNWICYKNNCYQFFDESKNWYESQASCMSQNASLLKVYSKEDQDLLKLVKSYHWMGLVHIPTNGSWQWEDGSILSPNLLTIIEMQKGDCALYASSFKGYIENCSTPNTYICMQRTVGSGGGGSGGGGSGGGGSFEQVQLQQPGAELVKPGASVKMSCKASGYAFSSYWINWMKQKPGQGLEWIGQIYPGDGDTNYNGKFKGRATLTADTSSSTAYMQLSSLTSEDSAVYFCARSITTVVGCAMDYWGQGTSVTVSSTRIQNPDPAVYQLRDSKSSDKSVCLFTDFDSQTNVSQSKDSDVYITDKTVLDMRSMDFKSNSAVAWSNKSDFACANAFNNSIIPEDTFFPSPESSCGTQSFGLLDPKLCYLLDGILFIYGVILTALFLRVKFSRSADAPAYQQGQNQLYNELNLGRREEYDVLDKRRGRDPEMGGKPQRRKNPQEGLYNELQKDKMAEAYSEIGMKGERRRGKGHDGLYQGLSTATKDTYDALHMQALPPR

SEQ ID NO: 14993 - protein, 1267 aa, Artificial Sequence
  Synthetic Polypeptide
MALPVTALLLPLALLLHAARPACQVQLVESGGGLVQAGDSVTLSCTASGRTFSSYALAWFRQRPGKEREFVAGLRWGGPTNYADSVKDRFTISGDSAKHTMYLQMNSLKPEDTAVYYCGYNPGGWAVPSQYEYDSWGQGTQVTVSSGTGGGGSGGGGSGGGGSEFDIQMTQSPSSLSASVGDRVTITCKASDHINNWLAWYQQKPGQAPKLLIYGATTLETGVPSRFSGSGSGTDYTLTISSLQPEDFATYYCQQSWNTPWTFGQGTKLEIKRLEDLKNVFPPEVAVFEPSKAEIAHTQKATLVCLATGFYPDHVELSWWVNGKEVHSGVCTDPQPLKEQPALNDSRYCLSSRLRVSATFWQNPRNHFRCQVQFYGLSENDEWTQDRAKPVTQIVSAEAWGRADCGSQSFGLLDPKLCYLLDGILFIYGVILTALFLRVKFSRSADAPAYQQGQNQLYNELNLGRREEYDVLDKRRGRDPEMGGKPQRRKNPQEGLYNELQKDKMAEAYSEIGMKGERRRGKGHDGLYQGLSTATKDTYDALHMQALPPRRAKRSGSGATNFSLLKQAGDVEENPGPTSMDWIWRILFLVGAATGAHSGPLFNQEVQIPLTESYCGPCPKNWICYKNNCYQFFDESKNWYESQASCMSQNASLLKVYSKEDQDLLKLVKSYHWMGLVHIPTNGSWQWEDGSILSPNLLTIIEMQKGDCALYASSFKGYIENCSTPNTYICMQRTVGGGGSGGGGSGGGGSDLFNQEVQIPLTESYCGPCPKNWICYKNNCYQFFDESKNWYESQASCMSQNASLLKVYSKEDQDLLKLVKSYHWMGLVHIPTNGSWQWEDGSILSPNLLTIIEMQKGDCALYASSFKGYIENCSTPNTYICMQRTVGSGGGGSGGGGSGGGGSFEQVQLQQPGAELVKPGASVKMSCKASGYAFSSYWINWMKQKPGQGLEWIGQIYPGDGDTNYNGKFKGRATLTADTSSSTAYMQLSSLTSEDSAVYFCARSITTVVGCAMDYWGQGTSVTVSSTRIQNPDPAVYQLRDSKSSDKSVCLFTDFDSQTNVSQSKDSDVYITDKCVLDMRSMDFKSNSAVAWSNKSDFACANAFNNSIIPEDTFFPSSDVPCGTQSFGLLDPKLCYLLDGILFIYGVILTALFLRVKFSRSADAPAYQQGQNQLYNELNLGRREEYDVLDKRRGRDPEMGGKPQRRKNPQEGLYNELQKDKMAEAYSEIGMKGERRRGKGHDGLYQGLSTATKDTYDALHMQALPPR

SEQ ID NO: 14994 - protein, 1338 aa, Artificial Sequence
  Synthetic Polypeptide
MALPVTALLLPLALLLHAARPACQVQLVESGGGLVQAGDSVTLSCTASGRTFSSYALAWFRQRPGKEREFVAGLRWGGPTNYADSVKDRFTISGDSAKHTMYLQMNSLKPEDTAVYYCGYNPGGWAVPSQYEYDSWGQGTQVTVSSGTGGGGSGGGGSGGGGSEFDIQMTQSPSSLSASVGDRVTITCKASDHINNWLAWYQQKPGQAPKLLIYGATTLETGVPSRFSGSGSGTDYTLTISSLQPEDFATYYCQQSWNTPWTFGQGTKLEIKRLEGKPIPNPLLGLDSTGSGEDLKNVFPPEVAVFEPSEAEISHTQKATLVCLATGFYPDHVELSWWVNGKEVHSGVSTDPQPLKEQPALNDSRYCLSSRLRVSATFWQNPRNHFRCQVQFYGLSENDEWTQDRAKPVTQIVSAEAWGRADCGSQSFGLLDPKLCYLLDGILFIYGVILTALFLRVKFSRSADAPAYQQGQNQLYNELNLGRREEYDVLDKRRGRDPEMGGKPQRRKNPQEGLYNELQKDKMAEAYSEIGMKGERRRGKGHDGLYQGLSTATKDTYDALHMQALPPRRAKRSGSGATNFSLLKQAGDVEENPGPTSMDWIWRILFLVGAATGAHSGPLFNQEVQIPLTESYCGPCPKNWICYKNNCYQFFDESKNWYESQASCMSQNASLLKVYSKEDQDLLKLVKSYHWMGLVHIPTNGSWQWEDGSILSPNLLTIIEMQKGDCALYASSFKGYIENCSTPNTYICMQRTVGGGGSGGGGSGGGGSDLFNQEVQIPLTESYCGPCPKNWICYKNNCYQFFDESKNWYESQASCMSQNASLLKVYSKEDQDLLKLVKSYHWMGLVHIPTNGSWQWEDGSILSPNLLTIIEMQKGDCALYASSFKGYIENCSTPNTYICMQRTVGSGGGGSGGGGSGGGGSFEQVQLQQPGAELVKPGASVKMSCKASGYAFSSYWINWMKQKPGQGLEWIGQIYPGDGDTNYNGKFKGRATLTADTSSSTAYMQLSSLTSEDSAVYFCARSITTVVGCAMDYWGQGTSVTVSSTREQKLISEEDGSGIQNPDPAVYQLRDSKSSDKSVCLFTDFDSQTNVSQSKDSDVYITDKTVLDMRSMDFKSNSAVAWSNKSDFACANAFNNSIIPEDTFFPSPESSCGTQSFGLLDPKLCYLLDGILFIYGVILTALFLRSKRSRLLHSDYMNMTPRRPGPTRKHYQPYAPPRDFAAYRSRVKFSRSADAPAYQQGQNQLYNELNLGRREEYDVLDKRRGRDPEMGGKPQRRKNPQEGLYNELQKDKMAEAYSEIGMKGERRRGKGHDGLYQGLSTATKDTYDALHMQALPPR

SEQ ID NO: 14995 - protein, 1379 aa, Artificial Sequence
  Synthetic Polypeptide
MALPVTALLLPLALLLHAARPACQVQLVESGGGLVQAGDSVTLSCTASGRTFSSYALAWFRQRPGKEREFVAGLRWGGPTNYADSVKDRFTISGDSAKHTMYLQMNSLKPEDTAVYYCGYNPGGWAVPSQYEYDSWGQGTQVTVSSGTGGGGSGGGGSGGGGSEFDIQMTQSPSSLSASVGDRVTITCKASDHINNWLAWYQQKPGQAPKLLIYGATTLETGVPSRFSGSGSGTDYTLTISSLQPEDFATYYCQQSWNTPWTFGQGTKLEIKRLEGKPIPNPLLGLDSTGSGEDLKNVFPPEVAVFEPSEAEISHTQKATLVCLATGFYPDHVELSWWVNGKEVHSGVSTDPQPLKEQPALNDSRYCLSSRLRVSATFWQNPRNHFRCQVQFYGLSENDEWTQDRAKPVTQIVSAEAWGRADCGSQSFGLLDPKLCYLLDGILFIYGVILTALFLRSKRSRLLHSDYMNMTPRRPGPTRKHYQPYAPPRDFAAYRSRVKFSRSADAPAYQQGQNQLYNELNLGRREEYDVLDKRRGRDPEMGGKPQRRKNPQEGLYNELQKDKMAEAYSEIGMKGERRRGKGHDGLYQGLSTATKDTYDALHMQALPPRRAKRSGSGATNFSLLKQAGDVEENPGPTSMDWIWRILFLVGAATGAHSGPLFNQEVQIPLTESYCGPCPKNWICYKNNCYQFFDESKNWYESQASCMSQNASLLKVYSKEDQDLLKLVKSYHWMGLVHIPTNGSWQWEDGSILSPNLLTIIEMQKGDCALYASSFKGYIENCSTPNTYICMQRTVGGGGSGGGGSGGGGSDLFNQEVQIPLTESYCGPCPKNWICYKNNCYQFFDESKNWYESQASCMSQNASLLKVYSKEDQDLLKLVKSYHWMGLVHIPTNGSWQWEDGSILSPNLLTIIEMQKGDCALYASSFKGYIENCSTPNTYICMQRTVGSGGGGSGGGGSGGGGSFEQVQLQQPGAELVKPGASVKMSCKASGYAFSSYWINWMKQKPGQGLEWIGQIYPGDGDTNYNGKFKGRATLTADTSSSTAYMQLSSLTSEDSAVYFCARSITTVVGCAMDYWGQGTSVTVSSTREQKLISEEDGSGIQNPDPAVYQLRDSKSSDKSVCLFTDFDSQTNVSQSKDSDVYITDKTVLDMRSMDFKSNSAVAWSNKSDFACANAFNNSIIPEDTFFPSPESSCGTQSFGLLDPKLCYLLDGILFIYGVILTALFLRSKRSRLLHSDYMNMTPRRPGPTRKHYQPYAPPRDFAAYRSRVKFSRSADAPAYQQGQNQLYNELNLGRREEYDVLDKRRGRDPEMGGKPQRRKNPQEGLYNELQKDKMAEAYSEIGMKGERRRGKGHDGLYQGLSTATKDTYDALHMQALPPR

SEQ ID NO: 14996 - protein, 1340 aa, Artificial Sequence
  Synthetic Polypeptide
MALPVTALLLPLALLLHAARPACQVQLVESGGGLVQAGDSVTLSCTASGRTFSSYALAWFRQRPGKEREFVAGLRWGGPTNYADSVKDRFTISGDSAKHTMYLQMNSLKPEDTAVYYCGYNPGGWAVPSQYEYDSWGQGTQVTVSSGTGGGGSGGGGSGGGGSEFDIQMTQSPSSLSASVGDRVTITCKASDHINNWLAWYQQKPGQAPKLLIYGATTLETGVPSRFSGSGSGTDYTLTISSLQPEDFATYYCQQSWNTPWTFGQGTKLEIKRLEGKPIPNPLLGLDSTGSGEDLKNVFPPEVAVFEPSEAEISHTQKATLVCLATGFYPDHVELSWWVNGKEVHSGVSTDPQPLKEQPALNDSRYCLSSRLRVSATFWQNPRNHFRCQVQFYGLSENDEWTQDRAKPVTQIVSAEAWGRADCGSQSFGLLDPKLCYLLDGILFIYGVILTALFLRVKFSRSADAPAYQQGQNQLYNELNLGRREEYDVLDKRRGRDPEMGGKPQRRKNPQEGLYNELQKDKMAEAYSEIGMKGERRRGKGHDGLYQGLSTATKDTYDALHMQALPPRRAKRSGSGATNFSLLKQAGDVEENPGPTSMDWIWRILFLVGAATGAHSGPLFNQEVQIPLTESYCGPCPKNWICYKNNCYQFFDESKNWYESQASCMSQNASLLKVYSKEDQDLLKLVKSYHWMGLVHIPTNGSWQWEDGSILSPNLLTIIEMQKGDCALYASSFKGYIENCSTPNTYICMQRTVGGGGSGGGGSGGGGSDLFNQEVQIPLTESYCGPCPKNWICYKNNCYQFFDESKNWYESQASCMSQNASLLKVYSKEDQDLLKLVKSYHWMGLVHIPTNGSWQWEDGSILSPNLLTIIEMQKGDCALYASSFKGYIENCSTPNTYICMQRTVGSGGGGSGGGGSGGGGSFEQVQLQQPGAELVKPGASVKMSCKASGYAFSSYWINWMKQKPGQGLEWIGQIYPGDGDTNYNGKFKGRATLTADTSSSTAYMQLSSLTSEDSAVYFCARSITTVVGCAMDYWGQGTSVTVSSTREQKLISEEDLGSGIQNPDPAVYQLRDSKSSDKSVCLFTDFDSQTNVSQSKDSDVYITDKTVLDMRSMDFKSNSAVAWSNKSDFACANAFNNSIIPEDTFFPSPESSCGTQSFGLLDPKLCYLLDGILFIYGVILTALFLKRGRKKLLYIFKQPFMRPVQTTQEEDGCSCRFPEEEEGGCELRVKFSRSADAPAYQQGQNQLYNELNLGRREEYDVLDKRRGRDPEMGGKPQRRKNPQEGLYNELQKDKMAEAYSEIGMKGERRRGKGHDGLYQGLSTATKDTYDALHMQALPPR

SEQ ID NO: 14997 - protein, 1382 aa, Artificial Sequence
  Synthetic Polypeptide
MALPVTALLLPLALLLHAARPACQVQLVESGGGLVQAGDSVTLSCTASGRTFSSYALAWFRQRPGKEREFVAGLRWGGPTNYADSVKDRFTISGDSAKHTMYLQMNSLKPEDTAVYYCGYNPGGWAVPSQYEYDSWGQGTQVTVSSGTGGGGSGGGGSGGGGSEFDIQMTQSPSSLSASVGDRVTITCKASDHINNWLAWYQQKPGQAPKLLIYGATTLETGVPSRFSGSGSGTDYTLTISSLQPEDFATYYCQQSWNTPWTFGQGTKLEIKRLEGKPIPNPLLGLDSTGSGEDLKNVFPPEVAVFEPSEAEISHTQKATLVCLATGFYPDHVELSWWVNGKEVHSGVSTDPQPLKEQPALNDSRYCLSSRLRVSATFWQNPRNHFRCQVQFYGLSENDEWTQDRAKPVTQIVSAEAWGRADCGSQSFGLLDPKLCYLLDGILFIYGVILTALFLKRGRKKLLYIFKQPFMRPVQTTQEEDGCSCRFPEEEEGGCELRVKFSRSADAPAYQQGQNQLYNELNLGRREEYDVLDKRRGRDPEMGGKPQRRKNPQEGLYNELQKDKMAEAYSEIGMKGERRRGKGHDGLYQGLSTATKDTYDALHMQALPPRRAKRSGSGATNFSLLKQAGDVEENPGPTSMDWIWRILFLVGAATGAHSGPLFNQEVQIPLTESYCGPCPKNWICYKNNCYQFFDESKNWYESQASCMSQNASLLKVYSKEDQDLLKLVKSYHWMGLVHIPTNGSWQWEDGSILSPNLLTIIEMQKGDCALYASSFKGYIENCSTPNTYICMQRTVGGGGSGGGGSGGGGSDLFNQEVQIPLTESYCGPCPKNWICYKNNCYQFFDESKNWYESQASCMSQNASLLKVYSKEDQDLLKLVKSYHWMGLVHIPTNGSWQWEDGSILSPNLLTIIEMQKGDCALYASSFKGYIENCSTPNTYICMQRTVGSGGGGSGGGGSGGGGSFEQVQLQQPGAELVKPGASVKMSCKASGYAFSSYWINWMKQKPGQGLEWIGQIYPGDGDTNYNGKFKGRATLTADTSSSTAYMQLSSLTSEDSAVYFCARSITTVVGCAMDYWGQGTSVTVSSTREQKLISEEDLGSGIQNPDPAVYQLRDSKSSDKSVCLFTDFDSQTNVSQSKDSDVYITDKTVLDMRSMDFKSNSAVAWSNKSDFACANAFNNSIIPEDTFFPSPESSCGTQSFGLLDPKLCYLLDGILFIYGVILTALFLKRGRKKLLYIFKQPFMRPVQTTQEEDGCSCRFPEEEEGGCELRVKFSRSADAPAYQQGQNQLYNELNLGRREEYDVLDKRRGRDPEMGGKPQRRKNPQEGLYNELQKDKMAEAYSEIGMKGERRRGKGHDGLYQGLSTATKDTYDALHMQALPPR

SEQ ID NO: 14998 - protein, 1272 aa, Artificial Sequence
  Synthetic Polypeptide
MALPVTALLLPLALLLHAARPACQVQLVESGGGLVQAGDSVTLSCTASGRTFSSYALAWFRQRPGKEREFVAGLRWGGPTNYADSVKDRFTISGDSAKHTMYLQMNSLKPEDTAVYYCGYNPGGWAVPSQYEYDSWGQGTQVTVSSGTGGGGSGGGGSGGGGSEFDIQMTQSPSSLSASVGDRVTITCKASDHINNWLAWYQQKPGQAPKLLIYGATTLETGVPSRFSGSGSGTDYTLTISSLQPEDFATYYCQQSWNTPWTFGQGTKLEIKRLEQSFGLLDPKLCYLLDGILFIYGVILTALFLRVKFSRSADAPAYQQGQNQLYNELNLGRREEYDVLDKRRGRDPEMGGKPQRRKNPQEGLYNELQKDKMAEAYSEIGMKGERRRGKGHDGLYQGLSTATKDTYDALHMQALPPRRAKRSGSGATNFSLLKQAGDVEENPGPTSMDWIWRILFLVGAATGAHSGPLFNQEVQIPLTESYCGPCPKNWICYKNNCYQFFDESKNWYESQASCMSQNASLLKVYSKEDQDLLKLVKSYHWMGLVHIPTNGSWQWEDGSILSPNLLTIIEMQKGDCALYASSFKGYIENCSTPNTYICMQRTVGGGGSGGGGSGGGGSDLFNQEVQIPLTESYCGPCPKNWICYKNNCYQFFDESKNWYESQASCMSQNASLLKVYSKEDQDLLKLVKSYHWMGLVHIPTNGSWQWEDGSILSPNLLTIIEMQKGDCALYASSFKGYIENCSTPNTYICMQRTVGSGGGGSGGGGSGGGGSFEQVQLQQPGAELVKPGASVKMSCKASGYAFSSYWINWMKQKPGQGLEWIGQIYPGDGDTNYNGKFKGRATLTADTSSSTAYMQLSSLTSEDSAVYFCARSITTVVGCAMDYWGQGTSVTVSSTRQSFGLLDPKLCYLLDGILFIYGVILTALFLRVKFSRSADAPAYQQGQNQLYNELNLGRREEYDVLDKRRGRDPEMGGKPQRRKNPQEGLYNELQKDKMAEAYSEIGMKGERRRGKGHDGLYQGLSTATKDTYDALHMQALPPRRAKRSGSGVKQTLNFDLLKLAGDVESNPGPSRGHMTEYKPTVRLATRDDVPRAVRTLAAAFADYPATRHTVDPDRHIERVTELQELFLTRVGLDIGKVWVADDGAAVAVWTTPESVEAGAVFAEIGPRMAELSGSRLAAQQQMEGLLAPHRPKEPAWFLATVGVSPDHQGKGLGSAVVLPGVEAAERAGVPAFLETSAPRNLPFYERLGFTVTADVEVPEGPRTWCMTRKPGA

SEQ ID NO: 14999 - protein, 1097 aa, Artificial Sequence
  Synthetic Polypeptide
MALPVTALLLPLALLLHAARPACQVQLVESGGGLVQAGDSVTLSCTASGRTFSSYALAWFRQRPGKEREFVAGLRWGGPTNYADSVKDRFTISGDSAKHTMYLQMNSLKPEDTAVYYCGYNPGGWAVPSQYEYDSWGQGTQVTVSSGTGGGGSGGGGSGGGGSEFDIQMTQSPSSLSASVGDRVTITCKASDHINNWLAWYQQKPGQAPKLLIYGATTLETGVPSRFSGSGSGTDYTLTISSLQPEDFATYYCQQSWNTPWTFGQGTKLEIKRLEGQPKANPTVTLFPPSSEELQANKATLVCLISDFYPGAVTVAWKADGSPVKAGVETTKPSKQSNNKYAASSYLSLTPEQWKSHRSYSCQVTHEGSTVEKTVAPTECSPIKTDVITMDPKDNCSKDANDTLLLQLTNTSAYYMYLLLLLKSVVYFAIITCCLLRRTAFCCNGEKSRAKRSGSGATNFSLLKQAGDVEENPGPTSMDWIWRILFLVGAATGAHSGPLFNQEVQIPLTESYCGPCPKNWICYKNNCYQFFDESKNWYESQASCMSQNASLLKVYSKEDQDLLKLVKSYHWMGLVHIPTNGSWQWEDGSILSPNLLTIIEMQKGDCALYASSFKGYIENCSTPNTYICMQRTVGGGGSGGGGSGGGGSDLFNQEVQIPLTESYCGPCPKNWICYKNNCYQFFDESKNWYESQASCMSQNASLLKVYSKEDQDLLKLVKSYHWMGLVHIPTNGSWQWEDGSILSPNLLTIIEMQKGDCALYASSFKGYIENCSTPNTYICMQRTVGSGGGGSGGGGSGGGGSFEQVQLQQPGAELVKPGASVKMSCKASGYAFSSYWINWMKQKPGQGLEWIGQIYPGDGDTNYNGKFKGRATLTADTSSSTAYMQLSSLTSEDSAVYFCARSITTVVGCAMDYWGQGTSVTVSSTRASTKGPSVFPLAPSSKSTSGGTAALGCLVKDYFPEPVTVSWNSGALTSGVHTFPAVLQSSGLYSLSSVVTVPSSSLGTQTYICNVNHKPSNTKVDKRVEPKSCEVKTDSTDHVKPKETENTKQPSKSCHKPKAIVHTEKVNMMSLTVLGLRMLFAKTVAVNFLLTAKLFFL

SEQ ID NO: 15000 - protein, 1075 aa, Artificial Sequence
  Synthetic Polypeptide
MALPVTALLLPLALLLHAARPACQVQLVESGGGLVQAGDSVTLSCTASGRTFSSYALAWFRQRPGKEREFVAGLRWGGPTNYADSVKDRFTISGDSAKHTMYLQMNSLKPEDTAVYYCGYNPGGWAVPSQYEYDSWGQGTQVTVSSGTGGGGSGGGGSGGGGSEFDIQMTQSPSSLSASVGDRVTITCKASDHINNWLAWYQQKPGQAPKLLIYGATTLETGVPSRFSGSGSGTDYTLTISSLQPEDFATYYCQQSWNTPWTFGQGTKLEIKRLEGQPKANPTVTLFPPSSEELQANKATLVCLISDFYPGAVTVAWKADGSPVKAGVETTKPSKQSNNKYAASSYLSLTPEQWKSHRSYSCQVTHEGSTVEKTVAPTECSGRADCGITSASYHQGVLSATILYEILLGKATLYAVLVSALVLMAMVKRKDSRGRAKRSGSGATNFSLLKQAGDVEENPGPTSMDWIWRILFLVGAATGAHSGPLFNQEVQIPLTESYCGPCPKNWICYKNNCYQFFDESKNWYESQASCMSQNASLLKVYSKEDQDLLKLVKSYHWMGLVHIPTNGSWQWEDGSILSPNLLTIIEMQKGDCALYASSFKGYIENCSTPNTYICMQRTVGGGGSGGGGSGGGGSDLFNQEVQIPLTESYCGPCPKNWICYKNNCYQFFDESKNWYESQASCMSQNASLLKVYSKEDQDLLKLVKSYHWMGLVHIPTNGSWQWEDGSILSPNLLTIIEMQKGDCALYASSFKGYIENCSTPNTYICMQRTVGSGGGGSGGGGSGGGGSFEQVQLQQPGAELVKPGASVKMSCKASGYAFSSYWINWMKQKPGQGLEWIGQIYPGDGDTNYNGKFKGRATLTADTSSSTAYMQLSSLTSEDSAVYFCARSITTVVGCAMDYWGQGTSVTVSSTRASTKGPSVFPLAPSSKSTSGGTAALGCLVKDYFPEPVTVSWNSGALTSGVHTFPAVLQSSGLYSLSSVVTVPSSSLGTQTYICNVNHKPSNTKVDKRVEPKSCIPEDTFFPSSDVPCDVKLVEKSFETDTNLNFQNLSVIGFRILLLKVAGFNLLMTLRLWSS

SEQ ID NO: 15001 - protein, 1075 aa, Artificial Sequence
  Synthetic Polypeptide
MALPVTALLLPLALLLHAARPACQVQLVESGGGLVQAGDSVTLSCTASGRTFSSYALAWFRQRPGKEREFVAGLRWGGPTNYADSVKDRFTISGDSAKHTMYLQMNSLKPEDTAVYYCGYNPGGWAVPSQYEYDSWGQGTQVTVSSGTGGGGSGGGGSGGGGSEFDIQMTQSPSSLSASVGDRVTITCKASDHINNWLAWYQQKPGQAPKLLIYGATTLETGVPSRFSGSGSGTDYTLTISSLQPEDFATYYCQQSWNTPWTFGQGTKLEIKRLEGQPKANPTVTLFPPSSEELQANKATLVCLISDFYPGAVTVAWKADGSPVKAGVETTKPSKQSNNKYAASSYLSLTPEQWKSHRSYSCQVTHEGSTVEKTVAPTECSGRADCGFTSESYQQGVLSATILYEILLGKATLYAVLVSALVLMAMVKRKDSRGRAKRSGSGATNFSLLKQAGDVEENPGPTSMDWIWRILFLVGAATGAHSGPLFNQEVQIPLTESYCGPCPKNWICYKNNCYQFFDESKNWYESQASCMSQNASLLKVYSKEDQDLLKLVKSYHWMGLVHIPTNGSWQWEDGSILSPNLLTIIEMQKGDCALYASSFKGYIENCSTPNTYICMQRTVGGGGSGGGGSGGGGSDLFNQEVQIPLTESYCGPCPKNWICYKNNCYQFFDESKNWYESQASCMSQNASLLKVYSKEDQDLLKLVKSYHWMGLVHIPTNGSWQWEDGSILSPNLLTIIEMQKGDCALYASSFKGYIENCSTPNTYICMQRTVGSGGGGSGGGGSGGGGSFEQVQLQQPGAELVKPGASVKMSCKASGYAFSSYWINWMKQKPGQGLEWIGQIYPGDGDTNYNGKFKGRATLTADTSSSTAYMQLSSLTSEDSAVYFCARSITTVVGCAMDYWGQGTSVTVSSTRASTKGPSVFPLAPSSKSTSGGTAALGCLVKDYFPEPVTVSWNSGALTSGVHTFPAVLQSSGLYSLSSVVTVPSSSLGTQTYICNVNHKPSNTKVDKRVEPKSCIPEDTFFPSPESSCDVKLVEKSFETDTNLNFQNLSVIGFRILLLKVAGFNLLMTLRLWSS

SEQ ID NO: 15002 - protein, 1039 aa, Artificial Sequence
  Synthetic Polypeptide
MALPVTALLLPLALLLHAARPACQVQLVESGGGLVQAGDSVTLSCTASGRTFSSYALAWFRQRPGKEREFVAGLRWGGPTNYADSVKDRFTISGDSAKHTMYLQMNSLKPEDTAVYYCGYNPGGWAVPSQYEYDSWGQGTQVTVSSLEGQPKANPTVTLFPPSSEELQANKATLVCLISDFYPGAVTVAWKADGSPVKAGVETTKPSKQSNNKYAASSYLSLTPEQWKSHRSYSCQVTHEGSTVEKTVAPTECSGRADCGFTSESYQQGVLSATILYEILLGKATLYAVLVSALVLMAMVKRKDSRGRAKRSGSGATNFSLLKQAGDVEENPGPTSMDWIWRILFLVGAATGAHSLFNQEVQIPLTESYCGPCPKNWICYKNNCYQFFDESKNWYESQASCMSQNASLLKVYSKEDQDLLKLVKSYHWMGLVHIPTNGSWQWEDGSILSPNLLTIIEMQKGDCALYASSFKGYIENCSTPNTYICMQRTVGGGGSGGGGSGGGGSDLFNQEVQIPLTESYCGPCPKNWICYKNNCYQFFDESKNWYESQASCMSQNASLLKVYSKEDQDLLKLVKSYHWMGLVHIPTNGSWQWEDGSILSPNLLTIIEMQKGDCALYASSFKGYIENCSTPNTYICMQRTVTRASTKGPSVFPLAPSSKSTSGGTAALGCLVKDYFPEPVTVSWNSGALTSGVHTFPAVLQSSGLYSLSSVVTVPSSSLGTQTYICNVNHKPSNTKVDKRVEPKSCIPEDTFFPSPESSCDVKLVEKSFETDTNLNFQNLSVIGFRILLLKVAGFNLLMTLRLWSSRAKRSGSGVKQTLNFDLLKLAGDVESNPGPSRGHMTEYKPTVRLATRDDVPRAVRTLAAAFADYPATRHTVDPDRHIERVTELQELFLTRVGLDIGKVWVADDGAAVAVWTTPESVEAGAVFAEIGPRMAELSGSRLAAQQQMEGLLAPHRPKEPAWFLATVGVSPDHQGKGLGSAVVLPGVEAAERAGVPAFLETSAPRNLPFYERLGFTVTADVEVPEGPRTWCMTRKPGA

SEQ ID NO: 15003 - protein, 806 aa, Artificial Sequence
  Synthetic Polypeptide
MALPVTALLLPLALLLHAARPACQVQLVESGGGLVQAGDSVTLSCTASGRTFSSYALAWFRQRPGKEREFVAGLRWGGPTNYADSVKDRFTISGDSAKHTMYLQMNSLKPEDTAVYYCGYNPGGWAVPSQYEYDSWGQGTQVTVSSLEGQPKANPTVTLFPPSSEELQANKATLVCLISDFYPGAVTVAWKADGSPVKAGVETTKPSKQSNNKYAASSYLSLTPEQWKSHRSYSCQVTHEGSTVEKTVAPTECSGRADCGFTSESYQQGVLSATILYEILLGKATLYAVLVSALVLMAMVKRKDSRGRAKRSGSGATNFSLLKQAGDVEENPGPTSMDWIWRILFLVGAATGAHSLFNQEVQIPLTESYCGPCPKNWICYKNNCYQFFDESKNWYESQASCMSQNASLLKVYSKEDQDLLKLVKSYHWMGLVHIPTNGSWQWEDGSILSPNLLTIIEMQKGDCALYASSFKGYIENCSTPNTYICMQRTVGGGGSGGGGSGGGGSDLFNQEVQIPLTESYCGPCPKNWICYKNNCYQFFDESKNWYESQASCMSQNASLLKVYSKEDQDLLKLVKSYHWMGLVHIPTNGSWQWEDGSILSPNLLTIIEMQKGDCALYASSFKGYIENCSTPNTYICMQRTVTRASTKGPSVFPLAPSSKSTSGGTAALGCLVKDYFPEPVTVSWNSGALTSGVHTFPAVLQSSGLYSLSSVVTVPSSSLGTQTYICNVNHKPSNTKVDKRVEPKSCIPEDTFFPSPESSCDVKLVEKSFETDTNLNFQNLSVIGFRILLLKVAGFNLLMTLRLWSS

SEQ ID NO: 15004 - protein, 834 aa, Artificial Sequence
  Synthetic Polypeptide
MALPVTALLLPLALLLHAARPACQVQLVESGGGLVQAGDSVTLSCTASGRTFSSYALAWFRQRPGKEREFVAGLRWGGPTNYADSVKDRFTISGDSAKHTMYLQMNSLKPEDTAVYYCGYNPGGWAVPSQYEYDSWGQGTQVTVSSLEGSGRADCGFTSESYQQGVLSATILYEILLGKATLYAVLVSALVLMAMVKRKDSRGRAKRSGSGATNFSLLKQAGDVEENPGPTSMDWIWRILFLVGAATGAHSLFNQEVQIPLTESYCGPCPKNWICYKNNCYQFFDESKNWYESQASCMSQNASLLKVYSKEDQDLLKLVKSYHWMGLVHIPTNGSWQWEDGSILSPNLLTIIEMQKGDCALYASSFKGYIENCSTPNTYICMQRTVGGGGSGGGGSGGGGSDLFNQEVQIPLTESYCGPCPKNWICYKNNCYQFFDESKNWYESQASCMSQNASLLKVYSKEDQDLLKLVKSYHWMGLVHIPTNGSWQWEDGSILSPNLLTIIEMQKGDCALYASSFKGYIENCSTPNTYICMQRTVTRGSIPEDTFFPSPESSCDVKLVEKSFETDTNLNFQNLSVIGFRILLLKVAGFNLLMTLRLWSSRAKRSGSGVKQTLNFDLLKLAGDVESNPGPSRGHMTEYKPTVRLATRDDVPRAVRTLAAAFADYPATRHTVDPDRHIERVTELQELFLTRVGLDIGKVWVADDGAAVAVWTTPESVEAGAVFAEIGPRMAELSGSRLAAQQQMEGLLAPHRPKEPAWFLATVGVSPDHQGKGLGSAVVLPGVEAAERAGVPAFLETSAPRNLPFYERLGFTVTADVEVPEGPRTWCMTRKPGA

SEQ ID NO: 15005 - protein, 601 aa, Artificial Sequence
  Synthetic Polypeptide
MALPVTALLLPLALLLHAARPACQVQLVESGGGLVQAGDSVTLSCTASGRTFSSYALAWFRQRPGKEREFVAGLRWGGPTNYADSVKDRFTISGDSAKHTMYLQMNSLKPEDTAVYYCGYNPGGWAVPSQYEYDSWGQGTQVTVSSLEGSGRADCGFTSESYQQGVLSATILYEILLGKATLYAVLVSALVLMAMVKRKDSRGRAKRSGSGATNFSLLKQAGDVEENPGPTSMDWIWRILFLVGAATGAHSLFNQEVQIPLTESYCGPCPKNWICYKNNCYQFFDESKNWYESQASCMSQNASLLKVYSKEDQDLLKLVKSYHWMGLVHIPTNGSWQWEDGSILSPNLLTIIEMQKGDCALYASSFKGYIENCSTPNTYICMQRTVGGGGSGGGGSGGGGSDLFNQEVQIPLTESYCGPCPKNWICYKNNCYQFFDESKNWYESQASCMSQNASLLKVYSKEDQDLLKLVKSYHWMGLVHIPTNGSWQWEDGSILSPNLLTIIEMQKGDCALYASSFKGYIENCSTPNTYICMQRTVTRGSIPEDTFFPSPESSCDVKLVEKSFETDTNLNFQNLSVIGFRILLLKVAGFNLLMTLRLWSS

SEQ ID NO: 15006 - protein, 843 aa, Artificial Sequence
  Synthetic Polypeptide
MALPVTALLLPLALLLHAARPACQVQLVESGGGLVQAGDSVTLSCTASGRTFSSYALAWFRQRPGKEREFVAGLRWGGPTNYADSVKDRFTISGDSAKHTMYLQMNSLKPEDTAVYYCGYNPGGWAVPSQYEYDSWGQGTQVTVSSLEDKTHTCPPCPAGRADCGFTSESYQQGVLSATILYEILLGKATLYAVLVSALVLMAMVKRKDSRGRAKRSGSGATNFSLLKQAGDVEENPGPTSMDWIWRILFLVGAATGAHSLFNQEVQIPLTESYCGPCPKNWICYKNNCYQFFDESKNWYESQASCMSQNASLLKVYSKEDQDLLKLVKSYHWMGLVHIPTNGSWQWEDGSILSPNLLTIIEMQKGDCALYASSFKGYIENCSTPNTYICMQRTVGGGGSGGGGSGGGGSDLFNQEVQIPLTESYCGPCPKNWICYKNNCYQFFDESKNWYESQASCMSQNASLLKVYSKEDQDLLKLVKSYHWMGLVHIPTNGSWQWEDGSILSPNLLTIIEMQKGDCALYASSFKGYIENCSTPNTYICMQRTVTRGSIPEDTFFPSPESSCDVKLVEKSFETDTNLNFQNLSVIGFRILLLKVAGFNLLMTLRLWSSRAKRSGSGVKQTLNFDLLKLAGDVESNPGPSRGHMTEYKPTVRLATRDDVPRAVRTLAAAFADYPATRHTVDPDRHIERVTELQELFLTRVGLDIGKVWVADDGAAVAVWTTPESVEAGAVFAEIGPRMAELSGSRLAAQQQMEGLLAPHRPKEPAWFLATVGVSPDHQGKGLGSAVVLPGVEAAERAGVPAFLETSAPRNLPFYERLGFTVTADVEVPEGPRTWCMTRKPGA

SEQ ID NO: 15007 - protein, 843 aa, Artificial Sequence
  Synthetic Polypeptide
MALPVTALLLPLALLLHAARPACQVQLVESGGGLVQAGDSVTLSCTASGRTFSSYALAWFRQRPGKEREFVAGLRWGGPTNYADSVKDRFTISGDSAKHTMYLQMNSLKPEDTAVYYCGYNPGGWAVPSQYEYDSWGQGTQVTVSSLEGSGRADCGFTSESYQQGVLSATILYEILLGKATLYAVLVSALVLMAMVKRKDSRGRAKRSGSGATNFSLLKQAGDVEENPGPTSMDWIWRILFLVGAATGAHSLFNQEVQIPLTESYCGPCPKNWICYKNNCYQFFDESKNWYESQASCMSQNASLLKVYSKEDQDLLKLVKSYHWMGLVHIPTNGSWQWEDGSILSPNLLTIIEMQKGDCALYASSFKGYIENCSTPNTYICMQRTVGGGGSGGGGSGGGGSDLFNQEVQIPLTESYCGPCPKNWICYKNNCYQFFDESKNWYESQASCMSQNASLLKVYSKEDQDLLKLVKSYHWMGLVHIPTNGSWQWEDGSILSPNLLTIIEMQKGDCALYASSFKGYIENCSTPNTYICMQRTVTRDKTHTCPPCPAIPEDTFFPSPESSCDVKLVEKSFETDTNLNFQNLSVIGFRILLLKVAGFNLLMTLRLWSSRAKRSGSGVKQTLNFDLLKLAGDVESNPGPSRGHMTEYKPTVRLATRDDVPRAVRTLAAAFADYPATRHTVDPDRHIERVTELQELFLTRVGLDIGKVWVADDGAAVAVWTTPESVEAGAVFAEIGPRMAELSGSRLAAQQQMEGLLAPHRPKEPAWFLATVGVSPDHQGKGLGSAVVLPGVEAAERAGVPAFLETSAPRNLPFYERLGFTVTADVEVPEGPRTWCMTRKPGA

SEQ ID NO: 15008 - protein, 852 aa, Artificial Sequence
  Synthetic Polypeptide
MALPVTALLLPLALLLHAARPACQVQLVESGGGLVQAGDSVTLSCTASGRTFSSYALAWFRQRPGKEREFVAGLRWGGPTNYADSVKDRFTISGDSAKHTMYLQMNSLKPEDTAVYYCGYNPGGWAVPSQYEYDSWGQGTQVTVSSLEDKTHTCPPCPAGRADCGFTSESYQQGVLSATILYEILLGKATLYAVLVSALVLMAMVKRKDSRGRAKRSGSGATNFSLLKQAGDVEENPGPTSMDWIWRILFLVGAATGAHSLFNQEVQIPLTESYCGPCPKNWICYKNNCYQFFDESKNWYESQASCMSQNASLLKVYSKEDQDLLKLVKSYHWMGLVHIPTNGSWQWEDGSILSPNLLTIIEMQKGDCALYASSFKGYIENCSTPNTYICMQRTVGGGGSGGGGSGGGGSDLFNQEVQIPLTESYCGPCPKNWICYKNNCYQFFDESKNWYESQASCMSQNASLLKVYSKEDQDLLKLVKSYHWMGLVHIPTNGSWQWEDGSILSPNLLTIIEMQKGDCALYASSFKGYIENCSTPNTYICMQRTVTRDKTHTCPPCPAIPEDTFFPSPESSCDVKLVEKSFETDTNLNFQNLSVIGFRILLLKVAGFNLLMTLRLWSSRAKRSGSGVKQTLNFDLLKLAGDVESNPGPSRGHMTEYKPTVRLATRDDVPRAVRTLAAAFADYPATRHTVDPDRHIERVTELQELFLTRVGLDIGKVWVADDGAAVAVWTTPESVEAGAVFAEIGPRMAELSGSRLAAQQQMEGLLAPHRPKEPAWFLATVGVSPDHQGKGLGSAVVLPGVEAAERAGVPAFLETSAPRNLPFYERLGFTVTADVEVPEGPRTWCMTRKPGA

SEQ ID NO: 15009 - protein, 619 aa, Artificial Sequence
  Synthetic Polypeptide
MALPVTALLLPLALLLHAARPACQVQLVESGGGLVQAGDSVTLSCTASGRTFSSYALAWFRQRPGKEREFVAGLRWGGPTNYADSVKDRFTISGDSAKHTMYLQMNSLKPEDTAVYYCGYNPGGWAVPSQYEYDSWGQGTQVTVSSLEDKTHTCPPCPAGRADCGFTSESYQQGVLSATILYEILLGKATLYAVLVSALVLMAMVKRKDSRGRAKRSGSGATNFSLLKQAGDVEENPGPTSMDWIWRILFLVGAATGAHSLFNQEVQIPLTESYCGPCPKNWICYKNNCYQFFDESKNWYESQASCMSQNASLLKVYSKEDQDLLKLVKSYHWMGLVHIPTNGSWQWEDGSILSPNLLTIIEMQKGDCALYASSFKGYIENCSTPNTYICMQRTVGGGGSGGGGSGGGGSDLFNQEVQIPLTESYCGPCPKNWICYKNNCYQFFDESKNWYESQASCMSQNASLLKVYSKEDQDLLKLVKSYHWMGLVHIPTNGSWQWEDGSILSPNLLTIIEMQKGDCALYASSFKGYIENCSTPNTYICMQRTVTRDKTHTCPPCPAIPEDTFFPSPESSCDVKLVEKSFETDTNLNFQNLSVIGFRILLLKVAGFNLLMTLRLWSS

SEQ ID NO: 15010 - protein, 610 aa, Artificial Sequence
  Synthetic Polypeptide
MALPVTALLLPLALLLHAARPACQVQLVESGGGLVQAGDSVTLSCTASGRTFSSYALAWFRQRPGKEREFVAGLRWGGPTNYADSVKDRFTISGDSAKHTMYLQMNSLKPEDTAVYYCGYNPGGWAVPSQYEYDSWGQGTQVTVSSLEGSGRADCGFTSESYQQGVLSATILYEILLGKATLYAVLVSALVLMAMVKRKDSRGRAKRSGSGATNFSLLKQAGDVEENPGPTSMDWIWRILFLVGAATGAHSLFNQEVQIPLTESYCGPCPKNWICYKNNCYQFFDESKNWYESQASCMSQNASLLKVYSKEDQDLLKLVKSYHWMGLVHIPTNGSWQWEDGSILSPNLLTIIEMQKGDCALYASSFKGYIENCSTPNTYICMQRTVGGGGSGGGGSGGGGSDLFNQEVQIPLTESYCGPCPKNWICYKNNCYQFFDESKNWYESQASCMSQNASLLKVYSKEDQDLLKLVKSYHWMGLVHIPTNGSWQWEDGSILSPNLLTIIEMQKGDCALYASSFKGYIENCSTPNTYICMQRTVTRDKTHTCPPCPAIPEDTFFPSPESSCDVKLVEKSFETDTNLNFQNLSVIGFRILLLKVAGFNLLMTLRLWSS

SEQ ID NO: 15011 - protein, 1061 aa, Artificial Sequence
  Synthetic Polypeptide
MALPVTALLLPLALLLHAARPACQVQLVESGGGLVQAGDSVTLSCTASGRTFSSYALAWFRQRPGKEREFVAGLRWGGPTNYADSVKDRFTISGDSAKHTMYLQMNSLKPEDTAVYYCGYNPGGWAVPSQYEYDSWGQGTQVTVSSLEGQPKANPTVTLFPPSSEELQANKATLVCLISDFYPGAVTVAWKADGSPVKAGVETTKPSKQSNNKYAASSYLSLTPEQWKSHRSYSCQVTHEGSTVEKTVAPTECSPIKTDVITMDPKDNCSKDANDTLLLQLTNTSAYYMYLLLLLKSVVYFAIITCCLLRRTAFCCNGEKSRAKRSGSGATNFSLLKQAGDVEENPGPTSMDWIWRILFLVGAATGAHSLFNQEVQIPLTESYCGPCPKNWICYKNNCYQFFDESKNWYESQASCMSQNASLLKVYSKEDQDLLKLVKSYHWMGLVHIPTNGSWQWEDGSILSPNLLTIIEMQKGDCALYASSFKGYIENCSTPNTYICMQRTVGGGGSGGGGSGGGGSDLFNQEVQIPLTESYCGPCPKNWICYKNNCYQFFDESKNWYESQASCMSQNASLLKVYSKEDQDLLKLVKSYHWMGLVHIPTNGSWQWEDGSILSPNLLTIIEMQKGDCALYASSFKGYIENCSTPNTYICMQRTVTRASTKGPSVFPLAPSSKSTSGGTAALGCLVKDYFPEPVTVSWNSGALTSGVHTFPAVLQSSGLYSLSSVVTVPSSSLGTQTYICNVNHKPSNTKVDKRVEPKSCEVKTDSTDHVKPKETENTKQPSKSCHKPKAIVHTEKVNMMSLTVLGLRMLFAKTVAVNFLLTAKLFFLRAKRSGSGVKQTLNFDLLKLAGDVESNPGPSRGHMTEYKPTVRLATRDDVPRAVRTLAAAFADYPATRHTVDPDRHIERVTELQELFLTRVGLDIGKVWVADDGAAVAVWTTPESVEAGAVFAEIGPRMAELSGSRLAAQQQMEGLLAPHRPKEPAWFLATVGVSPDHQGKGLGSAVVLPGVEAAERAGVPAFLETSAPRNLPFYERLGFTVTADVEVPEGPRTWCMTRKPGA

SEQ ID NO: 15012 - protein, 828 aa, Artificial Sequence
  Synthetic Polypeptide
MALPVTALLLPLALLLHAARPACQVQLVESGGGLVQAGDSVTLSCTASGRTFSSYALAWFRQRPGKEREFVAGLRWGGPTNYADSVKDRFTISGDSAKHTMYLQMNSLKPEDTAVYYCGYNPGGWAVPSQYEYDSWGQGTQVTVSSLEGQPKANPTVTLFPPSSEELQANKATLVCLISDFYPGAVTVAWKADGSPVKAGVETTKPSKQSNNKYAASSYLSLTPEQWKSHRSYSCQVTHEGSTVEKTVAPTECSPIKTDVITMDPKDNCSKDANDTLLLQLTNTSAYYMYLLLLLKSVVYFAIITCCLLRRTAFCCNGEKSRAKRSGSGATNFSLLKQAGDVEENPGPTSMDWIWRILFLVGAATGAHSLFNQEVQIPLTESYCGPCPKNWICYKNNCYQFFDESKNWYESQASCMSQNASLLKVYSKEDQDLLKLVKSYHWMGLVHIPTNGSWQWEDGSILSPNLLTIIEMQKGDCALYASSFKGYIENCSTPNTYICMQRTVGGGGSGGGGSGGGGSDLFNQEVQIPLTESYCGPCPKNWICYKNNCYQFFDESKNWYESQASCMSQNASLLKVYSKEDQDLLKLVKSYHWMGLVHIPTNGSWQWEDGSILSPNLLTIIEMQKGDCALYASSFKGYIENCSTPNTYICMQRTVTRASTKGPSVFPLAPSSKSTSGGTAALGCLVKDYFPEPVTVSWNSGALTSGVHTFPAVLQSSGLYSLSSVVTVPSSSLGTQTYICNVNHKPSNTKVDKRVEPKSCEVKTDSTDHVKPKETENTKQPSKSCHKPKAIVHTEKVNMMSLTVLGLRMLFAKTVAVNFLLTAKLFFL

SEQ ID NO: 15013 - protein, 856 aa, Artificial Sequence
  Synthetic Polypeptide
MALPVTALLLPLALLLHAARPACQVQLVESGGGLVQAGDSVTLSCTASGRTFSSYALAWFRQRPGKEREFVAGLRWGGPTNYADSVKDRFTISGDSAKHTMYLQMNSLKPEDTAVYYCGYNPGGWAVPSQYEYDSWGQGTQVTVSSLEGSPIKTDVITMDPKDNCSKDANDTLLLQLTNTSAYYMYLLLLLKSVVYFAIITCCLLRRTAFCCNGEKSRAKRSGSGATNFSLLKQAGDVEENPGPTSMDWIWRILFLVGAATGAHSLFNQEVQIPLTESYCGPCPKNWICYKNNCYQFFDESKNWYESQASCMSQNASLLKVYSKEDQDLLKLVKSYHWMGLVHIPTNGSWQWEDGSILSPNLLTIIEMQKGDCALYASSFKGYIENCSTPNTYICMQRTVGGGGSGGGGSGGGGSDLFNQEVQIPLTESYCGPCPKNWICYKNNCYQFFDESKNWYESQASCMSQNASLLKVYSKEDQDLLKLVKSYHWMGLVHIPTNGSWQWEDGSILSPNLLTIIEMQKGDCALYASSFKGYIENCSTPNTYICMQRTVTRGSEVKTDSTDHVKPKETENTKQPSKSCHKPKAIVHTEKVNMMSLTVLGLRMLFAKTVAVNFLLTAKLFFLRAKRSGSGVKQTLNFDLLKLAGDVESNPGPSRGHMTEYKPTVRLATRDDVPRAVRTLAAAFADYPATRHTVDPDRHIERVTELQELFLTRVGLDIGKVWVADDGAAVAVWTTPESVEAGAVFAEIGPRMAELSGSRLAAQQQMEGLLAPHRPKEPAWFLATVGVSPDHQGKGLGSAVVLPGVEAAERAGVPAFLETSAPRNLPFYERLGFTVTADVEVPEGPRTWCMTRKPGA

SEQ ID NO: 15014 - protein, 623 aa, Artificial Sequence
  Synthetic Polypeptide
MALPVTALLLPLALLLHAARPACQVQLVESGGGLVQAGDSVTLSCTASGRTFSSYALAWFRQRPGKEREFVAGLRWGGPTNYADSVKDRFTISGDSAKHTMYLQMNSLKPEDTAVYYCGYNPGGWAVPSQYEYDSWGQGTQVTVSSLEGSPIKTDVITMDPKDNCSKDANDTLLLQLTNTSAYYMYLLLLLKSVVYFAIITCCLLRRTAFCCNGEKSRAKRSGSGATNFSLLKQAGDVEENPGPTSMDWIWRILFLVGAATGAHSLFNQEVQIPLTESYCGPCPKNWICYKNNCYQFFDESKNWYESQASCMSQNASLLKVYSKEDQDLLKLVKSYHWMGLVHIPTNGSWQWEDGSILSPNLLTIIEMQKGDCALYASSFKGYIENCSTPNTYICMQRTVGGGGSGGGGSGGGGSDLFNQEVQIPLTESYCGPCPKNWICYKNNCYQFFDESKNWYESQASCMSQNASLLKVYSKEDQDLLKLVKSYHWMGLVHIPTNGSWQWEDGSILSPNLLTIIEMQKGDCALYASSFKGYIENCSTPNTYICMQRTVTRGSEVKTDSTDHVKPKETENTKQPSKSCHKPKAIVHTEKVNMMSLTVLGLRMLFAKTVAVNFLLTAKLFFL

SEQ ID NO: 15015 - protein, 865 aa, Artificial Sequence
  Synthetic Polypeptide
MALPVTALLLPLALLLHAARPACQVQLVESGGGLVQAGDSVTLSCTASGRTFSSYALAWFRQRPGKEREFVAGLRWGGPTNYADSVKDRFTISGDSAKHTMYLQMNSLKPEDTAVYYCGYNPGGWAVPSQYEYDSWGQGTQVTVSSLEDKTHTCPPCPAPIKTDVITMDPKDNCSKDANDTLLLQLTNTSAYYMYLLLLLKSVVYFAIITCCLLRRTAFCCNGEKSRAKRSGSGATNFSLLKQAGDVEENPGPTSMDWIWRILFLVGAATGAHSLFNQEVQIPLTESYCGPCPKNWICYKNNCYQFFDESKNWYESQASCMSQNASLLKVYSKEDQDLLKLVKSYHWMGLVHIPTNGSWQWEDGSILSPNLLTIIEMQKGDCALYASSFKGYIENCSTPNTYICMQRTVGGGGSGGGGSGGGGSDLFNQEVQIPLTESYCGPCPKNWICYKNNCYQFFDESKNWYESQASCMSQNASLLKVYSKEDQDLLKLVKSYHWMGLVHIPTNGSWQWEDGSILSPNLLTIIEMQKGDCALYASSFKGYIENCSTPNTYICMQRTVTRGSEVKTDSTDHVKPKETENTKQPSKSCHKPKAIVHTEKVNMMSLTVLGLRMLFAKTVAVNFLLTAKLFFLRAKRSGSGVKQTLNFDLLKLAGDVESNPGPSRGHMTEYKPTVRLATRDDVPRAVRTLAAAFADYPATRHTVDPDRHIERVTELQELFLTRVGLDIGKVWVADDGAAVAVWTTPESVEAGAVFAEIGPRMAELSGSRLAAQQQMEGLLAPHRPKEPAWFLATVGVSPDHQGKGLGSAVVLPGVEAAERAGVPAFLETSAPRNLPFYERLGFTVTADVEVPEGPRTWCMTRKPGA

SEQ ID NO: 15016 - protein, 865 aa, Artificial Sequence
  Synthetic Polypeptide
MALPVTALLLPLALLLHAARPACQVQLVESGGGLVQAGDSVTLSCTASGRTFSSYALAWFRQRPGKEREFVAGLRWGGPTNYADSVKDRFTISGDSAKHTMYLQMNSLKPEDTAVYYCGYNPGGWAVPSQYEYDSWGQGTQVTVSSLEGSPIKTDVITMDPKDNCSKDANDTLLLQLTNTSAYYMYLLLLLKSVVYFAIITCCLLRRTAFCCNGEKSRAKRSGSGATNFSLLKQAGDVEENPGPTSMDWIWRILFLVGAATGAHSLFNQEVQIPLTESYCGPCPKNWICYKNNCYQFFDESKNWYESQASCMSQNASLLKVYSKEDQDLLKLVKSYHWMGLVHIPTNGSWQWEDGSILSPNLLTIIEMQKGDCALYASSFKGYIENCSTPNTYICMQRTVGGGGSGGGGSGGGGSDLFNQEVQIPLTESYCGPCPKNWICYKNNCYQFFDESKNWYESQASCMSQNASLLKVYSKEDQDLLKLVKSYHWMGLVHIPTNGSWQWEDGSILSPNLLTIIEMQKGDCALYASSFKGYIENCSTPNTYICMQRTVTRDKTHTCPPCPAEVKTDSTDHVKPKETENTKQPSKSCHKPKAIVHTEKVNMMSLTVLGLRMLFAKTVAVNFLLTAKLFFLRAKRSGSGVKQTLNFDLLKLAGDVESNPGPSRGHMTEYKPTVRLATRDDVPRAVRTLAAAFADYPATRHTVDPDRHIERVTELQELFLTRVGLDIGKVWVADDGAAVAVWTTPESVEAGAVFAEIGPRMAELSGSRLAAQQQMEGLLAPHRPKEPAWFLATVGVSPDHQGKGLGSAVVLPGVEAAERAGVPAFLETSAPRNLPFYERLGFTVTADVEVPEGPRTWCMTRKPGA

SEQ ID NO: 15017 - protein, 874 aa, Artificial Sequence
  Synthetic Polypeptide
MALPVTALLLPLALLLHAARPACQVQLVESGGGLVQAGDSVTLSCTASGRTFSSYALAWFRQRPGKEREFVAGLRWGGPTNYADSVKDRFTISGDSAKHTMYLQMNSLKPEDTAVYYCGYNPGGWAVPSQYEYDSWGQGTQVTVSSLEDKTHTCPPCPAPIKTDVITMDPKDNCSKDANDTLLLQLTNTSAYYMYLLLLLKSVVYFAIITCCLLRRTAFCCNGEKSRAKRSGSGATNFSLLKQAGDVEENPGPTSMDWIWRILFLVGAATGAHSLFNQEVQIPLTESYCGPCPKNWICYKNNCYQFFDESKNWYESQASCMSQNASLLKVYSKEDQDLLKLVKSYHWMGLVHIPTNGSWQWEDGSILSPNLLTIIEMQKGDCALYASSFKGYIENCSTPNTYICMQRTVGGGGSGGGGSGGGGSDLFNQEVQIPLTESYCGPCPKNWICYKNNCYQFFDESKNWYESQASCMSQNASLLKVYSKEDQDLLKLVKSYHWMGLVHIPTNGSWQWEDGSILSPNLLTIIEMQKGDCALYASSFKGYIENCSTPNTYICMQRTVTRDKTHTCPPCPAEVKTDSTDHVKPKETENTKQPSKSCHKPKAIVHTEKVNMMSLTVLGLRMLFAKTVAVNFLLTAKLFFLRAKRSGSGVKQTLNFDLLKLAGDVESNPGPSRGHMTEYKPTVRLATRDDVPRAVRTLAAAFADYPATRHTVDPDRHIERVTELQELFLTRVGLDIGKVWVADDGAAVAVWTTPESVEAGAVFAEIGPRMAELSGSRLAAQQQMEGLLAPHRPKEPAWFLATVGVSPDHQGKGLGSAVVLPGVEAAERAGVPAFLETSAPRNLPFYERLGFTVTADVEVPEGPRTWCMTRKPGA

SEQ ID NO: 15018 - protein, 641 aa, Artificial Sequence
  Synthetic Polypeptide
MALPVTALLLPLALLLHAARPACQVQLVESGGGLVQAGDSVTLSCTASGRTFSSYALAWFRQRPGKEREFVAGLRWGGPTNYADSVKDRFTISGDSAKHTMYLQMNSLKPEDTAVYYCGYNPGGWAVPSQYEYDSWGQGTQVTVSSLEDKTHTCPPCPAPIKTDVITMDPKDNCSKDANDTLLLQLTNTSAYYMYLLLLLKSVVYFAIITCCLLRRTAFCCNGEKSRAKRSGSGATNFSLLKQAGDVEENPGPTSMDWIWRILFLVGAATGAHSLFNQEVQIPLTESYCGPCPKNWICYKNNCYQFFDESKNWYESQASCMSQNASLLKVYSKEDQDLLKLVKSYHWMGLVHIPTNGSWQWEDGSILSPNLLTIIEMQKGDCALYASSFKGYIENCSTPNTYICMQRTVGGGGSGGGGSGGGGSDLFNQEVQIPLTESYCGPCPKNWICYKNNCYQFFDESKNWYESQASCMSQNASLLKVYSKEDQDLLKLVKSYHWMGLVHIPTNGSWQWEDGSILSPNLLTIIEMQKGDCALYASSFKGYIENCSTPNTYICMQRTVTRDKTHTCPPCPAEVKTDSTDHVKPKETENTKQPSKSCHKPKAIVHTEKVNMMSLTVLGLRMLFAKTVAVNFLLTAKLFFL

SEQ ID NO: 15019 - protein, 632 aa, Artificial Sequence
  Synthetic Polypeptide
MALPVTALLLPLALLLHAARPACQVQLVESGGGLVQAGDSVTLSCTASGRTFSSYALAWFRQRPGKEREFVAGLRWGGPTNYADSVKDRFTISGDSAKHTMYLQMNSLKPEDTAVYYCGYNPGGWAVPSQYEYDSWGQGTQVTVSSLEGSPIKTDVITMDPKDNCSKDANDTLLLQLTNTSAYYMYLLLLLKSVVYFAIITCCLLRRTAFCCNGEKSRAKRSGSGATNFSLLKQAGDVEENPGPTSMDWIWRILFLVGAATGAHSLFNQEVQIPLTESYCGPCPKNWICYKNNCYQFFDESKNWYESQASCMSQNASLLKVYSKEDQDLLKLVKSYHWMGLVHIPTNGSWQWEDGSILSPNLLTIIEMQKGDCALYASSFKGYIENCSTPNTYICMQRTVGGGGSGGGGSGGGGSDLFNQEVQIPLTESYCGPCPKNWICYKNNCYQFFDESKNWYESQASCMSQNASLLKVYSKEDQDLLKLVKSYHWMGLVHIPTNGSWQWEDGSILSPNLLTIIEMQKGDCALYASSFKGYIENCSTPNTYICMQRTVTRDKTHTCPPCPAEVKTDSTDHVKPKETENTKQPSKSCHKPKAIVHTEKVNMMSLTVLGLRMLFAKTVAVNFLLTAKLFFL

SEQ ID NO: 15020 - protein, 848 aa, Artificial Sequence
  Synthetic Polypeptide
MALPVTALLLPLALLLHAARPACQVQLVESGGGLVQAGDSVTLSCTASGRTFSSYALAWFRQRPGKEREFVAGLRWGGPTNYADSVKDRFTISGDSAKHTMYLQMNSLKPEDTAVYYCGYNPGGWAVPSQYEYDSWGQGTQVTVSSLEGSMDPKDNCSKDANDTLLLQLTNTSAYYMYLLLLLKSVVYFAIITCCLLRRTAFCCNGEKSRAKRSGSGATNFSLLKQAGDVEENPGPTSMDWIWRILFLVGAATGAHSLFNQEVQIPLTESYCGPCPKNWICYKNNCYQFFDESKNWYESQASCMSQNASLLKVYSKEDQDLLKLVKSYHWMGLVHIPTNGSWQWEDGSILSPNLLTIIEMQKGDCALYASSFKGYIENCSTPNTYICMQRTVGGGGSGGGGSGGGGSDLFNQEVQIPLTESYCGPCPKNWICYKNNCYQFFDESKNWYESQASCMSQNASLLKVYSKEDQDLLKLVKSYHWMGLVHIPTNGSWQWEDGSILSPNLLTIIEMQKGDCALYASSFKGYIENCSTPNTYICMQRTVTRGSEVKTDSTDHVKPKETENTKQPSKSCHKPKAIVHTEKVNMMSLTVLGLRMLFAKTVAVNFLLTAKLFFLRAKRSGSGVKQTLNFDLLKLAGDVESNPGPSRGHMTEYKPTVRLATRDDVPRAVRTLAAAFADYPATRHTVDPDRHIERVTELQELFLTRVGLDIGKVWVADDGAAVAVWTTPESVEAGAVFAEIGPRMAELSGSRLAAQQQMEGLLAPHRPKEPAWFLATVGVSPDHQGKGLGSAVVLPGVEAAERAGVPAFLETSAPRNLPFYERLGFTVTADVEVPEGPRTWCMTRKPGA

SEQ ID NO: 15021 - protein, 849 aa, Artificial Sequence
  Synthetic Polypeptide
MALPVTALLLPLALLLHAARPACQVQLVESGGGLVQAGDSVTLSCTASGRTFSSYALAWFRQRPGKEREFVAGLRWGGPTNYADSVKDRFTISGDSAKHTMYLQMNSLKPEDTAVYYCGYNPGGWAVPSQYEYDSWGQGTQVTVSSLEGSPIKTDVITMDPKDNCSKDANDTLLLQLTNTSAYYMYLLLLLKSVVYFAIITCCLLRRTAFCCNGEKSRAKRSGSGATNFSLLKQAGDVEENPGPTSMDWIWRILFLVGAATGAHSLFNQEVQIPLTESYCGPCPKNWICYKNNCYQFFDESKNWYESQASCMSQNASLLKVYSKEDQDLLKLVKSYHWMGLVHIPTNGSWQWEDGSILSPNLLTIIEMQKGDCALYASSFKGYIENCSTPNTYICMQRTVGGGGSGGGGSGGGGSDLFNQEVQIPLTESYCGPCPKNWICYKNNCYQFFDESKNWYESQASCMSQNASLLKVYSKEDQDLLKLVKSYHWMGLVHIPTNGSWQWEDGSILSPNLLTIIEMQKGDCALYASSFKGYIENCSTPNTYICMQRTVTRGSDHVKPKETENTKQPSKSCHKPKAIVHTEKVNMMSLTVLGLRMLFAKTVAVNFLLTAKLFFLRAKRSGSGVKQTLNFDLLKLAGDVESNPGPSRGHMTEYKPTVRLATRDDVPRAVRTLAAAFADYPATRHTVDPDRHIERVTELQELFLTRVGLDIGKVWVADDGAAVAVWTTPESVEAGAVFAEIGPRMAELSGSRLAAQQQMEGLLAPHRPKEPAWFLATVGVSPDHQGKGLGSAVVLPGVEAAERAGVPAFLETSAPRNLPFYERLGFTVTADVEVPEGPRTWCMTRKPGA

SEQ ID NO: 15022 - protein, 841 aa, Artificial Sequence
  Synthetic Polypeptide
MALPVTALLLPLALLLHAARPACQVQLVESGGGLVQAGDSVTLSCTASGRTFSSYALAWFRQRPGKEREFVAGLRWGGPTNYADSVKDRFTISGDSAKHTMYLQMNSLKPEDTAVYYCGYNPGGWAVPSQYEYDSWGQGTQVTVSSLEGSMDPKDNCSKDANDTLLLQLTNTSAYYMYLLLLLKSVVYFAIITCCLLRRTAFCCNGEKSRAKRSGSGATNFSLLKQAGDVEENPGPTSMDWIWRILFLVGAATGAHSLFNQEVQIPLTESYCGPCPKNWICYKNNCYQFFDESKNWYESQASCMSQNASLLKVYSKEDQDLLKLVKSYHWMGLVHIPTNGSWQWEDGSILSPNLLTIIEMQKGDCALYASSFKGYIENCSTPNTYICMQRTVGGGGSGGGGSGGGGSDLFNQEVQIPLTESYCGPCPKNWICYKNNCYQFFDESKNWYESQASCMSQNASLLKVYSKEDQDLLKLVKSYHWMGLVHIPTNGSWQWEDGSILSPNLLTIIEMQKGDCALYASSFKGYIENCSTPNTYICMQRTVTRGSDHVKPKETENTKQPSKSCHKPKAIVHTEKVNMMSLTVLGLRMLFAKTVAVNFLLTAKLFFLRAKRSGSGVKQTLNFDLLKLAGDVESNPGPSRGHMTEYKPTVRLATRDDVPRAVRTLAAAFADYPATRHTVDPDRHIERVTELQELFLTRVGLDIGKVWVADDGAAVAVWTTPESVEAGAVFAEIGPRMAELSGSRLAAQQQMEGLLAPHRPKEPAWFLATVGVSPDHQGKGLGSAVVLPGVEAAERAGVPAFLETSAPRNLPFYERLGFTVTADVEVPEGPRTWCMTRKPGA

SEQ ID NO: 15023 - protein, 608 aa, Artificial Sequence
  Synthetic Polypeptide
MALPVTALLLPLALLLHAARPACQVQLVESGGGLVQAGDSVTLSCTASGRTFSSYALAWFRQRPGKEREFVAGLRWGGPTNYADSVKDRFTISGDSAKHTMYLQMNSLKPEDTAVYYCGYNPGGWAVPSQYEYDSWGQGTQVTVSSLEGSMDPKDNCSKDANDTLLLQLTNTSAYYMYLLLLLKSVVYFAIITCCLLRRTAFCCNGEKSRAKRSGSGATNFSLLKQAGDVEENPGPTSMDWIWRILFLVGAATGAHSLFNQEVQIPLTESYCGPCPKNWICYKNNCYQFFDESKNWYESQASCMSQNASLLKVYSKEDQDLLKLVKSYHWMGLVHIPTNGSWQWEDGSILSPNLLTIIEMQKGDCALYASSFKGYIENCSTPNTYICMQRTVGGGGSGGGGSGGGGSDLFNQEVQIPLTESYCGPCPKNWICYKNNCYQFFDESKNWYESQASCMSQNASLLKVYSKEDQDLLKLVKSYHWMGLVHIPTNGSWQWEDGSILSPNLLTIIEMQKGDCALYASSFKGYIENCSTPNTYICMQRTVTRGSDHVKPKETENTKQPSKSCHKPKAIVHTEKVNMMSLTVLGLRMLFAKTVAVNFLLTAKLFFL

SEQ ID NO: 15024 - protein, 850 aa, Artificial Sequence
  Synthetic Polypeptide
MALPVTALLLPLALLLHAARPACQVQLVESGGGLVQAGDSVTLSCTASGRTFSSYALAWFRQRPGKEREFVAGLRWGGPTNYADSVKDRFTISGDSAKHTMYLQMNSLKPEDTAVYYCGYNPGGWAVPSQYEYDSWGQGTQVTVSSLEDKTHTCPPCPAMDPKDNCSKDANDTLLLQLTNTSAYYMYLLLLLKSVVYFAIITCCLLRRTAFCCNGEKSRAKRSGSGATNFSLLKQAGDVEENPGPTSMDWIWRILFLVGAATGAHSLFNQEVQIPLTESYCGPCPKNWICYKNNCYQFFDESKNWYESQASCMSQNASLLKVYSKEDQDLLKLVKSYHWMGLVHIPTNGSWQWEDGSILSPNLLTIIEMQKGDCALYASSFKGYIENCSTPNTYICMQRTVGGGGSGGGGSGGGGSDLFNQEVQIPLTESYCGPCPKNWICYKNNCYQFFDESKNWYESQASCMSQNASLLKVYSKEDQDLLKLVKSYHWMGLVHIPTNGSWQWEDGSILSPNLLTIIEMQKGDCALYASSFKGYIENCSTPNTYICMQRTVTRGSDHVKPKETENTKQPSKSCHKPKAIVHTEKVNMMSLTVLGLRMLFAKTVAVNFLLTAKLFFLRAKRSGSGVKQTLNFDLLKLAGDVESNPGPSRGHMTEYKPTVRLATRDDVPRAVRTLAAAFADYPATRHTVDPDRHIERVTELQELFLTRVGLDIGKVWVADDGAAVAVWTTPESVEAGAVFAEIGPRMAELSGSRLAAQQQMEGLLAPHRPKEPAWFLATVGVSPDHQGKGLGSAVVLPGVEAAERAGVPAFLETSAPRNLPFYERLGFTVTADVEVPEGPRTWCMTRKPGA

SEQ ID NO: 15025 - protein, 859 aa, Artificial Sequence
  Synthetic Polypeptide
MALPVTALLLPLALLLHAARPACQVQLVESGGGLVQAGDSVTLSCTASGRTFSSYALAWFRQRPGKEREFVAGLRWGGPTNYADSVKDRFTISGDSAKHTMYLQMNSLKPEDTAVYYCGYNPGGWAVPSQYEYDSWGQGTQVTVSSLEDKTHTCPPCPAMDPKDNCSKDANDTLLLQLTNTSAYYMYLLLLLKSVVYFAIITCCLLRRTAFCCNGEKSRAKRSGSGATNFSLLKQAGDVEENPGPTSMDWIWRILFLVGAATGAHSLFNQEVQIPLTESYCGPCPKNWICYKNNCYQFFDESKNWYESQASCMSQNASLLKVYSKEDQDLLKLVKSYHWMGLVHIPTNGSWQWEDGSILSPNLLTIIEMQKGDCALYASSFKGYIENCSTPNTYICMQRTVGGGGSGGGGSGGGGSDLFNQEVQIPLTESYCGPCPKNWICYKNNCYQFFDESKNWYESQASCMSQNASLLKVYSKEDQDLLKLVKSYHWMGLVHIPTNGSWQWEDGSILSPNLLTIIEMQKGDCALYASSFKGYIENCSTPNTYICMQRTVTRDKTHTCPPCPADHVKPKETENTKQPSKSCHKPKAIVHTEKVNMMSLTVLGLRMLFAKTVAVNFLLTAKLFFLRAKRSGSGVKQTLNFDLLKLAGDVESNPGPSRGHMTEYKPTVRLATRDDVPRAVRTLAAAFADYPATRHTVDPDRHIERVTELQELFLTRVGLDIGKVWVADDGAAVAVWTTPESVEAGAVFAEIGPRMAELSGSRLAAQQQMEGLLAPHRPKEPAWFLATVGVSPDHQGKGLGSAVVLPGVEAAERAGVPAFLETSAPRNLPFYERLGFTVTADVEVPEGPRTWCMTRKPGA

SEQ ID NO: 15026 - protein, 626 aa, Artificial Sequence
  Synthetic Polypeptide
MALPVTALLLPLALLLHAARPACQVQLVESGGGLVQAGDSVTLSCTASGRTFSSYALAWFRQRPGKEREFVAGLRWGGPTNYADSVKDRFTISGDSAKHTMYLQMNSLKPEDTAVYYCGYNPGGWAVPSQYEYDSWGQGTQVTVSSLEDKTHTCPPCPAMDPKDNCSKDANDTLLLQLTNTSAYYMYLLLLLKSVVYFAIITCCLLRRTAFCCNGEKSRAKRSGSGATNFSLLKQAGDVEENPGPTSMDWIWRILFLVGAATGAHSLFNQEVQIPLTESYCGPCPKNWICYKNNCYQFFDESKNWYESQASCMSQNASLLKVYSKEDQDLLKLVKSYHWMGLVHIPTNGSWQWEDGSILSPNLLTIIEMQKGDCALYASSFKGYIENCSTPNTYICMQRTVGGGGSGGGGSGGGGSDLFNQEVQIPLTESYCGPCPKNWICYKNNCYQFFDESKNWYESQASCMSQNASLLKVYSKEDQDLLKLVKSYHWMGLVHIPTNGSWQWEDGSILSPNLLTIIEMQKGDCALYASSFKGYIENCSTPNTYICMQRTVTRDKTHTCPPCPADHVKPKETENTKQPSKSCHKPKAIVHTEKVNMMSLTVLGLRMLFAKTVAVNFLLTAKLFFL

SEQ ID NO: 15027 - protein, 307 aa, Artificial Sequence
  Synthetic Polypeptide
MALPVTALLLPLALLLHAARPACQVQLVESGGGLVQAGDSVTLSCTASGRTFSSYALAWFRQRPGKEREFVAGLRWGGPTNYADSVKDRFTISGDSAKHTMYLQMNSLKPEDTAVYYCGYNPGGWAVPSQYEYDSWGQGTQVTVSSLEGQPKANPTVTLFPPSSEELQANKATLVCLISDFYPGAVTVAWKADGSPVKAGVETTKPSKQSNNKYAASSYLSLTPEQWKSHRSYSCQVTHEGSTVEKTVAPTECSGRADCGFTSESYQQGVLSATILYEILLGKATLYAVLVSALVLMAMVKRKDSRG

SEQ ID NO: 15028 - protein, 470 aa, Artificial Sequence
  Synthetic Polypeptide
MDWIWRILFLVGAATGAHSLFNQEVQIPLTESYCGPCPKNWICYKNNCYQFFDESKNWYESQASCMSQNASLLKVYSKEDQDLLKLVKSYHWMGLVHIPTNGSWQWEDGSILSPNLLTIIEMQKGDCALYASSFKGYIENCSTPNTYICMQRTVGGGGSGGGGSGGGGSDLFNQEVQIPLTESYCGPCPKNWICYKNNCYQFFDESKNWYESQASCMSQNASLLKVYSKEDQDLLKLVKSYHWMGLVHIPTNGSWQWEDGSILSPNLLTIIEMQKGDCALYASSFKGYIENCSTPNTYICMQRTVTRASTKGPSVFPLAPSSKSTSGGTAALGCLVKDYFPEPVTVSWNSGALTSGVHTFPAVLQSSGLYSLSSVVTVPSSSLGTQTYICNVNHKPSNTKVDKRVEPKSCIPEDTFFPSPESSCDVKLVEKSFETDTNLNFQNLSVIGFRILLLKVAGFNLLMTLRLWSS

SEQ ID NO: 15029 - protein, 321 aa, Artificial Sequence
  Synthetic Polypeptide
MALPVTALLLPLALLLHAARPACQVQLVESGGGLVQAGDSVTLSCTASGRTFSSYALAWFRQRPGKEREFVAGLRWGGPTNYADSVKDRFTISGDSAKHTMYLQMNSLKPEDTAVYYCGYNPGGWAVPSQYEYDSWGQGTQVTVSSLEGQPKANPTVTLFPPSSEELQANKATLVCLISDFYPGAVTVAWKADGSPVKAGVETTKPSKQSNNKYAASSYLSLTPEQWKSHRSYSCQVTHEGSTVEKTVAPTECSPIKTDVITMDPKDNCSKDANDTLLLQLTNTSAYYMYLLLLLKSVVYFAIITCCLLRRTAFCCNGEKS

SEQ ID NO: 15030 - protein, 478 aa, Artificial Sequence
  Synthetic Polypeptide
MDWIWRILFLVGAATGAHSLFNQEVQIPLTESYCGPCPKNWICYKNNCYQFFDESKNWYESQASCMSQNASLLKVYSKEDQDLLKLVKSYHWMGLVHIPTNGSWQWEDGSILSPNLLTIIEMQKGDCALYASSFKGYIENCSTPNTYICMQRTVGGGGSGGGGSGGGGSDLFNQEVQIPLTESYCGPCPKNWICYKNNCYQFFDESKNWYESQASCMSQNASLLKVYSKEDQDLLKLVKSYHWMGLVHIPTNGSWQWEDGSILSPNLLTIIEMQKGDCALYASSFKGYIENCSTPNTYICMQRTVTRASTKGPSVFPLAPSSKSTSGGTAALGCLVKDYFPEPVTVSWNSGALTSGVHTFPAVLQSSGLYSLSSVVTVPSSSLGTQTYICNVNHKPSNTKVDKRVEPKSCEVKTDSTDHVKPKETENTKQPSKSCHKPKAIVHTEKVNMMSLTVLGLRMLFAKTVAVNFLLTAKLFFL

SEQ ID NO: 15031 - protein, 573 aa, Artificial Sequence
  Synthetic Polypeptide
MDWIWRILFLVGAATGAHSGPMDPDLEIRAAFLRQRNTALRTEVAELEQEVQRLENEVSQYETRYGPLGGGKGSGGGGSGGGGSGGGGSFEQVQLQQPGAELVKPGASVKMSCKASGYAFSSYWINWMKQKPGQGLEWIGQIYPGDGDTNYNGKFKGRATLTADTSSSTAYMQLSSLTSEDSAVYFCARSITTVVGCAMDYWGQGTSVTVSSGGGGSGGGGSGGGGSDIQMTQSPSSLSASVGDRVTITCKASDHINNWLAWYQQKPGQAPKLLIYGATTLETGVPSRFSGSGSGTDYTLTISSLQPEDFATYYCQQSWNTPWTFGQGTKLEIKRTREQKLISEEDLAKPTTTPAPRPPTPAPTIASQPLSLRPEACRPAAGGAVHTRGLDFACDIYIWAPLAGTCGVLLLSLVITLYCKRGRKKLLYIFKQPFMRPVQTTQEEDGCSCRFPEEEEGGCELRVKFSRSADAPAYQQGQNQLYNELNLGRREEYDVLDKRRGRDPEMGGKPRRKNPQEGLYNELQKDKMAEAYSEIGMKGERRRGKGHDGLYQGLSTATKDTYDALHMQALPPR

SEQ ID NO: 15032 - protein, 926 aa, Artificial Sequence
  Synthetic Polypeptide
MALPVTALLLPLALLLHAARPDIQMTQSPSSLSASVGDRVTITCKASDHINNWLAWYQQKPGQAPKLLIYGATTLETGVPSRFSGSGSGTDYTLTISSLQPEDFATYYCQQSWNTPWTFGQGTKLEIKRLEIQNPDPAVYQLRDSKSSDKSVCLFTDFDSQTNVSQSKDSDVYITDKCVLDMRSMDFKSNSAVAWSNKSDFACANAFNNSIIPEDTFFPSSDVPCDVKLVEKSFETDTNLNFQNLSVIGFRILLLKVAGFNLLMTLRLWSSRAKRSGSGVKQTLNFDLLKLAGDVESNPGPTSMDWIWRILFLVGAATGAHSGPMDPDLEIRAAFLRQRNTALRTEVAELEQEVQRLENEVSQYETRYGPLGGGKGSGGGGSGGGGSGGGGSFEQVQLQQPGAELVKPGASVKMSCKASGYAFSSYWINWMKQKPGQGLEWIGQIYPGDGDTNYNGKFKGRATLTADTSSSTAYMQLSSLTSEDSAVYFCARSITTVVGCAMDYWGQGTSVTVSSTREDLKNVFPPEVAVFEPSKAEIAHTQKATLVCLATGFYPDHVELSWWVNGKEVHSGVCTDPQPLKEQPALNDSRYCLSSRLRVSATFWQNPRNHFRCQVQFYGLSENDEWTQDRAKPVTQIVSAEAWGRADCGITSASYHQGVLSATILYEILLGKATLYAVLVSALVLMAMVKRKDSRGRAKRSGSGATNFSLLKQAGDVEENPGPSRGHMTEYKPTVRLATRDDVPRAVRTLAAAFADYPATRHTVDPDRHIERVTELQELFLTRVGLDIGKVWVADDGAAVAVWTTPESVEAGAVFAEIGPRMAELSGSRLAAQQQMEGLLAPHRPKEPAWFLATVGVSPDHQGKGLGSAVVLPGVEAAERAGVPAFLETSAPRNLPFYERLGFTVTADVEVPEGPRTWCMTRKPGA

SEQ ID NO: 15033 - protein, 925 aa, Artificial Sequence
  Synthetic Polypeptide
MALPVTALLLPLALLLHAARPDIQMTQSPSSLSASVGDRVTITCKASDHINNWLAWYQQKPGQAPKLLIYGATTLETGVPSRFSGSGSGTDYTLTISSLQPEDFATYYCQQSWNTPWTFGQGTKLEIKRLEDLKNVFPPEVAVFEPSKAEIAHTQKATLVCLATGFYPDHVELSWWVNGKEVHSGVCTDPQPLKEQPALNDSRYCLSSRLRVSATFWQNPRNHFRCQVQFYGLSENDEWTQDRAKPVTQIVSAEAWGRADCGITSASYHQGVLSATILYEILLGKATLYAVLVSALVLMAMVKRKDSRGRAKRSGSGATNFSLLKQAGDVEENPGPTSMDWIWRILFLVGAATGAHSGPMDPDLEIRAAFLRQRNTALRTEVAELEQEVQRLENEVSQYETRYGPLGGGKGSGGGGSGGGGSGGGGSFEQVQLQQPGAELVKPGASVKMSCKASGYAFSSYWINWMKQKPGQGLEWIGQIYPGDGDTNYNGKFKGRATLTADTSSSTAYMQLSSLTSEDSAVYFCARSITTVVGCAMDYWGQGTSVTVSSTRIQNPDPAVYQLRDSKSSDKSVCLFTDFDSQTNVSQSKDSDVYITDKCVLDMRSMDFKSNSAVAWSNKSDFACANAFNNSIIPEDTFFPSSDVPCDVKLVEKSFETDTNLNFQNLSVIGFRILLLKVAGFNLLMTLRLWSSRAKRSGSGVKQTLNFDLLKLAGDVESNPGPSRGHMTEYKPTVRLATRDDVPRAVRTLAAAFADYPATRHTVDPDRHIERVTELQELFLTRVGLDIGKVWVADDGAAVAVWTTPESVEAGAVFAEIGPRMAELSGSRLAAQQQMEGLLAPHRPKEPAWFLATVGVSPDHQGKGLGSAVVLPGVEAAERAGVPAFLETSAPRNLPFYERLGFTVTADVEVPEGPRTWCMTRKPGA

SEQ ID NO: 15034 - protein, 925 aa, Artificial Sequence
  Synthetic Polypeptide
MALPVTALLLPLALLLHAARPDIQMTQSPSSLSASVGDRVTITCKASDHINNWLAWYQQKPGQAPKLLIYGATTLETGVPSRFSGSGSGTDYTLTISSLQPEDFATYYCQQSWNTPWTFGQGTKLEIKRLEDLKNVFPPEVAVFEPSEAEISHTQKATLVCLATGFYPDHVELSWWVNGKEVHSGVCTDPQPLKEQPALNDSRYCLSSRLRVSATFWQNPRNHFRCQVQFYGLSENDEWTQDRAKPVTQIVSAEAWGRADCGFTSESYQQGVLSATILYEILLGKATLYAVLVSALVLMAMVKRKDSRGRAKRSGSGATNFSLLKQAGDVEENPGPTSMDWIWRILFLVGAATGAHSGPMDPDLEIRAAFLRQRNTALRTEVAELEQEVQRLENEVSQYETRYGPLGGGKGSGGGGSGGGGSGGGGSFEQVQLQQPGAELVKPGASVKMSCKASGYAFSSYWINWMKQKPGQGLEWIGQIYPGDGDTNYNGKFKGRATLTADTSSSTAYMQLSSLTSEDSAVYFCARSITTVVGCAMDYWGQGTSVTVSSTRIQNPDPAVYQLRDSKSSDKSVCLFTDFDSQTNVSQSKDSDVYITDKCVLDMRSMDFKSNSAVAWSNKSDFACANAFNNSIIPEDTFFPSPESSCDVKLVEKSFETDTNLNFQNLSVIGFRILLLKVAGFNLLMTLRLWSSRAKRSGSGVKQTLNFDLLKLAGDVESNPGPSRGHMTEYKPTVRLATRDDVPRAVRTLAAAFADYPATRHTVDPDRHIERVTELQELFLTRVGLDIGKVWVADDGAAVAVWTTPESVEAGAVFAEIGPRMAELSGSRLAAQQQMEGLLAPHRPKEPAWFLATVGVSPDHQGKGLGSAVVLPGVEAAERAGVPAFLETSAPRNLPFYERLGFTVTADVEVPEGPRTWCMTRKPGA

SEQ ID NO: 15035 - protein, 692 aa, Artificial Sequence
  Synthetic Polypeptide
MALPVTALLLPLALLLHAARPDIQMTQSPSSLSASVGDRVTITCKASDHINNWLAWYQQKPGQAPKLLIYGATTLETGVPSRFSGSGSGTDYTLTISSLQPEDFATYYCQQSWNTPWTFGQGTKLEIKRLEDLKNVFPPEVAVFEPSEAEISHTQKATLVCLATGFYPDHVELSWWVNGKEVHSGVCTDPQPLKEQPALNDSRYCLSSRLRVSATFWQNPRNHFRCQVQFYGLSENDEWTQDRAKPVTQIVSAEAWGRADCGFTSESYQQGVLSATILYEILLGKATLYAVLVSALVLMAMVKRKDSRGRAKRSGSGATNFSLLKQAGDVEENPGPTSMDWIWRILFLVGAATGAHSGPMDPDLEIRAAFLRQRNTALRTEVAELEQEVQRLENEVSQYETRYGPLGGGKGSGGGGSGGGGSGGGGSFEQVQLQQPGAELVKPGASVKMSCKASGYAFSSYWINWMKQKPGQGLEWIGQIYPGDGDTNYNGKFKGRATLTADTSSSTAYMQLSSLTSEDSAVYFCARSITTVVGCAMDYWGQGTSVTVSSTRIQNPDPAVYQLRDSKSSDKSVCLFTDFDSQTNVSQSKDSDVYITDKCVLDMRSMDFKSNSAVAWSNKSDFACANAFNNSIIPEDTFFPSPESSCDVKLVEKSFETDTNLNFQNLSVIGFRILLLKVAGFNLLMTLRLWSS

SEQ ID NO: 15036 - protein, 917 aa, Artificial Sequence
  Synthetic Polypeptide
MALPVTALLLPLALLLHAARPDIQMTQSPSSLSASVGDRVTITCKASDHINNWLAWYQQKPGQAPKLLIYGATTLETGVPSRFSGSGSGTDYTLTISSLQPEDFATYYCQQSWNTPWTFGQGTKLEIKRLEDLKNVFPPEVAVFEPSEAEISHTQKATLVCLATGFYPDHVELSWWVNGKEVHSGVCTDPQPLKEQPALNDSRYCLSSRLRVSATFWQNPRNHFRCQVQFYGLSENDEWTQDRAKPVTQIVSAEAWGRADCGFTSESYQQGVLSATILYEILLGKATLYAVLVSALVLMAMVKRKDSRGRAKRSGSGATNFSLLKQAGDVEENPGPTSMDWIWRILFLVGAATGAHSGPMDPDLEIRAAFLRQRNTALRTEVAELEQEVQRLENEVSQYETRYGPLGGGKGSGGGGSGGGGSGGGGSFEQVQLQQPGAELVKPGASVKMSCKASGYAFSSYWINWMKQKPGQGLEWIGQIYPGDGDTNYNGKFKGRATLTADTSSSTAYMQLSSLTSEDSAVYFCARSITTVVGCAMDYWGQGTSVTVSSTRIQNPDPAVYQLRDSKSSDKSVCLFTDFDSQTNVSQSKDSDVYITDKCVLDMRSMDFKSNSAVAWSNKSDFACANAFNNSIIPEDTFFPSPESSCDVKLVEKSFETDTNLNFQNLSVIGFRILLLKVAGFNLLMTLRLWSSRAKRSGSGVKQTLNFDLLKLAGDVESNPGPSRGGIHTMATYEVLCEVARKLGTDDREVVLFLLNVFIPQPTLAQLIGALRALKEEGRLTFPLLAECLFRAGRRDLLRDLLHLDPRFLERHLAGTMSYFSPYQLTVLHVDGELCARDIRSLIFLSKDTIGSRSTPQTFLHWVYCMENLDLLGPTDVDALMSMLRSLSRVDLQRQVQTLMGLHLSGPSHSQHYRHTP

SEQ ID NO: 15037 - protein, 696 aa, Artificial Sequence
  Synthetic Polypeptide
MALPVTALLLPLALLLHAARPDIQMTQSPSSLSASVGDRVTITCKASDHINNWLAWYQQKPGQAPKLLIYGATTLETGVPSRFSGSGSGTDYTLTISSLQPEDFATYYCQQSWNTPWTFGQGTKLEIKRLEIQNPDPAVYQLRDSKSSDKSVCLFTDFDSQTNVSQSKDSDVYITDKCVLDMRSMDFKSNSAVAWSNKSDFACANAFNNSIIPEDTFFPSPESSCDVKLVEKSFETDTNLNFQNLSVIGFRILLLKVAGFNLLMTLRLWSSRAKRSGSGVKQTLNFDLLKLAGDVESNPGPTSMDWIWRILFLVGAATGAHSGPMDPDLEIRAAFLRQRNTALRTEVAELEQEVQRLENEVSQYETRYGPLGGGKGSGGGGSGGGGSGGGGSFEQVQLQQPGAELVKPGASVKMSCKASGYAFSSYWINWMKQKPGQGLEWIGQIYPGDGDTNYNGKFKGRATLTADTSSSTAYMQLSSLTSEDSAVYFCARSITTVVGCAMDYWGQGTSVTVSSTREDLKNVFPPEVAVFEPSEAEISHTQKATLVCLATGFYPDHVELSWWVNGKEVHSGVCTDPQPLKEQPALNDSRYCLSSRLRVSATFWQNPRNHFRCQVQFYGLSENDEWTQDRAKPVTQIVSAEAWGRADCGFTSESYQQGVLSATILYEILLGKATLYAVLVSALVLMAMVKRKDSRG

SEQ ID NO: 15038 - protein, 918 aa, Artificial Sequence
  Synthetic Polypeptide
MALPVTALLLPLALLLHAARPDIQMTQSPSSLSASVGDRVTITCKASDHINNWLAWYQQKPGQAPKLLIYGATTLETGVPSRFSGSGSGTDYTLTISSLQPEDFATYYCQQSWNTPWTFGQGTKLEIKRLEIQNPDPAVYQLRDSKSSDKSVCLFTDFDSQTNVSQSKDSDVYITDKCVLDMRSMDFKSNSAVAWSNKSDFACANAFNNSIIPEDTFFPSPESSCDVKLVEKSFETDTNLNFQNLSVIGFRILLLKVAGFNLLMTLRLWSSRAKRSGSGVKQTLNFDLLKLAGDVESNPGPTSMDWIWRILFLVGAATGAHSGPMDPDLEIRAAFLRQRNTALRTEVAELEQEVQRLENEVSQYETRYGPLGGGKGSGGGGSGGGGSGGGGSFEQVQLQQPGAELVKPGASVKMSCKASGYAFSSYWINWMKQKPGQGLEWIGQIYPGDGDTNYNGKFKGRATLTADTSSSTAYMQLSSLTSEDSAVYFCARSITTVVGCAMDYWGQGTSVTVSSTREDLKNVFPPEVAVFEPSEAEISHTQKATLVCLATGFYPDHVELSWWVNGKEVHSGVCTDPQPLKEQPALNDSRYCLSSRLRVSATFWQNPRNHFRCQVQFYGLSENDEWTQDRAKPVTQIVSAEAWGRADCGFTSESYQQGVLSATILYEILLGKATLYAVLVSALVLMAMVKRKDSRGRAKRSGSGATNFSLLKQAGDVEENPGPSRGGIHTMATYEVLCEVARKLGTDDREVVLFLLNVFIPQPTLAQLIGALRALKEEGRLTFPLLAECLFRAGRRDLLRDLLHLDPRFLERHLAGTMSYFSPYQLTVLHVDGELCARDIRSLIFLSKDTIGSRSTPQTFLHWVYCMENLDLLGPTDVDALMSMLRSLSRVDLQRQVQTLMGLHLSGPSHSQHYRHTP

SEQ ID NO: 15039 - protein, 925 aa, Artificial Sequence
  Synthetic Polypeptide
MALPVTALLLPLALLLHAARPDIQMTQSPSSLSASVGDRVTITCKASDHINNWLAWYQQKPGQAPKLLIYGATTLETGVPSRFSGSGSGTDYTLTISSLQPEDFATYYCQQSWNTPWTFGQGTKLEIKRLEDLKNVFPPEVAVFEPSEAEISHTQKATLVCLATGFYPDHVELSWWVNGKEVHSGVSTDPQPLKEQPALNDSRYCLSSRLRVSATFWQNPRNHFRCQVQFYGLSENDEWTQDRAKPVTQIVSAEAWGRADCGFTSESYQQGVLSATILYEILLGKATLYAVLVSALVLMAMVKRKDSRGRAKRSGSGATNFSLLKQAGDVEENPGPTSMDWIWRILFLVGAATGAHSGPMDPDLEIRAAFLRQRNTALRTEVAELEQEVQRLENEVSQYETRYGPLGGGKGSGGGGSGGGGSGGGGSFEQVQLQQPGAELVKPGASVKMSCKASGYAFSSYWINWMKQKPGQGLEWIGQIYPGDGDTNYNGKFKGRATLTADTSSSTAYMQLSSLTSEDSAVYFCARSITTVVGCAMDYWGQGTSVTVSSTRIQNPDPAVYQLRDSKSSDKSVCLFTDFDSQTNVSQSKDSDVYITDKTVLDMRSMDFKSNSAVAWSNKSDFACANAFNNSIIPEDTFFPSPESSCDVKLVEKSFETDTNLNFQNLSVIGFRILLLKVAGFNLLMTLRLWSSRAKRSGSGVKQTLNFDLLKLAGDVESNPGPSRGHMTEYKPTVRLATRDDVPRAVRTLAAAFADYPATRHTVDPDRHIERVTELQELFLTRVGLDIGKVWVADDGAAVAVWTTPESVEAGAVFAEIGPRMAELSGSRLAAQQQMEGLLAPHRPKEPAWFLATVGVSPDHQGKGLGSAVVLPGVEAAERAGVPAFLETSAPRNLPFYERLGFTVTADVEVPEGPRTWCMTRKPGA

SEQ ID NO: 15040 - protein, 1007 aa, Artificial Sequence
  Synthetic Polypeptide
MALPVTALLLPLALLLHAARPDIQMTQSPSSLSASVGDRVTITCKASDHINNWLAWYQQKPGQAPKLLIYGATTLETGVPSRFSGSGSGTDYTLTISSLQPEDFATYYCQQSWNTPWTFGQGTKLEIKRLEDLKNVFPPEVAVFEPSEAEISHTQKATLVCLATGFYPDHVELSWWVNGKEVHSGVSTDPQPLKEQPALNDSRYCLSSRLRVSATFWQNPRNHFRCQVQFYGLSENDEWTQDRAKPVTQIVSAEAWGRADCGFTSESYQQGVLSATILYEILLGKATLYAVLVSALVLMAMVKRKDSRGRAKRSGSGATNFSLLKQAGDVEENPGPTSMDWIWRILFLVGAATGAHSGPMDPDLEIRAAFLRQRNTALRTEVAELEQEVQRLENEVSQYETRYGPLGGGKGSGGGGSGGGGSGGGGSFEQVQLQQPGAELVKPGASVKMSCKASGYAFSSYWINWMKQKPGQGLEWIGQIYPGDGDTNYNGKFKGRATLTADTSSSTAYMQLSSLTSEDSAVYFCARSITTVVGCAMDYWGQGTSVTVSSTREQKLISEEDGSGTPFPSLAPPIMLLVDGKQQMVVVCLVLDVAPPGLDSPIWFSAGNGSALDAFTYGPSPATDGTWTNLAHLSLPSEELASWEPLVCHTGPGAEGHSRSTQPMHLSGEASTARTCPQEPLRGTPGGALWLGVLRLLLFKLLLFDLLLTCSCLCDPAGPLPSPATTTRLRALGSHRLHPATETGGREATSSPRPQPRDRRWGDTPPGRKPGSPVRAKRSGSGVKQTLNFDLLKLAGDVESNPGPSRGHMTEYKPTVRLATRDDVPRAVRTLAAAFADYPATRHTVDPDRHIERVTELQELFLTRVGLDIGKVWVADDGAAVAVWTTPESVEAGAVFAEIGPRMAELSGSRLAAQQQMEGLLAPHRPKEPAWFLATVGVSPDHQGKGLGSAVVLPGVEAAERAGVPAFLETSAPRNLPFYERLGFTVTADVEVPEGPRTWCMTRKPGA

SEQ ID NO: 15041 - protein, 962 aa, Artificial Sequence
  Synthetic Polypeptide
MALPVTALLLPLALLLHAARPDIQMTQSPSSLSASVGDRVTITCKASDHINNWLAWYQQKPGQAPKLLIYGATTLETGVPSRFSGSGSGTDYTLTISSLQPEDFATYYCQQSWNTPWTFGQGTKLEIKRLEGKPIPNPLLGLDSTGSGDKQLDADVSPKPTIFLPSIAETKLQKAGTYLCLLEKFFPDVIKIHWQEKKSNTILGSQEGNTMKTNDTYMKFSWLTVPEKSLDKEHRCIVRHENNKNGVDQEIIFPPIKTDVITMDPKDNCSKDANDTLLLQLTNTSAYYMYLLLLLKSVVYFAIITCCLLRRTAFCCNGEKSRAKRSGSGATNFSLLKQAGDVEENPGPTSMDWIWRILFLVGAATGAHSGPMDPDLEIRAAFLRQRNTALRTEVAELEQEVQRLENEVSQYETRYGPLGGGKGSGGGGSGGGGSGGGGSFEQVQLQQPGAELVKPGASVKMSCKASGYAFSSYWINWMKQKPGQGLEWIGQIYPGDGDTNYNGKFKGRATLTADTSSSTAYMQLSSLTSEDSAVYFCARSITTVVGCAMDYWGQGTSVTVSSTREQKLISEEDGSGSQPHTKPSVFVMKNGTNVACLVKEFYPKDIRINLVSSKKITEFDPAIVISPSGKYNAVKLGKYEDSNSVTCSVQHDNKTVHSTDFEVKTDSTDHVKPKETENTKQPSKSCHKPKAIVHTEKVNMMSLTVLGLRMLFAKTVAVNFLLTAKLFFLRAKRSGSGVKQTLNFDLLKLAGDVESNPGPSRGHMTEYKPTVRLATRDDVPRAVRTLAAAFADYPATRHTVDPDRHIERVTELQELFLTRVGLDIGKVWVADDGAAVAVWTTPESVEAGAVFAEIGPRMAELSGSRLAAQQQMEGLLAPHRPKEPAWFLATVGVSPDHQGKGLGSAVVLPGVEAAERAGVPAFLETSAPRNLPFYERLGFTVTADVEVPEGPRTWCMTRKPGA

SEQ ID NO: 15042 - protein, 700 aa, Artificial Sequence
  Synthetic Polypeptide
MALPVTALLLPLALLLHAARPDIQMTQSPSSLSASVGDRVTITCKASDHINNWLAWYQQKPGQAPKLLIYGATTLETGVPSRFSGSGSGTDYTLTISSLQPEDFATYYCQQSWNTPWTFGQGTKLEIKRLESQPHTKPSVFVMKNGTNVACLVKEFYPKDIRINLVSSKKITEFDPAIVISPSGKYNAVKLGKYEDSNSVTCSVQHDNKTVHSTDFEVKTDSTDHVKPKETENTKQPSKSCHKPKAIVHTEKVNMMSLTVLGLRMLFAKTVAVNFLLTAKLFFLRAKRSGSGATNFSLLKQAGDVEENPGPTSMDWIWRILFLVGAATGAHSGPMDPDLEIRAAFLRQRNTALRTEVAELEQEVQRLENEVSQYETRYGPLGGGKGSGGGGSGGGGSGGGGSFEQVQLQQPGAELVKPGASVKMSCKASGYAFSSYWINWMKQKPGQGLEWIGQIYPGDGDTNYNGKFKGRATLTADTSSSTAYMQLSSLTSEDSAVYFCARSITTVVGCAMDYWGQGTSVTVSSTRDKQLDADVSPKPTIFLPSIAETKLQKAGTYLCLLEKFFPDVIKIHWQEKKSNTILGSQEGNTMKTNDTYMKFSWLTVPEKSLDKEHRCIVRHENNKNGVDQEIIFPPIKTDVITMDPKDNCSKDANDTLLLQLTNTSAYYMYLLLLLKSVVYFAIITCCLLRRTAFCCNGEKS

SEQ ID NO: 15043 - protein, 1102 aa, Artificial Sequence
  Synthetic Polypeptide
MALPVTALLLPLALLLHAARPDIQMTQSPSSLSASVGDRVTITCKASDHINNWLAWYQQKPGQAPKLLIYGATTLETGVPSRFSGSGSGTDYTLTISSLQPEDFATYYCQQSWNTPWTFGQGTKLEIKRGQPKANPTVTLFPPSSEELQANKATLVCLISDFYPGAVTVAWKADGSPVKAGVETTKPSKQSNNKYAASSYLSLTPEQWKSHRSYSCQVTHEGSTVEKTVAPTECSGSQSFGLLDPKLCYLLDGILFIYGVILTALFLRVKFSRSADAPAYQQGQNQLYNELNLGRREEYDVLDKRRGRDPEMGGKPQRRKNPQEGLYNELQKDKMAEAYSEIGMKGERRRGKGHDGLYQGLSTATKDTYDALHMQALPPRRAKRSGSGATNFSLLKQAGDVEENPGPTSMDWIWRILFLVGAATGAHSGPMDPDLEIRAAFLRQRNTALRTEVAELEQEVQRLENEVSQYETRYGPLGGGKGSGGGGSGGGGSGGGGSFEQVQLQQPGAELVKPGASVKMSCKASGYAFSSYWINWMKQKPGQGLEWIGQIYPGDGDTNYNGKFKGRATLTADTSSSTAYMQLSSLTSEDSAVYFCARSITTVVGCAMDYWGQGTSVTVSSASTKGPSVFPLAPSSKSTSGGTAALGCLVKDYFPEPVTVSWNSGALTSGVHTFPAVLQSSGLYSLSSVVTVPSSSLGTQTYICNVNHKPSNTKVDKRVEPKSCGTQSFGLLDPKLCYLLDGILFIYGVILTALFLRVKFSRSADAPAYQQGQNQLYNELNLGRREEYDVLDKRRGRDPEMGGKPQRRKNPQEGLYNELQKDKMAEAYSEIGMKGERRRGKGHDGLYQGLSTATKDTYDALHMQALPPRRAKRSGSGVKQTLNFDLLKLAGDVESNPGPSRGHMTEYKPTVRLATRDDVPRAVRTLAAAFADYPATRHTVDPDRHIERVTELQELFLTRVGLDIGKVWVADDGAAVAVWTTPESVEAGAVFAEIGPRMAELSGSRLAAQQQMEGLLAPHRPKEPAWFLATVGVSPDHQGKGLGSAVVLPGVEAAERAGVPAFLETSAPRNLPFYERLGFTVTADVEVPEGPRTWCMTRKPGA

SEQ ID NO: 15044 - protein, 888 aa, Artificial Sequence
  Synthetic Polypeptide
MALPVTALLLPLALLLHAARPDIQMTQSPSSLSASVGDRVTITCKASDHINNWLAWYQQKPGQAPKLLIYGATTLETGVPSRFSGSGSGTDYTLTISSLQPEDFATYYCQQSWNTPWTFGQGTKLEIKRLEDLKNVFPPEVAVFEPSEAEISHTQKATLVCLATGFYPDHVELSWWVNGKEVHSGVSTDPQPLKEQPALNDSRYCLSSRLRVSATFWQNPRNHFRCQVQFYGLSENDEWTQDRAKPVTQIVSAEAWGRADCGSQSFGLLDPKLCYLLDGILFIYGVILTALFLRVKFSRSADAPAYQQGQNQLYNELNLGRREEYDVLDKRRGRDPEMGGKPQRRKNPQEGLYNELQKDKMAEAYSEIGMKGERRRGKGHDGLYQGLSTATKDTYDALHMQALPPRRAKRSGSGATNFSLLKQAGDVEENPGPTSMDWIWRILFLVGAATGAHSGPMDPDLEIRAAFLRQRNTALRTEVAELEQEVQRLENEVSQYETRYGPLGGGKGSGGGGSGGGGSGGGGSFEQVQLQQPGAELVKPGASVKMSCKASGYAFSSYWINWMKQKPGQGLEWIGQIYPGDGDTNYNGKFKGRATLTADTSSSTAYMQLSSLTSEDSAVYFCARSITTVVGCAMDYWGQGTSVTVSSTRIQNPDPAVYQLRDSKSSDKSVCLFTDFDSQTNVSQSKDSDVYITDKTVLDMRSMDFKSNSAVAWSNKSDFACANAFNNSIIPEDTFFPSPESSCGTQSFGLLDPKLCYLLDGILFIYGVILTALFLRVKFSRSADAPAYQQGQNQLYNELNLGRREEYDVLDKRRGRDPEMGGKPQRRKNPQEGLYNELQKDKMAEAYSEIGMKGERRRGKGHDGLYQGLSTATKDTYDALHMQALPPR

SEQ ID NO: 15045 - protein, 888 aa, Artificial Sequence
  Synthetic Polypeptide
MALPVTALLLPLALLLHAARPDIQMTQSPSSLSASVGDRVTITCKASDHINNWLAWYQQKPGQAPKLLIYGATTLETGVPSRFSGSGSGTDYTLTISSLQPEDFATYYCQQSWNTPWTFGQGTKLEIKRLEDLKNVFPPEVAVFEPSKAEIAHTQKATLVCLATGFYPDHVELSWWVNGKEVHSGVCTDPQPLKEQPALNDSRYCLSSRLRVSATFWQNPRNHFRCQVQFYGLSENDEWTQDRAKPVTQIVSAEAWGRADCGSQSFGLLDPKLCYLLDGILFIYGVILTALFLRVKFSRSADAPAYQQGQNQLYNELNLGRREEYDVLDKRRGRDPEMGGKPQRRKNPQEGLYNELQKDKMAEAYSEIGMKGERRRGKGHDGLYQGLSTATKDTYDALHMQALPPRRAKRSGSGATNFSLLKQAGDVEENPGPTSMDWIWRILFLVGAATGAHSGPMDPDLEIRAAFLRQRNTALRTEVAELEQEVQRLENEVSQYETRYGPLGGGKGSGGGGSGGGGSGGGGSFEQVQLQQPGAELVKPGASVKMSCKASGYAFSSYWINWMKQKPGQGLEWIGQIYPGDGDTNYNGKFKGRATLTADTSSSTAYMQLSSLTSEDSAVYFCARSITTVVGCAMDYWGQGTSVTVSSTRIQNPDPAVYQLRDSKSSDKSVCLFTDFDSQTNVSQSKDSDVYITDKCVLDMRSMDFKSNSAVAWSNKSDFACANAFNNSIIPEDTFFPSSDVPCGTQSFGLLDPKLCYLLDGILFIYGVILTALFLRVKFSRSADAPAYQQGQNQLYNELNLGRREEYDVLDKRRGRDPEMGGKPQRRKNPQEGLYNELQKDKMAEAYSEIGMKGERRRGKGHDGLYQGLSTATKDTYDALHMQALPPR

SEQ ID NO: 15046 - protein, 959 aa, Artificial Sequence
  Synthetic Polypeptide
MALPVTALLLPLALLLHAARPDIQMTQSPSSLSASVGDRVTITCKASDHINNWLAWYQQKPGQAPKLLIYGATTLETGVPSRFSGSGSGTDYTLTISSLQPEDFATYYCQQSWNTPWTFGQGTKLEIKRLEGKPIPNPLLGLDSTGSGEDLKNVFPPEVAVFEPSEAEISHTQKATLVCLATGFYPDHVELSWWVNGKEVHSGVSTDPQPLKEQPALNDSRYCLSSRLRVSATFWQNPRNHFRCQVQFYGLSENDEWTQDRAKPVTQIVSAEAWGRADCGSQSFGLLDPKLCYLLDGILFIYGVILTALFLRVKFSRSADAPAYQQGQNQLYNELNLGRREEYDVLDKRRGRDPEMGGKPQRRKNPQEGLYNELQKDKMAEAYSEIGMKGERRRGKGHDGLYQGLSTATKDTYDALHMQALPPRRAKRSGSGATNFSLLKQAGDVEENPGPTSMDWIWRILFLVGAATGAHSGPMDPDLEIRAAFLRQRNTALRTEVAELEQEVQRLENEVSQYETRYGPLGGGKGSGGGGSGGGGSGGGGSFEQVQLQQPGAELVKPGASVKMSCKASGYAFSSYWINWMKQKPGQGLEWIGQIYPGDGDTNYNGKFKGRATLTADTSSSTAYMQLSSLTSEDSAVYFCARSITTVVGCAMDYWGQGTSVTVSSTREQKLISEEDGSGIQNPDPAVYQLRDSKSSDKSVCLFTDFDSQTNVSQSKDSDVYITDKTVLDMRSMDFKSNSAVAWSNKSDFACANAFNNSIIPEDTFFPSPESSCGTQSFGLLDPKLCYLLDGILFIYGVILTALFLRSKRSRLLHSDYMNMTPRRPGPTRKHYQPYAPPRDFAAYRSRVKFSRSADAPAYQQGQNQLYNELNLGRREEYDVLDKRRGRDPEMGGKPQRRKNPQEGLYNELQKDKMAEAYSEIGMKGERRRGKGHDGLYQGLSTATKDTYDALHMQALPPR

SEQ ID NO: 15047 - protein, 1000 aa, Artificial Sequence
  Synthetic Polypeptide
MALPVTALLLPLALLLHAARPDIQMTQSPSSLSASVGDRVTITCKASDHINNWLAWYQQKPGQAPKLLIYGATTLETGVPSRFSGSGSGTDYTLTISSLQPEDFATYYCQQSWNTPWTFGQGTKLEIKRLEGKPIPNPLLGLDSTGSGEDLKNVFPPEVAVFEPSEAEISHTQKATLVCLATGFYPDHVELSWWVNGKEVHSGVSTDPQPLKEQPALNDSRYCLSSRLRVSATFWQNPRNHFRCQVQFYGLSENDEWTQDRAKPVTQIVSAEAWGRADCGSQSFGLLDPKLCYLLDGILFIYGVILTALFLRSKRSRLLHSDYMNMTPRRPGPTRKHYQPYAPPRDFAAYRSRVKFSRSADAPAYQQGQNQLYNELNLGRREEYDVLDKRRGRDPEMGGKPQRRKNPQEGLYNELQKDKMAEAYSEIGMKGERRRGKGHDGLYQGLSTATKDTYDALHMQALPPRRAKRSGSGATNFSLLKQAGDVEENPGPTSMDWIWRILFLVGAATGAHSGPMDPDLEIRAAFLRQRNTALRTEVAELEQEVQRLENEVSQYETRYGPLGGGKGSGGGGSGGGGSGGGGSFEQVQLQQPGAELVKPGASVKMSCKASGYAFSSYWINWMKQKPGQGLEWIGQIYPGDGDTNYNGKFKGRATLTADTSSSTAYMQLSSLTSEDSAVYFCARSITTVVGCAMDYWGQGTSVTVSSTREQKLISEEDGSGIQNPDPAVYQLRDSKSSDKSVCLFTDFDSQTNVSQSKDSDVYITDKTVLDMRSMDFKSNSAVAWSNKSDFACANAFNNSIIPEDTFFPSPESSCGTQSFGLLDPKLCYLLDGILFIYGVILTALFLRSKRSRLLHSDYMNMTPRRPGPTRKHYQPYAPPRDFAAYRSRVKFSRSADAPAYQQGQNQLYNELNLGRREEYDVLDKRRGRDPEMGGKPQRRKNPQEGLYNELQKDKMAEAYSEIGMKGERRRGKGHDGLYQGLSTATKDTYDALHMQALPPR

SEQ ID NO: 15048 - protein, 961 aa, Artificial Sequence
  Synthetic Polypeptide
MALPVTALLLPLALLLHAARPDIQMTQSPSSLSASVGDRVTITCKASDHINNWLAWYQQKPGQAPKLLIYGATTLETGVPSRFSGSGSGTDYTLTISSLQPEDFATYYCQQSWNTPWTFGQGTKLEIKRLEGKPIPNPLLGLDSTGSGEDLKNVFPPEVAVFEPSEAEISHTQKATLVCLATGFYPDHVELSWWVNGKEVHSGVSTDPQPLKEQPALNDSRYCLSSRLRVSATFWQNPRNHFRCQVQFYGLSENDEWTQDRAKPVTQIVSAEAWGRADCGSQSFGLLDPKLCYLLDGILFIYGVILTALFLRVKFSRSADAPAYQQGQNQLYNELNLGRREEYDVLDKRRGRDPEMGGKPQRRKNPQEGLYNELQKDKMAEAYSEIGMKGERRRGKGHDGLYQGLSTATKDTYDALHMQALPPRRAKRSGSGATNFSLLKQAGDVEENPGPTSMDWIWRILFLVGAATGAHSGPMDPDLEIRAAFLRQRNTALRTEVAELEQEVQRLENEVSQYETRYGPLGGGKGSGGGGSGGGGSGGGGSFEQVQLQQPGAELVKPGASVKMSCKASGYAFSSYWINWMKQKPGQGLEWIGQIYPGDGDTNYNGKFKGRATLTADTSSSTAYMQLSSLTSEDSAVYFCARSITTVVGCAMDYWGQGTSVTVSSTREQKLISEEDLGSGIQNPDPAVYQLRDSKSSDKSVCLFTDFDSQTNVSQSKDSDVYITDKTVLDMRSMDFKSNSAVAWSNKSDFACANAFNNSIIPEDTFFPSPESSCGTQSFGLLDPKLCYLLDGILFIYGVILTALFLKRGRKKLLYIFKQPFMRPVQTTQEEDGCSCRFPEEEEGGCELRVKFSRSADAPAYQQGQNQLYNELNLGRREEYDVLDKRRGRDPEMGGKPQRRKNPQEGLYNELQKDKMAEAYSEIGMKGERRRGKGHDGLYQGLSTATKDTYDALHMQALPPR

SEQ ID NO: 15049 - protein, 1003 aa, Artificial Sequence
  Synthetic Polypeptide
MALPVTALLLPLALLLHAARPDIQMTQSPSSLSASVGDRVTITCKASDHINNWLAWYQQKPGQAPKLLIYGATTLETGVPSRFSGSGSGTDYTLTISSLQPEDFATYYCQQSWNTPWTFGQGTKLEIKRLEGKPIPNPLLGLDSTGSGEDLKNVFPPEVAVFEPSEAEISHTQKATLVCLATGFYPDHVELSWWVNGKEVHSGVSTDPQPLKEQPALNDSRYCLSSRLRVSATFWQNPRNHFRCQVQFYGLSENDEWTQDRAKPVTQIVSAEAWGRADCGSQSFGLLDPKLCYLLDGILFIYGVILTALFLKRGRKKLLYIFKQPFMRPVQTTQEEDGCSCRFPEEEEGGCELRVKFSRSADAPAYQQGQNQLYNELNLGRREEYDVLDKRRGRDPEMGGKPQRRKNPQEGLYNELQKDKMAEAYSEIGMKGERRRGKGHDGLYQGLSTATKDTYDALHMQALPPRRAKRSGSGATNFSLLKQAGDVEENPGPTSMDWIWRILFLVGAATGAHSGPMDPDLEIRAAFLRQRNTALRTEVAELEQEVQRLENEVSQYETRYGPLGGGKGSGGGGSGGGGSGGGGSFEQVQLQQPGAELVKPGASVKMSCKASGYAFSSYWINWMKQKPGQGLEWIGQIYPGDGDTNYNGKFKGRATLTADTSSSTAYMQLSSLTSEDSAVYFCARSITTVVGCAMDYWGQGTSVTVSSTREQKLISEEDLGSGIQNPDPAVYQLRDSKSSDKSVCLFTDFDSQTNVSQSKDSDVYITDKTVLDMRSMDFKSNSAVAWSNKSDFACANAFNNSIIPEDTFFPSPESSCGTQSFGLLDPKLCYLLDGILFIYGVILTALFLKRGRKKLLYIFKQPFMRPVQTTQEEDGCSCRFPEEEEGGCELRVKFSRSADAPAYQQGQNQLYNELNLGRREEYDVLDKRRGRDPEMGGKPQRRKNPQEGLYNELQKDKMAEAYSEIGMKGERRRGKGHDGLYQGLSTATKDTYDALHMQALPPR

SEQ ID NO: 15050 - protein, 893 aa, Artificial Sequence
  Synthetic Polypeptide
MALPVTALLLPLALLLHAARPDIQMTQSPSSLSASVGDRVTITCKASDHINNWLAWYQQKPGQAPKLLIYGATTLETGVPSRFSGSGSGTDYTLTISSLQPEDFATYYCQQSWNTPWTFGQGTKLEIKRLEQSFGLLDPKLCYLLDGILFIYGVILTALFLRVKFSRSADAPAYQQGQNQLYNELNLGRREEYDVLDKRRGRDPEMGGKPQRRKNPQEGLYNELQKDKMAEAYSEIGMKGERRRGKGHDGLYQGLSTATKDTYDALHMQALPPRRAKRSGSGATNFSLLKQAGDVEENPGPTSMDWIWRILFLVGAATGAHSGPMDPDLEIRAAFLRQRNTALRTEVAELEQEVQRLENEVSQYETRYGPLGGGKGSGGGGSGGGGSGGGGSFEQVQLQQPGAELVKPGASVKMSCKASGYAFSSYWINWMKQKPGQGLEWIGQIYPGDGDTNYNGKFKGRATLTADTSSSTAYMQLSSLTSEDSAVYFCARSITTVVGCAMDYWGQGTSVTVSSTRQSFGLLDPKLCYLLDGILFIYGVILTALFLRVKFSRSADAPAYQQGQNQLYNELNLGRREEYDVLDKRRGRDPEMGGKPQRRKNPQEGLYNELQKDKMAEAYSEIGMKGERRRGKGHDGLYQGLSTATKDTYDALHMQALPPRRAKRSGSGVKQTLNFDLLKLAGDVESNPGPSRGHMTEYKPTVRLATRDDVPRAVRTLAAAFADYPATRHTVDPDRHIERVTELQELFLTRVGLDIGKVWVADDGAAVAVWTTPESVEAGAVFAEIGPRMAELSGSRLAAQQQMEGLLAPHRPKEPAWFLATVGVSPDHQGKGLGSAVVLPGVEAAERAGVPAFLETSAPRNLPFYERLGFTVTADVEVPEGPRTWCMTRKPGA

SEQ ID NO: 15051 - protein, 718 aa, Artificial Sequence
  Synthetic Polypeptide
MALPVTALLLPLALLLHAARPDIQMTQSPSSLSASVGDRVTITCKASDHINNWLAWYQQKPGQAPKLLIYGATTLETGVPSRFSGSGSGTDYTLTISSLQPEDFATYYCQQSWNTPWTFGQGTKLEIKRLEGQPKANPTVTLFPPSSEELQANKATLVCLISDFYPGAVTVAWKADGSPVKAGVETTKPSKQSNNKYAASSYLSLTPEQWKSHRSYSCQVTHEGSTVEKTVAPTECSPIKTDVITMDPKDNCSKDANDTLLLQLTNTSAYYMYLLLLLKSVVYFAIITCCLLRRTAFCCNGEKSRAKRSGSGATNFSLLKQAGDVEENPGPTSMDWIWRILFLVGAATGAHSGPMDPDLEIRAAFLRQRNTALRTEVAELEQEVQRLENEVSQYETRYGPLGGGKGSGGGGSGGGGSGGGGSFEQVQLQQPGAELVKPGASVKMSCKASGYAFSSYWINWMKQKPGQGLEWIGQIYPGDGDTNYNGKFKGRATLTADTSSSTAYMQLSSLTSEDSAVYFCARSITTVVGCAMDYWGQGTSVTVSSTRASTKGPSVFPLAPSSKSTSGGTAALGCLVKDYFPEPVTVSWNSGALTSGVHTFPAVLQSSGLYSLSSVVTVPSSSLGTQTYICNVNHKPSNTKVDKRVEPKSCEVKTDSTDHVKPKETENTKQPSKSCHKPKAIVHTEKVNMMSLTVLGLRMLFAKTVAVNFLLTAKLFFL

SEQ ID NO: 15052 - protein, 696 aa, Artificial Sequence
  Synthetic Polypeptide
MALPVTALLLPLALLLHAARPDIQMTQSPSSLSASVGDRVTITCKASDHINNWLAWYQQKPGQAPKLLIYGATTLETGVPSRFSGSGSGTDYTLTISSLQPEDFATYYCQQSWNTPWTFGQGTKLEIKRLEGQPKANPTVTLFPPSSEELQANKATLVCLISDFYPGAVTVAWKADGSPVKAGVETTKPSKQSNNKYAASSYLSLTPEQWKSHRSYSCQVTHEGSTVEKTVAPTECSGRADCGITSASYHQGVLSATILYEILLGKATLYAVLVSALVLMAMVKRKDSRGRAKRSGSGATNFSLLKQAGDVEENPGPTSMDWIWRILFLVGAATGAHSGPMDPDLEIRAAFLRQRNTALRTEVAELEQEVQRLENEVSQYETRYGPLGGGKGSGGGGSGGGGSGGGGSFEQVQLQQPGAELVKPGASVKMSCKASGYAFSSYWINWMKQKPGQGLEWIGQIYPGDGDTNYNGKFKGRATLTADTSSSTAYMQLSSLTSEDSAVYFCARSITTVVGCAMDYWGQGTSVTVSSTRASTKGPSVFPLAPSSKSTSGGTAALGCLVKDYFPEPVTVSWNSGALTSGVHTFPAVLQSSGLYSLSSVVTVPSSSLGTQTYICNVNHKPSNTKVDKRVEPKSCIPEDTFFPSSDVPCDVKLVEKSFETDTNLNFQNLSVIGFRILLLKVAGFNLLMTLRLWSS

SEQ ID NO: 15053 - protein, 696 aa, Artificial Sequence
  Synthetic Polypeptide
MALPVTALLLPLALLLHAARPDIQMTQSPSSLSASVGDRVTITCKASDHINNWLAWYQQKPGQAPKLLIYGATTLETGVPSRFSGSGSGTDYTLTISSLQPEDFATYYCQQSWNTPWTFGQGTKLEIKRLEGQPKANPTVTLFPPSSEELQANKATLVCLISDFYPGAVTVAWKADGSPVKAGVETTKPSKQSNNKYAASSYLSLTPEQWKSHRSYSCQVTHEGSTVEKTVAPTECSGRADCGFTSESYQQGVLSATILYEILLGKATLYAVLVSALVLMAMVKRKDSRGRAKRSGSGATNFSLLKQAGDVEENPGPTSMDWIWRILFLVGAATGAHSGPMDPDLEIRAAFLRQRNTALRTEVAELEQEVQRLENEVSQYETRYGPLGGGKGSGGGGSGGGGSGGGGSFEQVQLQQPGAELVKPGASVKMSCKASGYAFSSYWINWMKQKPGQGLEWIGQIYPGDGDTNYNGKFKGRATLTADTSSSTAYMQLSSLTSEDSAVYFCARSITTVVGCAMDYWGQGTSVTVSSTRASTKGPSVFPLAPSSKSTSGGTAALGCLVKDYFPEPVTVSWNSGALTSGVHTFPAVLQSSGLYSLSSVVTVPSSSLGTQTYICNVNHKPSNTKVDKRVEPKSCIPEDTFFPSPESSCDVKLVEKSFETDTNLNFQNLSVIGFRILLLKVAGFNLLMTLRLWSS

SEQ ID NO: 15054 - protein, 526 aa, Artificial Sequence
  Synthetic Polypeptide
MDWIWRILFLVGAATGAHSGPMDPDLEIRAAFLRQRNTALRTEVAELEQEVQRLENEVSQYETRYGPLGGGKGSGGGGSGGGGSGGGGSFEQVQLQQPGAELVKPGASVKMSCKASGYAFSSYWINWMKQKPGQGLEWIGQIYPGDGDTNYNGKFKGRATLTADTSSSTAYMQLSSLTSEDSAVYFCARSITTVVGCAMDYWGQGTSVTVSSGGGGSGGGGSGGGGSDIQMTQSPSSLSASVGDRVTITCKASDHINNWLAWYQQKPGQAPKLLIYGATTLETGVPSRFSGSGSGTDYTLTISSLQPEDFATYYCQQSWNTPWTFGQGTKLEIKRTRGGGSDGNEEMGGITQTPYKVSISGTTVILTCPQYPGSEILWQHNDKNIGGDEDDKNIGSDEDHLSLKEFSELEQSGYYVCYPRGSKPEDANFYLYLRARVCENCMEMDVMSVATIVIVDICITGGLLLLVYYWSKNRKAKAKPVTRGAGAGGRQRGQNKERPPPVPNPDYEPIRKGQRDLYSGLNQRRI

SEQ ID NO: 15055 - protein, 491 aa, Artificial Sequence
  Synthetic Polypeptide
MDWIWRILFLVGAATGAHSGPMDPDLEIRAAFLRQRNTALRTEVAELEQEVQRLENEVSQYETRYGPLGGGKGSGGGGSGGGGSGGGGSFEQVQLQQPGAELVKPGASVKMSCKASGYAFSSYWINWMKQKPGQGLEWIGQIYPGDGDTNYNGKFKGRATLTADTSSSTAYMQLSSLTSEDSAVYFCARSITTVVGCAMDYWGQGTSVTVSSGGGGSGGGGSGGGGSDIQMTQSPSSLSASVGDRVTITCKASDHINNWLAWYQQKPGQAPKLLIYGATTLETGVPSRFSGSGSGTDYTLTISSLQPEDFATYYCQQSWNTPWTFGQGTKLEIKRTRGGGSFKIPIEELEDRVFVNCNTSITWVEGTVGTLLSDITRLDLGKRILDPRGIYRCNGTDIYKDKESTVQVHYRMCQSCVELDPATVAGIIVTDVIATLLLALGVFCFAGHETGRLSGAADTQALLRNDQVYQPLRDRDDAQYSHLGGNWARNK

SEQ ID NO: 15056 - protein, 501 aa, Artificial Sequence
  Synthetic Polypeptide
MDWIWRILFLVGAATGAHSGPMDPDLEIRAAFLRQRNTALRTEVAELEQEVQRLENEVSQYETRYGPLGGGKGSGGGGSGGGGSGGGGSFEQVQLQQPGAELVKPGASVKMSCKASGYAFSSYWINWMKQKPGQGLEWIGQIYPGDGDTNYNGKFKGRATLTADTSSSTAYMQLSSLTSEDSAVYFCARSITTVVGCAMDYWGQGTSVTVSSGGGGSGGGGSGGGGSDIQMTQSPSSLSASVGDRVTITCKASDHINNWLAWYQQKPGQAPKLLIYGATTLETGVPSRFSGSGSGTDYTLTISSLQPEDFATYYCQQSWNTPWTFGQGTKLEIKRTRGGGSQSIKGNHLVKVYDYQEDGSVLLTCDAEAKNITWFKDGKMIGFLTEDKKKWNLGSNAKDPRGMYQCKGSQNKSKPLQVYYRMCQNCIELNAATISGFLFAEIVSIFVLAVGVYFIAGQDGVRQSRASDKQTLLPNDQLYQPLKDREDDQYSHLQGNQLRRN

SEQ ID NO: 15057 - protein, 484 aa, Artificial Sequence
  Synthetic Polypeptide
MDWIWRILFLVGAATGAHSGPMDPDLEIRAAFLRQRNTALRTEVAELEQEVQRLENEVSQYETRYGPLGGGKGSGGGGSGGGGSGGGGSFEQVQLQQPGAELVKPGASVKMSCKASGYAFSSYWINWMKQKPGQGLEWIGQIYPGDGDTNYNGKFKGRATLTADTSSSTAYMQLSSLTSEDSAVYFCARSITTVVGCAMDYWGQGTSVTVSSGGGGSGGGGSGGGGSDIQMTQSPSSLSASVGDRVTITCKASDHINNWLAWYQQKPGQAPKLLIYGATTLETGVPSRFSGSGSGTDYTLTISSLQPEDFATYYCQQSWNTPWTFGQGTKLEIKRTRGGGSQSFGLLDPKLCYLLDGILFIYGVILTALFLRVKFSRSADAPAYQQGQNQLYNELNLGRREEYDVLDKRRGRDPEMGGKPQRRKNPQEGLYNELQKDKMAEAYSEIGMKGERRRGKGHDGLYQGLSTATKDTYDALHMQALPPR

SEQ ID NO: 15058 - protein, 520 aa, Artificial Sequence
  Synthetic Polypeptide
MDWIWRILFLVGAATGAHSGPMDPDLEIRAAFLRQRNTALRTEVAELEQEVQRLENEVSQYETRYGPLGGGKGSGGGGSGGGGSGGGGSFEQVQLQQPGAELVKPGASVKMSCKASGYAFSSYWINWMKQKPGQGLEWIGQIYPGDGDTNYNGKFKGRATLTADTSSSTAYMQLSSLTSEDSAVYFCARSITTVVGCAMDYWGQGTSVTVSSTRIQNPDPAVYQLRDSKSSDKSVCLFTDFDSQTNVSQSKDSDVYITDKTVLDMRSMDFKSNSAVAWSNKSDFACANAFNNSIIPEDTFFPSPESSCDVKLVEKSFETDTNLNFQNLSVIGFRILLLKVAGFNLLMTLRLWSSRAKRSGSGVKQTLNFDLLKLAGDVESNPGPSRGHMAKPLSQEESTLIERATATINSIPISEDYSVASAALSSDGRIFTGVNVYHFTGGPCAELVVLGTAAAAAAGNLTCIVAIGNENRGILSPCGRCRQVLLDLHPGIKAIVKDSDGQPTAVGIRELLPSGYVWEG

SEQ ID NO: 15059 - protein, 354 aa, Artificial Sequence
  Synthetic Polypeptide
MDWIWRILFLVGAATGAHSGPMDPDLEIRAAFLRQRNTALRTEVAELEQEVQRLENEVSQYETRYGPLGGGKGSGGGGSGGGGSGGGGSFEQVQLQQPGAELVKPGASVKMSCKASGYAFSSYWINWMKQKPGQGLEWIGQIYPGDGDTNYNGKFKGRATLTADTSSSTAYMQLSSLTSEDSAVYFCARSITTVVGCAMDYWGQGTSVTVSSTRIQNPDPAVYQLRDSKSSDKSVCLFTDFDSQTNVSQSKDSDVYITDKTVLDMRSMDFKSNSAVAWSNKSDFACANAFNNSIIPEDTFFPSPESSCDVKLVEKSFETDTNLNFQNLSVIGFRILLLKVAGFNLLMTLRLWSS

SEQ ID NO: 15060 - protein, 532 aa, Artificial Sequence
  Synthetic Polypeptide
MDWIWRILFLVGAATGAHSGPMDPDLEIRAAFLRQRNTALRTEVAELEQEVQRLENEVSQYETRYGPLGGGKGSGGGGSGGGGSGGGGSFEQVQLQQPGAELVKPGASVKMSCKASGYAFSSYWINWMKQKPGQGLEWIGQIYPGDGDTNYNGKFKGRATLTADTSSSTAYMQLSSLTSEDSAVYFCARSITTVVGCAMDYWGQGTSVTVSSTREQKLISEEDGSGIQNPDPAVYQLRDSKSSDKSVCLFTDFDSQTNVSQSKDSDVYITDKCVLDMRSMDFKSNSAVAWSNKSDFACANAFNNSIIPEDTFFPSPESSCDVKLVEKSFETDTNLNFQNLSVIGFRILLLKVAGFNLLMTLRLWSSRAKRSGSGVKQTLNFDLLKLAGDVESNPGPSRGHMAKPLSQEESTLIERATATINSIPISEDYSVASAALSSDGRIFTGVNVYHFTGGPCAELVVLGTAAAAAAGNLTCIVAIGNENRGILSPCGRCRQVLLDLHPGIKAIVKDSDGQPTAVGIRELLPSGYVWEG

SEQ ID NO: 15061 - protein, 366 aa, Artificial Sequence
  Synthetic Polypeptide
MDWIWRILFLVGAATGAHSGPMDPDLEIRAAFLRQRNTALRTEVAELEQEVQRLENEVSQYETRYGPLGGGKGSGGGGSGGGGSGGGGSFEQVQLQQPGAELVKPGASVKMSCKASGYAFSSYWINWMKQKPGQGLEWIGQIYPGDGDTNYNGKFKGRATLTADTSSSTAYMQLSSLTSEDSAVYFCARSITTVVGCAMDYWGQGTSVTVSSTREQKLISEEDGSGIQNPDPAVYQLRDSKSSDKSVCLFTDFDSQTNVSQSKDSDVYITDKCVLDMRSMDFKSNSAVAWSNKSDFACANAFNNSIIPEDTFFPSPESSCDVKLVEKSFETDTNLNFQNLSVIGFRILLLKVAGFNLLMTLRLWSS

SEQ ID NO: 15062 - protein, 634 aa, Artificial Sequence; identical to SEQ ID NO: 14808
  Synthetic Polypeptide

SEQ ID NO: 15063 - protein, 640 aa, Artificial Sequence; identical to SEQ ID NO: 14809
  Synthetic Polypeptide

SEQ ID NO: 15064 - protein, 1053 aa, Artificial Sequence; identical to SEQ ID NO: 14810
  Synthetic Polypeptide

SEQ ID NO: 15065 - protein, 993 aa, Artificial Sequence; identical to SEQ ID NO: 14811
  Synthetic Polypeptide

SEQ ID NO: 15066 - protein, 992 aa, Artificial Sequence; identical to SEQ ID NO: 14812
  Synthetic Polypeptide

SEQ ID NO: 15067 - protein, 759 aa, Artificial Sequence; identical to SEQ ID NO: 14813
  Synthetic Polypeptide

SEQ ID NO: 15068 - protein, 984 aa, Artificial Sequence; identical to SEQ ID NO: 14814
  Synthetic Polypeptide

SEQ ID NO: 15069 - protein, 763 aa, Artificial Sequence; identical to SEQ ID NO: 14815
  Synthetic Polypeptide

SEQ ID NO: 15070 - protein, 985 aa, Artificial Sequence; identical to SEQ ID NO: 14816
  Synthetic Polypeptide

SEQ ID NO: 15071 - protein, 1037 aa, Artificial Sequence; identical to SEQ ID NO: 14817
  Synthetic Polypeptide

SEQ ID NO: 15072 - protein, 1038 aa, Artificial Sequence; identical to SEQ ID NO: 14818
  Synthetic Polypeptide

SEQ ID NO: 15073 - protein, 992 aa, Artificial Sequence; identical to SEQ ID NO: 14819
  Synthetic Polypeptide

SEQ ID NO: 15074 - protein, 1074 aa, Artificial Sequence; identical to SEQ ID NO: 14820
  Synthetic Polypeptide

SEQ ID NO: 15075 - protein, 1092 aa, Artificial Sequence; identical to SEQ ID NO: 14821
  Synthetic Polypeptide

SEQ ID NO: 15076 - protein, 1029 aa, Artificial Sequence; identical to SEQ ID NO: 14822
  Synthetic Polypeptide

SEQ ID NO: 15077 - protein, 767 aa, Artificial Sequence; identical to SEQ ID NO: 14823
  Synthetic Polypeptide

SEQ ID NO: 15078 - protein, 1044 aa, Artificial Sequence; identical to SEQ ID NO: 14824
  Synthetic Polypeptide

SEQ ID NO: 15079 - protein, 1169 aa, Artificial Sequence; identical to SEQ ID NO: 14825
  Synthetic Polypeptide

SEQ ID NO: 15080 - protein, 955 aa, Artificial Sequence; identical to SEQ ID NO: 14826
  Synthetic Polypeptide

SEQ ID NO: 15081 - protein, 955 aa, Artificial Sequence; identical to SEQ ID NO: 14827
  Synthetic Polypeptide

SEQ ID NO: 15082 - protein, 1026 aa, Artificial Sequence; identical to SEQ ID NO: 14828
  Synthetic Polypeptide

SEQ ID NO: 15083 - protein, 1067 aa, Artificial Sequence; identical to SEQ ID NO: 14829
  Synthetic Polypeptide

SEQ ID NO: 15084 - protein, 1028 aa, Artificial Sequence; identical to SEQ ID NO: 14830
  Synthetic Polypeptide

SEQ ID NO: 15085 - protein, 1070 aa, Artificial Sequence; identical to SEQ ID NO: 14831
  Synthetic Polypeptide

SEQ ID NO: 15086 - protein, 960 aa, Artificial Sequence; identical to SEQ ID NO: 14832
  Synthetic Polypeptide

SEQ ID NO: 15087 - protein, 785 aa, Artificial Sequence; identical to SEQ ID NO: 14833
  Synthetic Polypeptide

SEQ ID NO: 15088 - protein, 763 aa, Artificial Sequence; identical to SEQ ID NO: 14834
  Synthetic Polypeptide

SEQ ID NO: 15089 - protein, 763 aa, Artificial Sequence; identical to SEQ ID NO: 14835
  Synthetic Polypeptide

SEQ ID NO: 15090 - protein, 589 aa, Artificial Sequence; identical to SEQ ID NO: 14836
  Synthetic Polypeptide

SEQ ID NO: 15091 - protein, 554 aa, Artificial Sequence; identical to SEQ ID NO: 14837
  Synthetic Polypeptide

SEQ ID NO: 15092 - protein, 564 aa, Artificial Sequence; identical to SEQ ID NO: 14838
  Synthetic Polypeptide

SEQ ID NO: 15093 - protein, 547 aa, Artificial Sequence; identical to SEQ ID NO: 14839
  Synthetic Polypeptide

SEQ ID NO: 15094 - protein, 780 aa, Artificial Sequence; identical to SEQ ID NO: 14840
  Synthetic Polypeptide

SEQ ID NO: 15095 - protein, 812 aa, Artificial Sequence; identical to SEQ ID NO: 14841
  Synthetic Polypeptide

SEQ ID NO: 15096 - protein, 862 aa, Artificial Sequence; identical to SEQ ID NO: 14842
  Synthetic Polypeptide

SEQ ID NO: 15097 - protein, 676 aa, Artificial Sequence; identical to SEQ ID NO: 14843
  Synthetic Polypeptide

SEQ ID NO: 15098 - protein, 446 aa, Artificial Sequence; identical to SEQ ID NO: 14844
  Synthetic Polypeptide

SEQ ID NO: 15099 - protein, 450 aa, Artificial Sequence; identical to SEQ ID NO: 14845
  Synthetic Polypeptide

SEQ ID NO: 15100 - protein, 284 aa, Artificial Sequence; identical to SEQ ID NO: 14846
  Synthetic Polypeptide

SEQ ID NO: 15101 - protein, 694 aa, Artificial Sequence; identical to SEQ ID NO: 14847
  Synthetic Polypeptide

SEQ ID NO: 15102 - protein, 464 aa, Artificial Sequence; identical to SEQ ID NO: 14848
  Synthetic Polypeptide

SEQ ID NO: 15103 - protein, 462 aa, Artificial Sequence; identical to SEQ ID NO: 14849
  Synthetic Polypeptide

SEQ ID NO: 15104 - protein, 296 aa, Artificial Sequence; identical to SEQ ID NO: 14850
  Synthetic Polypeptide

SEQ ID NO: 15105 - protein, 780 aa, Artificial Sequence; identical to SEQ ID NO: 14851
  Synthetic Polypeptide

SEQ ID NO: 15106 - protein, 812 aa, Artificial Sequence; identical to SEQ ID NO: 14852
  Synthetic Polypeptide

SEQ ID NO: 15107 - protein, 1063 aa, Artificial Sequence
  Synthetic Polypeptide
MALPVTALLLPLALLLHAARPQLQLQESGPGLVKPSETLSLTCTVSGDSISSGDYYWGWIRQPPGKGLEWIGHIYYSGVTYYNPSLKSRVTISVDTSRNQFSLKLSSVTAADTAVYYCTREDSSNWRSRGQGTLVTVSSGTGGGGSGGGGSGGGGSEFDIQMTQSPSSLSASVGDRVTITCKASDHINNWLAWYQQKPGQAPKLLIYGATTLETGVPSRFSGSGSGTDYTLTISSLQPEDFATYYCQQSWNTPWTFGQGTKLEIKRLEIQNPDPAVYQLRDSKSSDKSVCLFTDFDSQTNVSQSKDSDVYITDKCVLDMRSMDFKSNSAVAWSNKSDFACANAFNNSIIPEDTFFPSSDVPCDVKLVEKSFETDTNLNFQNLSVIGFRILLLKVAGFNLLMTLRLWSSRAKRSGSGVKQTLNFDLLKLAGDVESNPGPTSMDWIWRILFLVGAATGAHSGPMDPDLEIRAAFLRQRNTALRTEVAELEQEVQRLENEVSQYETRYGPLGGGKGSGGGGSGGGGSGGGGSFEQVQLQQPGAELVKPGASVKMSCKASGYAFSSYWINWMKQKPGQGLEWIGQIYPGDGDTNYNGKFKGRATLTADTSSSTAYMQLSSLTSEDSAVYFCARSITTVVGCAMDYWGQGTSVTVSSTREDLKNVFPPEVAVFEPSKAEIAHTQKATLVCLATGFYPDHVELSWWVNGKEVHSGVCTDPQPLKEQPALNDSRYCLSSRLRVSATFWQNPRNHFRCQVQFYGLSENDEWTQDRAKPVTQIVSAEAWGRADCGITSASYHQGVLSATILYEILLGKATLYAVLVSALVLMAMVKRKDSRGRAKRSGSGATNFSLLKQAGDVEENPGPSRGHMTEYKPTVRLATRDDVPRAVRTLAAAFADYPATRHTVDPDRHIERVTELQELFLTRVGLDIGKVWVADDGAAVAVWTTPESVEAGAVFAEIGPRMAELSGSRLAAQQQMEGLLAPHRPKEPAWFLATVGVSPDHQGKGLGSAVVLPGVEAAERAGVPAFLETSAPRNLPFYERLGFTVTADVEVPEGPRTWCMTRKPGA

SEQ ID NO: 15108 - protein, 1062 aa, Artificial Sequence
  Synthetic Polypeptide
MALPVTALLLPLALLLHAARPQLQLQESGPGLVKPSETLSLTCTVSGDSISSGDYYWGWIRQPPGKGLEWIGHIYYSGVTYYNPSLKSRVTISVDTSRNQFSLKLSSVTAADTAVYYCTREDSSNWRSRGQGTLVTVSSGTGGGGSGGGGSGGGGSEFDIQMTQSPSSLSASVGDRVTITCKASDHINNWLAWYQQKPGQAPKLLIYGATTLETGVPSRFSGSGSGTDYTLTISSLQPEDFATYYCQQSWNTPWTFGQGTKLEIKRLEDLKNVFPPEVAVFEPSKAEIAHTQKATLVCLATGFYPDHVELSWWVNGKEVHSGVCTDPQPLKEQPALNDSRYCLSSRLRVSATFWQNPRNHFRCQVQFYGLSENDEWTQDRAKPVTQIVSAEAWGRADCGITSASYHQGVLSATILYEILLGKATLYAVLVSALVLMAMVKRKDSRGRAKRSGSGATNFSLLKQAGDVEENPGPTSMDWIWRILFLVGAATGAHSGPMDPDLEIRAAFLRQRNTALRTEVAELEQEVQRLENEVSQYETRYGPLGGGKGSGGGGSGGGGSGGGGSFEQVQLQQPGAELVKPGASVKMSCKASGYAFSSYWINWMKQKPGQGLEWIGQIYPGDGDTNYNGKFKGRATLTADTSSSTAYMQLSSLTSEDSAVYFCARSITTVVGCAMDYWGQGTSVTVSSTRIQNPDPAVYQLRDSKSSDKSVCLFTDFDSQTNVSQSKDSDVYITDKCVLDMRSMDFKSNSAVAWSNKSDFACANAFNNSIIPEDTFFPSSDVPCDVKLVEKSFETDTNLNFQNLSVIGFRILLLKVAGFNLLMTLRLWSSRAKRSGSGVKQTLNFDLLKLAGDVESNPGPSRGHMTEYKPTVRLATRDDVPRAVRTLAAAFADYPATRHTVDPDRHIERVTELQELFLTRVGLDIGKVWVADDGAAVAVWTTPESVEAGAVFAEIGPRMAELSGSRLAAQQQMEGLLAPHRPKEPAWFLATVGVSPDHQGKGLGSAVVLPGVEAAERAGVPAFLETSAPRNLPFYERLGFTVTADVEVPEGPRTWCMTRKPGA

SEQ ID NO: 15109 - protein, 1062 aa, Artificial Sequence
  Synthetic Polypeptide
MALPVTALLLPLALLLHAARPQLQLQESGPGLVKPSETLSLTCTVSGDSISSGDYYWGWIRQPPGKGLEWIGHIYYSGVTYYNPSLKSRVTISVDTSRNQFSLKLSSVTAADTAVYYCTREDSSNWRSRGQGTLVTVSSGTGGGGSGGGGSGGGGSEFDIQMTQSPSSLSASVGDRVTITCKASDHINNWLAWYQQKPGQAPKLLIYGATTLETGVPSRFSGSGSGTDYTLTISSLQPEDFATYYCQQSWNTPWTFGQGTKLEIKRLEDLKNVFPPEVAVFEPSEAEISHTQKATLVCLATGFYPDHVELSWWVNGKEVHSGVCTDPQPLKEQPALNDSRYCLSSRLRVSATFWQNPRNHFRCQVQFYGLSENDEWTQDRAKPVTQIVSAEAWGRADCGFTSESYQQGVLSATILYEILLGKATLYAVLVSALVLMAMVKRKDSRGRAKRSGSGATNFSLLKQAGDVEENPGPTSMDWIWRILFLVGAATGAHSGPMDPDLEIRAAFLRQRNTALRTEVAELEQEVQRLENEVSQYETRYGPLGGGKGSGGGGSGGGGSGGGGSFEQVQLQQPGAELVKPGASVKMSCKASGYAFSSYWINWMKQKPGQGLEWIGQIYPGDGDTNYNGKFKGRATLTADTSSSTAYMQLSSLTSEDSAVYFCARSITTVVGCAMDYWGQGTSVTVSSTRIQNPDPAVYQLRDSKSSDKSVCLFTDFDSQTNVSQSKDSDVYITDKCVLDMRSMDFKSNSAVAWSNKSDFACANAFNNSIIPEDTFFPSPESSCDVKLVEKSFETDTNLNFQNLSVIGFRILLLKVAGFNLLMTLRLWSSRAKRSGSGVKQTLNFDLLKLAGDVESNPGPSRGHMTEYKPTVRLATRDDVPRAVRTLAAAFADYPATRHTVDPDRHIERVTELQELFLTRVGLDIGKVWVADDGAAVAVWTTPESVEAGAVFAEIGPRMAELSGSRLAAQQQMEGLLAPHRPKEPAWFLATVGVSPDHQGKGLGSAVVLPGVEAAERAGVPAFLETSAPRNLPFYERLGFTVTADVEVPEGPRTWCMTRKPGA

SEQ ID NO: 15110 - protein, 829 aa, Artificial Sequence
  Synthetic Polypeptide
MALPVTALLLPLALLLHAARPQLQLQESGPGLVKPSETLSLTCTVSGDSISSGDYYWGWIRQPPGKGLEWIGHIYYSGVTYYNPSLKSRVTISVDTSRNQFSLKLSSVTAADTAVYYCTREDSSNWRSRGQGTLVTVSSGTGGGGSGGGGSGGGGSEFDIQMTQSPSSLSASVGDRVTITCKASDHINNWLAWYQQKPGQAPKLLIYGATTLETGVPSRFSGSGSGTDYTLTISSLQPEDFATYYCQQSWNTPWTFGQGTKLEIKRLEDLKNVFPPEVAVFEPSEAEISHTQKATLVCLATGFYPDHVELSWWVNGKEVHSGVCTDPQPLKEQPALNDSRYCLSSRLRVSATFWQNPRNHFRCQVQFYGLSENDEWTQDRAKPVTQIVSAEAWGRADCGFTSESYQQGVLSATILYEILLGKATLYAVLVSALVLMAMVKRKDSRGRAKRSGSGATNFSLLKQAGDVEENPGPTSMDWIWRILFLVGAATGAHSGPMDPDLEIRAAFLRQRNTALRTEVAELEQEVQRLENEVSQYETRYGPLGGGKGSGGGGSGGGGSGGGGSFEQVQLQQPGAELVKPGASVKMSCKASGYAFSSYWINWMKQKPGQGLEWIGQIYPGDGDTNYNGKFKGRATLTADTSSSTAYMQLSSLTSEDSAVYFCARSITTVVGCAMDYWGQGTSVTVSSTRIQNPDPAVYQLRDSKSSDKSVCLFTDFDSQTNVSQSKDSDVYITDKCVLDMRSMDFKSNSAVAWSNKSDFACANAFNNSIIPEDTFFPSPESSCDVKLVEKSFETDTNLNFQNLSVIGFRILLLKVAGFNLLMTLRLWSS

SEQ ID NO: 15111 - protein, 1054 aa, Artificial Sequence
  Synthetic Polypeptide
MALPVTALLLPLALLLHAARPQLQLQESGPGLVKPSETLSLTCTVSGDSISSGDYYWGWIRQPPGKGLEWIGHIYYSGVTYYNPSLKSRVTISVDTSRNQFSLKLSSVTAADTAVYYCTREDSSNWRSRGQGTLVTVSSGTGGGGSGGGGSGGGGSEFDIQMTQSPSSLSASVGDRVTITCKASDHINNWLAWYQQKPGQAPKLLIYGATTLETGVPSRFSGSGSGTDYTLTISSLQPEDFATYYCQQSWNTPWTFGQGTKLEIKRLEDLKNVFPPEVAVFEPSEAEISHTQKATLVCLATGFYPDHVELSWWVNGKEVHSGVCTDPQPLKEQPALNDSRYCLSSRLRVSATFWQNPRNHFRCQVQFYGLSENDEWTQDRAKPVTQIVSAEAWGRADCGFTSESYQQGVLSATILYEILLGKATLYAVLVSALVLMAMVKRKDSRGRAKRSGSGATNFSLLKQAGDVEENPGPTSMDWIWRILFLVGAATGAHSGPMDPDLEIRAAFLRQRNTALRTEVAELEQEVQRLENEVSQYETRYGPLGGGKGSGGGGSGGGGSGGGGSFEQVQLQQPGAELVKPGASVKMSCKASGYAFSSYWINWMKQKPGQGLEWIGQIYPGDGDTNYNGKFKGRATLTADTSSSTAYMQLSSLTSEDSAVYFCARSITTVVGCAMDYWGQGTSVTVSSTRIQNPDPAVYQLRDSKSSDKSVCLFTDFDSQTNVSQSKDSDVYITDKCVLDMRSMDFKSNSAVAWSNKSDFACANAFNNSIIPEDTFFPSPESSCDVKLVEKSFETDTNLNFQNLSVIGFRILLLKVAGFNLLMTLRLWSSRAKRSGSGVKQTLNFDLLKLAGDVESNPGPSRGGIHTMATYEVLCEVARKLGTDDREVVLFLLNVFIPQPTLAQLIGALRALKEEGRLTFPLLAECLFRAGRRDLLRDLLHLDPRFLERHLAGTMSYFSPYQLTVLHVDGELCARDIRSLIFLSKDTIGSRSTPQTFLHWVYCMENLDLLGPTDVDALMSMLRSLSRVDLQRQVQTLMGLHLSGPSHSQHYRHTP

SEQ ID NO: 15112 - protein, 833 aa, Artificial Sequence
  Synthetic Polypeptide
MALPVTALLLPLALLLHAARPQLQLQESGPGLVKPSETLSLTCTVSGDSISSGDYYWGWIRQPPGKGLEWIGHIYYSGVTYYNPSLKSRVTISVDTSRNQFSLKLSSVTAADTAVYYCTREDSSNWRSRGQGTLVTVSSGTGGGGSGGGGSGGGGSEFDIQMTQSPSSLSASVGDRVTITCKASDHINNWLAWYQQKPGQAPKLLIYGATTLETGVPSRFSGSGSGTDYTLTISSLQPEDFATYYCQQSWNTPWTFGQGTKLEIKRLEIQNPDPAVYQLRDSKSSDKSVCLFTDFDSQTNVSQSKDSDVYITDKCVLDMRSMDFKSNSAVAWSNKSDFACANAFNNSIIPEDTFFPSPESSCDVKLVEKSFETDTNLNFQNLSVIGFRILLLKVAGFNLLMTLRLWSSRAKRSGSGVKQTLNFDLLKLAGDVESNPGPTSMDWIWRILFLVGAATGAHSGPMDPDLEIRAAFLRQRNTALRTEVAELEQEVQRLENEVSQYETRYGPLGGGKGSGGGGSGGGGSGGGGSFEQVQLQQPGAELVKPGASVKMSCKASGYAFSSYWINWMKQKPGQGLEWIGQIYPGDGDTNYNGKFKGRATLTADTSSSTAYMQLSSLTSEDSAVYFCARSITTVVGCAMDYWGQGTSVTVSSTREDLKNVFPPEVAVFEPSEAEISHTQKATLVCLATGFYPDHVELSWWVNGKEVHSGVCTDPQPLKEQPALNDSRYCLSSRLRVSATFWQNPRNHFRCQVQFYGLSENDEWTQDRAKPVTQIVSAEAWGRADCGFTSESYQQGVLSATILYEILLGKATLYAVLVSALVLMAMVKRKDSRG

SEQ ID NO: 15113 - protein, 1055 aa, Artificial Sequence
  Synthetic Polypeptide
MALPVTALLLPLALLLHAARPQLQLQESGPGLVKPSETLSLTCTVSGDSISSGDYYWGWIRQPPGKGLEWIGHIYYSGVTYYNPSLKSRVTISVDTSRNQFSLKLSSVTAADTAVYYCTREDSSNWRSRGQGTLVTVSSGTGGGGSGGGGSGGGGSEFDIQMTQSPSSLSASVGDRVTITCKASDHINNWLAWYQQKPGQAPKLLIYGATTLETGVPSRFSGSGSGTDYTLTISSLQPEDFATYYCQQSWNTPWTFGQGTKLEIKRLEIQNPDPAVYQLRDSKSSDKSVCLFTDFDSQTNVSQSKDSDVYITDKCVLDMRSMDFKSNSAVAWSNKSDFACANAFNNSIIPEDTFFPSPESSCDVKLVEKSFETDTNLNFQNLSVIGFRILLLKVAGFNLLMTLRLWSSRAKRSGSGVKQTLNFDLLKLAGDVESNPGPTSMDWIWRILFLVGAATGAHSGPMDPDLEIRAAFLRQRNTALRTEVAELEQEVQRLENEVSQYETRYGPLGGGKGSGGGGSGGGGSGGGGSFEQVQLQQPGAELVKPGASVKMSCKASGYAFSSYWINWMKQKPGQGLEWIGQIYPGDGDTNYNGKFKGRATLTADTSSSTAYMQLSSLTSEDSAVYFCARSITTVVGCAMDYWGQGTSVTVSSTREDLKNVFPPEVAVFEPSEAEISHTQKATLVCLATGFYPDHVELSWWVNGKEVHSGVCTDPQPLKEQPALNDSRYCLSSRLRVSATFWQNPRNHFRCQVQFYGLSENDEWTQDRAKPVTQIVSAEAWGRADCGFTSESYQQGVLSATILYEILLGKATLYAVLVSALVLMAMVKRKDSRGRAKRSGSGATNFSLLKQAGDVEENPGPSRGGIHTMATYEVLCEVARKLGTDDREVVLFLLNVFIPQPTLAQLIGALRALKEEGRLTFPLLAECLFRAGRRDLLRDLLHLDPRFLERHLAGTMSYFSPYQLTVLHVDGELCARDIRSLIFLSKDTIGSRSTPQTFLHWVYCMENLDLLGPTDVDALMSMLRSLSRVDLQRQVQTLMGLHLSGPSHSQHYRHTP

SEQ ID NO: 15114 - protein, 1062 aa, Artificial Sequence
  Synthetic Polypeptide
MALPVTALLLPLALLLHAARPQLQLQESGPGLVKPSETLSLTCTVSGDSISSGDYYWGWIRQPPGKGLEWIGHIYYSGVTYYNPSLKSRVTISVDTSRNQFSLKLSSVTAADTAVYYCTREDSSNWRSRGQGTLVTVSSGTGGGGSGGGGSGGGGSEFDIQMTQSPSSLSASVGDRVTITCKASDHINNWLAWYQQKPGQAPKLLIYGATTLETGVPSRFSGSGSGTDYTLTISSLQPEDFATYYCQQSWNTPWTFGQGTKLEIKRLEDLKNVFPPEVAVFEPSEAEISHTQKATLVCLATGFYPDHVELSWWVNGKEVHSGVSTDPQPLKEQPALNDSRYCLSSRLRVSATFWQNPRNHFRCQVQFYGLSENDEWTQDRAKPVTQIVSAEAWGRADCGFTSESYQQGVLSATILYEILLGKATLYAVLVSALVLMAMVKRKDSRGRAKRSGSGATNFSLLKQAGDVEENPGPTSMDWIWRILFLVGAATGAHSGPMDPDLEIRAAFLRQRNTALRTEVAELEQEVQRLENEVSQYETRYGPLGGGKGSGGGGSGGGGSGGGGSFEQVQLQQPGAELVKPGASVKMSCKASGYAFSSYWINWMKQKPGQGLEWIGQIYPGDGDTNYNGKFKGRATLTADTSSSTAYMQLSSLTSEDSAVYFCARSITTVVGCAMDYWGQGTSVTVSSTRIQNPDPAVYQLRDSKSSDKSVCLFTDFDSQTNVSQSKDSDVYITDKTVLDMRSMDFKSNSAVAWSNKSDFACANAFNNSIIPEDTFFPSPESSCDVKLVEKSFETDTNLNFQNLSVIGFRILLLKVAGFNLLMTLRLWSSRAKRSGSGVKQTLNFDLLKLAGDVESNPGPSRGHMTEYKPTVRLATRDDVPRAVRTLAAAFADYPATRHTVDPDRHIERVTELQELFLTRVGLDIGKVWVADDGAAVAVWTTPESVEAGAVFAEIGPRMAELSGSRLAAQQQMEGLLAPHRPKEPAWFLATVGVSPDHQGKGLGSAVVLPGVEAAERAGVPAFLETSAPRNLPFYERLGFTVTADVEVPEGPRTWCMTRKPGA

SEQ ID NO: 15115 - protein, 1144 aa, Artificial Sequence
  Synthetic Polypeptide
MALPVTALLLPLALLLHAARPQLQLQESGPGLVKPSETLSLTCTVSGDSISSGDYYWGWIRQPPGKGLEWIGHIYYSGVTYYNPSLKSRVTISVDTSRNQFSLKLSSVTAADTAVYYCTREDSSNWRSRGQGTLVTVSSGTGGGGSGGGGSGGGGSEFDIQMTQSPSSLSASVGDRVTITCKASDHINNWLAWYQQKPGQAPKLLIYGATTLETGVPSRFSGSGSGTDYTLTISSLQPEDFATYYCQQSWNTPWTFGQGTKLEIKRLEDLKNVFPPEVAVFEPSEAEISHTQKATLVCLATGFYPDHVELSWWVNGKEVHSGVSTDPQPLKEQPALNDSRYCLSSRLRVSATFWQNPRNHFRCQVQFYGLSENDEWTQDRAKPVTQIVSAEAWGRADCGFTSESYQQGVLSATILYEILLGKATLYAVLVSALVLMAMVKRKDSRGRAKRSGSGATNFSLLKQAGDVEENPGPTSMDWIWRILFLVGAATGAHSGPMDPDLEIRAAFLRQRNTALRTEVAELEQEVQRLENEVSQYETRYGPLGGGKGSGGGGSGGGGSGGGGSFEQVQLQQPGAELVKPGASVKMSCKASGYAFSSYWINWMKQKPGQGLEWIGQIYPGDGDTNYNGKFKGRATLTADTSSSTAYMQLSSLTSEDSAVYFCARSITTVVGCAMDYWGQGTSVTVSSTREQKLISEEDGSGTPFPSLAPPIMLLVDGKQQMVVVCLVLDVAPPGLDSPIWFSAGNGSALDAFTYGPSPATDGTWTNLAHLSLPSEELASWEPLVCHTGPGAEGHSRSTQPMHLSGEASTARTCPQEPLRGTPGGALWLGVLRLLLFKLLLFDLLLTCSCLCDPAGPLPSPATTTRLRALGSHRLHPATETGGREATSSPRPQPRDRRWGDTPPGRKPGSPVRAKRSGSGVKQTLNFDLLKLAGDVESNPGPSRGHMTEYKPTVRLATRDDVPRAVRTLAAAFADYPATRHTVDPDRHIERVTELQELFLTRVGLDIGKVWVADDGAAVAVWTTPESVEAGAVFAEIGPRMAELSGSRLAAQQQMEGLLAPHRPKEPAWFLATVGVSPDHQGKGLGSAVVLPGVEAAERAGVPAFLETSAPRNLPFYERLGFTVTADVEVPEGPRTWCMTRKPGA

SEQ ID NO: 15116 - protein, 1099 aa, Artificial Sequence
  Synthetic Polypeptide
MALPVTALLLPLALLLHAARPQLQLQESGPGLVKPSETLSLTCTVSGDSISSGDYYWGWIRQPPGKGLEWIGHIYYSGVTYYNPSLKSRVTISVDTSRNQFSLKLSSVTAADTAVYYCTREDSSNWRSRGQGTLVTVSSGTGGGGSGGGGSGGGGSEFDIQMTQSPSSLSASVGDRVTITCKASDHINNWLAWYQQKPGQAPKLLIYGATTLETGVPSRFSGSGSGTDYTLTISSLQPEDFATYYCQQSWNTPWTFGQGTKLEIKRLEGKPIPNPLLGLDSTGSGDKQLDADVSPKPTIFLPSIAETKLQKAGTYLCLLEKFFPDVIKIHWQEKKSNTILGSQEGNTMKTNDTYMKFSWLTVPEKSLDKEHRCIVRHENNKNGVDQEIIFPPIKTDVITMDPKDNCSKDANDTLLLQLTNTSAYYMYLLLLLKSVVYFAIITCCLLRRTAFCCNGEKSRAKRSGSGATNFSLLKQAGDVEENPGPTSMDWIWRILFLVGAATGAHSGPMDPDLEIRAAFLRQRNTALRTEVAELEQEVQRLENEVSQYETRYGPLGGGKGSGGGGSGGGGSGGGGSFEQVQLQQPGAELVKPGASVKMSCKASGYAFSSYWINWMKQKPGQGLEWIGQIYPGDGDTNYNGKFKGRATLTADTSSSTAYMQLSSLTSEDSAVYFCARSITTVVGCAMDYWGQGTSVTVSSTREQKLISEEDGSGSQPHTKPSVFVMKNGTNVACLVKEFYPKDIRINLVSSKKITEFDPAIVISPSGKYNAVKLGKYEDSNSVTCSVQHDNKTVHSTDFEVKTDSTDHVKPKETENTKQPSKSCHKPKAIVHTEKVNMMSLTVLGLRMLFAKTVAVNFLLTAKLFFLRAKRSGSGVKQTLNFDLLKLAGDVESNPGPSRGHMTEYKPTVRLATRDDVPRAVRTLAAAFADYPATRHTVDPDRHIERVTELQELFLTRVGLDIGKVWVADDGAAVAVWTTPESVEAGAVFAEIGPRMAELSGSRLAAQQQMEGLLAPHRPKEPAWFLATVGVSPDHQGKGLGSAVVLPGVEAAERAGVPAFLETSAPRNLPFYERLGFTVTADVEVPEGPRTWCMTRKPGA

SEQ ID NO: 15117 - protein, 837 aa, Artificial Sequence
  Synthetic Polypeptide
MALPVTALLLPLALLLHAARPQLQLQESGPGLVKPSETLSLTCTVSGDSISSGDYYWGWIRQPPGKGLEWIGHIYYSGVTYYNPSLKSRVTISVDTSRNQFSLKLSSVTAADTAVYYCTREDSSNWRSRGQGTLVTVSSGTGGGGSGGGGSGGGGSEFDIQMTQSPSSLSASVGDRVTITCKASDHINNWLAWYQQKPGQAPKLLIYGATTLETGVPSRFSGSGSGTDYTLTISSLQPEDFATYYCQQSWNTPWTFGQGTKLEIKRLESQPHTKPSVFVMKNGTNVACLVKEFYPKDIRINLVSSKKITEFDPAIVISPSGKYNAVKLGKYEDSNSVTCSVQHDNKTVHSTDFEVKTDSTDHVKPKETENTKQPSKSCHKPKAIVHTEKVNMMSLTVLGLRMLFAKTVAVNFLLTAKLFFLRAKRSGSGATNFSLLKQAGDVEENPGPTSMDWIWRILFLVGAATGAHSGPMDPDLEIRAAFLRQRNTALRTEVAELEQEVQRLENEVSQYETRYGPLGGGKGSGGGGSGGGGSGGGGSFEQVQLQQPGAELVKPGASVKMSCKASGYAFSSYWINWMKQKPGQGLEWIGQIYPGDGDTNYNGKFKGRATLTADTSSSTAYMQLSSLTSEDSAVYFCARSITTVVGCAMDYWGQGTSVTVSSTRDKQLDADVSPKPTIFLPSIAETKLQKAGTYLCLLEKFFPDVIKIHWQEKKSNTILGSQEGNTMKTNDTYMKFSWLTVPEKSLDKEHRCIVRHENNKNGVDQEIIFPPIKTDVITMDPKDNCSKDANDTLLLQLTNTSAYYMYLLLLLKSVVYFAIITCCLLRRTAFCCNGEKS

SEQ ID NO: 15118 - protein, 1239 aa, Artificial Sequence
  Synthetic Polypeptide
MALPVTALLLPLALLLHAARPQLQLQESGPGLVKPSETLSLTCTVSGDSISSGDYYWGWIRQPPGKGLEWIGHIYYSGVTYYNPSLKSRVTISVDTSRNQFSLKLSSVTAADTAVYYCTREDSSNWRSRGQGTLVTVSSGTGGGGSGGGGSGGGGSEFDIQMTQSPSSLSASVGDRVTITCKASDHINNWLAWYQQKPGQAPKLLIYGATTLETGVPSRFSGSGSGTDYTLTISSLQPEDFATYYCQQSWNTPWTFGQGTKLEIKRGQPKANPTVTLFPPSSEELQANKATLVCLISDFYPGAVTVAWKADGSPVKAGVETTKPSKQSNNKYAASSYLSLTPEQWKSHRSYSCQVTHEGSTVEKTVAPTECSGSQSFGLLDPKLCYLLDGILFIYGVILTALFLRVKFSRSADAPAYQQGQNQLYNELNLGRREEYDVLDKRRGRDPEMGGKPQRRKNPQEGLYNELQKDKMAEAYSEIGMKGERRRGKGHDGLYQGLSTATKDTYDALHMQALPPRRAKRSGSGATNFSLLKQAGDVEENPGPTSMDWIWRILFLVGAATGAHSGPMDPDLEIRAAFLRQRNTALRTEVAELEQEVQRLENEVSQYETRYGPLGGGKGSGGGGSGGGGSGGGGSFEQVQLQQPGAELVKPGASVKMSCKASGYAFSSYWINWMKQKPGQGLEWIGQIYPGDGDTNYNGKFKGRATLTADTSSSTAYMQLSSLTSEDSAVYFCARSITTVVGCAMDYWGQGTSVTVSSASTKGPSVFPLAPSSKSTSGGTAALGCLVKDYFPEPVTVSWNSGALTSGVHTFPAVLQSSGLYSLSSVVTVPSSSLGTQTYICNVNHKPSNTKVDKRVEPKSCGTQSFGLLDPKLCYLLDGILFIYGVILTALFLRVKFSRSADAPAYQQGQNQLYNELNLGRREEYDVLDKRRGRDPEMGGKPQRRKNPQEGLYNELQKDKMAEAYSEIGMKGERRRGKGHDGLYQGLSTATKDTYDALHMQALPPRRAKRSGSGVKQTLNFDLLKLAGDVESNPGPSRGHMTEYKPTVRLATRDDVPRAVRTLAAAFADYPATRHTVDPDRHIERVTELQELFLTRVGLDIGKVWVADDGAAVAVWTTPESVEAGAVFAEIGPRMAELSGSRLAAQQQMEGLLAPHRPKEPAWFLATVGVSPDHQGKGLGSAVVLPGVEAAERAGVPAFLETSAPRNLPFYERLGFTVTADVEVPEGPRTWCMTRKPGA

SEQ ID NO: 15119 - protein, 1025 aa, Artificial Sequence
  Synthetic Polypeptide
MALPVTALLLPLALLLHAARPQLQLQESGPGLVKPSETLSLTCTVSGDSISSGDYYWGWIRQPPGKGLEWIGHIYYSGVTYYNPSLKSRVTISVDTSRNQFSLKLSSVTAADTAVYYCTREDSSNWRSRGQGTLVTVSSGTGGGGSGGGGSGGGGSEFDIQMTQSPSSLSASVGDRVTITCKASDHINNWLAWYQQKPGQAPKLLIYGATTLETGVPSRFSGSGSGTDYTLTISSLQPEDFATYYCQQSWNTPWTFGQGTKLEIKRLEDLKNVFPPEVAVFEPSEAEISHTQKATLVCLATGFYPDHVELSWWVNGKEVHSGVSTDPQPLKEQPALNDSRYCLSSRLRVSATFWQNPRNHFRCQVQFYGLSENDEWTQDRAKPVTQIVSAEAWGRADCGSQSFGLLDPKLCYLLDGILFIYGVILTALFLRVKFSRSADAPAYQQGQNQLYNELNLGRREEYDVLDKRRGRDPEMGGKPQRRKNPQEGLYNELQKDKMAEAYSEIGMKGERRRGKGHDGLYQGLSTATKDTYDALHMQALPPRRAKRSGSGATNFSLLKQAGDVEENPGPTSMDWIWRILFLVGAATGAHSGPMDPDLEIRAAFLRQRNTALRTEVAELEQEVQRLENEVSQYETRYGPLGGGKGSGGGGSGGGGSGGGGSFEQVQLQQPGAELVKPGASVKMSCKASGYAFSSYWINWMKQKPGQGLEWIGQIYPGDGDTNYNGKFKGRATLTADTSSSTAYMQLSSLTSEDSAVYFCARSITTVVGCAMDYWGQGTSVTVSSTRIQNPDPAVYQLRDSKSSDKSVCLFTDFDSQTNVSQSKDSDVYITDKTVLDMRSMDFKSNSAVAWSNKSDFACANAFNNSIIPEDTFFPSPESSCGTQSFGLLDPKLCYLLDGILFIYGVILTALFLRVKFSRSADAPAYQQGQNQLYNELNLGRREEYDVLDKRRGRDPEMGGKPQRRKNPQEGLYNELQKDKMAEAYSEIGMKGERRRGKGHDGLYQGLSTATKDTYDALHMQALPPR

SEQ ID NO: 15120 - protein, 1025 aa, Artificial Sequence
  Synthetic Polypeptide
MALPVTALLLPLALLLHAARPQLQLQESGPGLVKPSETLSLTCTVSGDSISSGDYYWGWIRQPPGKGLEWIGHIYYSGVTYYNPSLKSRVTISVDTSRNQFSLKLSSVTAADTAVYYCTREDSSNWRSRGQGTLVTVSSGTGGGGSGGGGSGGGGSEFDIQMTQSPSSLSASVGDRVTITCKASDHINNWLAWYQQKPGQAPKLLIYGATTLETGVPSRFSGSGSGTDYTLTISSLQPEDFATYYCQQSWNTPWTFGQGTKLEIKRLEDLKNVFPPEVAVFEPSKAEIAHTQKATLVCLATGFYPDHVELSWWVNGKEVHSGVCTDPQPLKEQPALNDSRYCLSSRLRVSATFWQNPRNHFRCQVQFYGLSENDEWTQDRAKPVTQIVSAEAWGRADCGSQSFGLLDPKLCYLLDGILFIYGVILTALFLRVKFSRSADAPAYQQGQNQLYNELNLGRREEYDVLDKRRGRDPEMGGKPQRRKNPQEGLYNELQKDKMAEAYSEIGMKGERRRGKGHDGLYQGLSTATKDTYDALHMQALPPRRAKRSGSGATNFSLLKQAGDVEENPGPTSMDWIWRILFLVGAATGAHSGPMDPDLEIRAAFLRQRNTALRTEVAELEQEVQRLENEVSQYETRYGPLGGGKGSGGGGSGGGGSGGGGSFEQVQLQQPGAELVKPGASVKMSCKASGYAFSSYWINWMKQKPGQGLEWIGQIYPGDGDTNYNGKFKGRATLTADTSSSTAYMQLSSLTSEDSAVYFCARSITTVVGCAMDYWGQGTSVTVSSTRIQNPDPAVYQLRDSKSSDKSVCLFTDFDSQTNVSQSKDSDVYITDKCVLDMRSMDFKSNSAVAWSNKSDFACANAFNNSIIPEDTFFPSSDVPCGTQSFGLLDPKLCYLLDGILFIYGVILTALFLRVKFSRSADAPAYQQGQNQLYNELNLGRREEYDVLDKRRGRDPEMGGKPQRRKNPQEGLYNELQKDKMAEAYSEIGMKGERRRGKGHDGLYQGLSTATKDTYDALHMQALPPR

SEQ ID NO: 15121 - protein, 1096 aa, Artificial Sequence
  Synthetic Polypeptide
MALPVTALLLPLALLLHAARPQLQLQESGPGLVKPSETLSLTCTVSGDSISSGDYYWGWIRQPPGKGLEWIGHIYYSGVTYYNPSLKSRVTISVDTSRNQFSLKLSSVTAADTAVYYCTREDSSNWRSRGQGTLVTVSSGTGGGGSGGGGSGGGGSEFDIQMTQSPSSLSASVGDRVTITCKASDHINNWLAWYQQKPGQAPKLLIYGATTLETGVPSRFSGSGSGTDYTLTISSLQPEDFATYYCQQSWNTPWTFGQGTKLEIKRLEGKPIPNPLLGLDSTGSGEDLKNVFPPEVAVFEPSEAEISHTQKATLVCLATGFYPDHVELSWWVNGKEVHSGVSTDPQPLKEQPALNDSRYCLSSRLRVSATFWQNPRNHFRCQVQFYGLSENDEWTQDRAKPVTQIVSAEAWGRADCGSQSFGLLDPKLCYLLDGILFIYGVILTALFLRVKFSRSADAPAYQQGQNQLYNELNLGRREEYDVLDKRRGRDPEMGGKPQRRKNPQEGLYNELQKDKMAEAYSEIGMKGERRRGKGHDGLYQGLSTATKDTYDALHMQALPPRRAKRSGSGATNFSLLKQAGDVEENPGPTSMDWIWRILFLVGAATGAHSGPMDPDLEIRAAFLRQRNTALRTEVAELEQEVQRLENEVSQYETRYGPLGGGKGSGGGGSGGGGSGGGGSFEQVQLQQPGAELVKPGASVKMSCKASGYAFSSYWINWMKQKPGQGLEWIGQIYPGDGDTNYNGKFKGRATLTADTSSSTAYMQLSSLTSEDSAVYFCARSITTVVGCAMDYWGQGTSVTVSSTREQKLISEEDGSGIQNPDPAVYQLRDSKSSDKSVCLFTDFDSQTNVSQSKDSDVYITDKTVLDMRSMDFKSNSAVAWSNKSDFACANAFNNSIIPEDTFFPSPESSCGTQSFGLLDPKLCYLLDGILFIYGVILTALFLRSKRSRLLHSDYMNMTPRRPGPTRKHYQPYAPPRDFAAYRSRVKFSRSADAPAYQQGQNQLYNELNLGRREEYDVLDKRRGRDPEMGGKPQRRKNPQEGLYNELQKDKMAEAYSEIGMKGERRRGKGHDGLYQGLSTATKDTYDALHMQALPPR

SEQ ID NO: 15122 - protein, 1137 aa, Artificial Sequence
  Synthetic Polypeptide
MALPVTALLLPLALLLHAARPQLQLQESGPGLVKPSETLSLTCTVSGDSISSGDYYWGWIRQPPGKGLEWIGHIYYSGVTYYNPSLKSRVTISVDTSRNQFSLKLSSVTAADTAVYYCTREDSSNWRSRGQGTLVTVSSGTGGGGSGGGGSGGGGSEFDIQMTQSPSSLSASVGDRVTITCKASDHINNWLAWYQQKPGQAPKLLIYGATTLETGVPSRFSGSGSGTDYTLTISSLQPEDFATYYCQQSWNTPWTFGQGTKLEIKRLEGKPIPNPLLGLDSTGSGEDLKNVFPPEVAVFEPSEAEISHTQKATLVCLATGFYPDHVELSWWVNGKEVHSGVSTDPQPLKEQPALNDSRYCLSSRLRVSATFWQNPRNHFRCQVQFYGLSENDEWTQDRAKPVTQIVSAEAWGRADCGSQSFGLLDPKLCYLLDGILFIYGVILTALFLRSKRSRLLHSDYMNMTPRRPGPTRKHYQPYAPPRDFAAYRSRVKFSRSADAPAYQQGQNQLYNELNLGRREEYDVLDKRRGRDPEMGGKPQRRKNPQEGLYNELQKDKMAEAYSEIGMKGERRRGKGHDGLYQGLSTATKDTYDALHMQALPPRRAKRSGSGATNFSLLKQAGDVEENPGPTSMDWIWRILFLVGAATGAHSGPMDPDLEIRAAFLRQRNTALRTEVAELEQEVQRLENEVSQYETRYGPLGGGKGSGGGGSGGGGSGGGGSFEQVQLQQPGAELVKPGASVKMSCKASGYAFSSYWINWMKQKPGQGLEWIGQIYPGDGDTNYNGKFKGRATLTADTSSSTAYMQLSSLTSEDSAVYFCARSITTVVGCAMDYWGQGTSVTVSSTREQKLISEEDGSGIQNPDPAVYQLRDSKSSDKSVCLFTDFDSQTNVSQSKDSDVYITDKTVLDMRSMDFKSNSAVAWSNKSDFACANAFNNSIIPEDTFFPSPESSCGTQSFGLLDPKLCYLLDGILFIYGVILTALFLRSKRSRLLHSDYMNMTPRRPGPTRKHYQPYAPPRDFAAYRSRVKFSRSADAPAYQQGQNQLYNELNLGRREEYDVLDKRRGRDPEMGGKPQRRKNPQEGLYNELQKDKMAEAYSEIGMKGERRRGKGHDGLYQGLSTATKDTYDALHMQALPPR

SEQ ID NO: 15123 - protein, 1098 aa, Artificial Sequence
  Synthetic Polypeptide
MALPVTALLLPLALLLHAARPQLQLQESGPGLVKPSETLSLTCTVSGDSISSGDYYWGWIRQPPGKGLEWIGHIYYSGVTYYNPSLKSRVTISVDTSRNQFSLKLSSVTAADTAVYYCTREDSSNWRSRGQGTLVTVSSGTGGGGSGGGGSGGGGSEFDIQMTQSPSSLSASVGDRVTITCKASDHINNWLAWYQQKPGQAPKLLIYGATTLETGVPSRFSGSGSGTDYTLTISSLQPEDFATYYCQQSWNTPWTFGQGTKLEIKRLEGKPIPNPLLGLDSTGSGEDLKNVFPPEVAVFEPSEAEISHTQKATLVCLATGFYPDHVELSWWVNGKEVHSGVSTDPQPLKEQPALNDSRYCLSSRLRVSATFWQNPRNHFRCQVQFYGLSENDEWTQDRAKPVTQIVSAEAWGRADCGSQSFGLLDPKLCYLLDGILFIYGVILTALFLRVKFSRSADAPAYQQGQNQLYNELNLGRREEYDVLDKRRGRDPEMGGKPQRRKNPQEGLYNELQKDKMAEAYSEIGMKGERRRGKGHDGLYQGLSTATKDTYDALHMQALPPRRAKRSGSGATNFSLLKQAGDVEENPGPTSMDWIWRILFLVGAATGAHSGPMDPDLEIRAAFLRQRNTALRTEVAELEQEVQRLENEVSQYETRYGPLGGGKGSGGGGSGGGGSGGGGSFEQVQLQQPGAELVKPGASVKMSCKASGYAFSSYWINWMKQKPGQGLEWIGQIYPGDGDTNYNGKFKGRATLTADTSSSTAYMQLSSLTSEDSAVYFCARSITTVVGCAMDYWGQGTSVTVSSTREQKLISEEDLGSGIQNPDPAVYQLRDSKSSDKSVCLFTDFDSQTNVSQSKDSDVYITDKTVLDMRSMDFKSNSAVAWSNKSDFACANAFNNSIIPEDTFFPSPESSCGTQSFGLLDPKLCYLLDGILFIYGVILTALFLKRGRKKLLYIFKQPFMRPVQTTQEEDGCSCRFPEEEEGGCELRVKFSRSADAPAYQQGQNQLYNELNLGRREEYDVLDKRRGRDPEMGGKPQRRKNPQEGLYNELQKDKMAEAYSEIGMKGERRRGKGHDGLYQGLSTATKDTYDALHMQALPPR

SEQ ID NO: 15124 - protein, 1140 aa, Artificial Sequence
  Synthetic Polypeptide
MALPVTALLLPLALLLHAARPQLQLQESGPGLVKPSETLSLTCTVSGDSISSGDYYWGWIRQPPGKGLEWIGHIYYSGVTYYNPSLKSRVTISVDTSRNQFSLKLSSVTAADTAVYYCTREDSSNWRSRGQGTLVTVSSGTGGGGSGGGGSGGGGSEFDIQMTQSPSSLSASVGDRVTITCKASDHINNWLAWYQQKPGQAPKLLIYGATTLETGVPSRFSGSGSGTDYTLTISSLQPEDFATYYCQQSWNTPWTFGQGTKLEIKRLEGKPIPNPLLGLDSTGSGEDLKNVFPPEVAVFEPSEAEISHTQKATLVCLATGFYPDHVELSWWVNGKEVHSGVSTDPQPLKEQPALNDSRYCLSSRLRVSATFWQNPRNHFRCQVQFYGLSENDEWTQDRAKPVTQIVSAEAWGRADCGSQSFGLLDPKLCYLLDGILFIYGVILTALFLKRGRKKLLYIFKQPFMRPVQTTQEEDGCSCRFPEEEEGGCELRVKFSRSADAPAYQQGQNQLYNELNLGRREEYDVLDKRRGRDPEMGGKPQRRKNPQEGLYNELQKDKMAEAYSEIGMKGERRRGKGHDGLYQGLSTATKDTYDALHMQALPPRRAKRSGSGATNFSLLKQAGDVEENPGPTSMDWIWRILFLVGAATGAHSGPMDPDLEIRAAFLRQRNTALRTEVAELEQEVQRLENEVSQYETRYGPLGGGKGSGGGGSGGGGSGGGGSFEQVQLQQPGAELVKPGASVKMSCKASGYAFSSYWINWMKQKPGQGLEWIGQIYPGDGDTNYNGKFKGRATLTADTSSSTAYMQLSSLTSEDSAVYFCARSITTVVGCAMDYWGQGTSVTVSSTREQKLISEEDLGSGIQNPDPAVYQLRDSKSSDKSVCLFTDFDSQTNVSQSKDSDVYITDKTVLDMRSMDFKSNSAVAWSNKSDFACANAFNNSIIPEDTFFPSPESSCGTQSFGLLDPKLCYLLDGILFIYGVILTALFLKRGRKKLLYIFKQPFMRPVQTTQEEDGCSCRFPEEEEGGCELRVKFSRSADAPAYQQGQNQLYNELNLGRREEYDVLDKRRGRDPEMGGKPQRRKNPQEGLYNELQKDKMAEAYSEIGMKGERRRGKGHDGLYQGLSTATKDTYDALHMQALPPR

SEQ ID NO: 15125 - protein, 1030 aa, Artificial Sequence
  Synthetic Polypeptide
MALPVTALLLPLALLLHAARPQLQLQESGPGLVKPSETLSLTCTVSGDSISSGDYYWGWIRQPPGKGLEWIGHIYYSGVTYYNPSLKSRVTISVDTSRNQFSLKLSSVTAADTAVYYCTREDSSNWRSRGQGTLVTVSSGTGGGGSGGGGSGGGGSEFDIQMTQSPSSLSASVGDRVTITCKASDHINNWLAWYQQKPGQAPKLLIYGATTLETGVPSRFSGSGSGTDYTLTISSLQPEDFATYYCQQSWNTPWTFGQGTKLEIKRLEQSFGLLDPKLCYLLDGILFIYGVILTALFLRVKFSRSADAPAYQQGQNQLYNELNLGRREEYDVLDKRRGRDPEMGGKPQRRKNPQEGLYNELQKDKMAEAYSEIGMKGERRRGKGHDGLYQGLSTATKDTYDALHMQALPPRRAKRSGSGATNFSLLKQAGDVEENPGPTSMDWIWRILFLVGAATGAHSGPMDPDLEIRAAFLRQRNTALRTEVAELEQEVQRLENEVSQYETRYGPLGGGKGSGGGGSGGGGSGGGGSFEQVQLQQPGAELVKPGASVKMSCKASGYAFSSYWINWMKQKPGQGLEWIGQIYPGDGDTNYNGKFKGRATLTADTSSSTAYMQLSSLTSEDSAVYFCARSITTVVGCAMDYWGQGTSVTVSSTRQSFGLLDPKLCYLLDGILFIYGVILTALFLRVKFSRSADAPAYQQGQNQLYNELNLGRREEYDVLDKRRGRDPEMGGKPQRRKNPQEGLYNELQKDKMAEAYSEIGMKGERRRGKGHDGLYQGLSTATKDTYDALHMQALPPRRAKRSGSGVKQTLNFDLLKLAGDVESNPGPSRGHMTEYKPTVRLATRDDVPRAVRTLAAAFADYPATRHTVDPDRHIERVTELQELFLTRVGLDIGKVWVADDGAAVAVWTTPESVEAGAVFAEIGPRMAELSGSRLAAQQQMEGLLAPHRPKEPAWFLATVGVSPDHQGKGLGSAVVLPGVEAAERAGVPAFLETSAPRNLPFYERLGFTVTADVEVPEGPRTWCMTRKPGA

SEQ ID NO: 15126 - protein, 855 aa, Artificial Sequence
  Synthetic Polypeptide
MALPVTALLLPLALLLHAARPQLQLQESGPGLVKPSETLSLTCTVSGDSISSGDYYWGWIRQPPGKGLEWIGHIYYSGVTYYNPSLKSRVTISVDTSRNQFSLKLSSVTAADTAVYYCTREDSSNWRSRGQGTLVTVSSGTGGGGSGGGGSGGGGSEFDIQMTQSPSSLSASVGDRVTITCKASDHINNWLAWYQQKPGQAPKLLIYGATTLETGVPSRFSGSGSGTDYTLTISSLQPEDFATYYCQQSWNTPWTFGQGTKLEIKRLEGQPKANPTVTLFPPSSEELQANKATLVCLISDFYPGAVTVAWKADGSPVKAGVETTKPSKQSNNKYAASSYLSLTPEQWKSHRSYSCQVTHEGSTVEKTVAPTECSPIKTDVITMDPKDNCSKDANDTLLLQLTNTSAYYMYLLLLLKSVVYFAIITCCLLRRTAFCCNGEKSRAKRSGSGATNFSLLKQAGDVEENPGPTSMDWIWRILFLVGAATGAHSGPMDPDLEIRAAFLRQRNTALRTEVAELEQEVQRLENEVSQYETRYGPLGGGKGSGGGGSGGGGSGGGGSFEQVQLQQPGAELVKPGASVKMSCKASGYAFSSYWINWMKQKPGQGLEWIGQIYPGDGDTNYNGKFKGRATLTADTSSSTAYMQLSSLTSEDSAVYFCARSITTVVGCAMDYWGQGTSVTVSSTRASTKGPSVFPLAPSSKSTSGGTAALGCLVKDYFPEPVTVSWNSGALTSGVHTFPAVLQSSGLYSLSSVVTVPSSSLGTQTYICNVNHKPSNTKVDKRVEPKSCEVKTDSTDHVKPKETENTKQPSKSCHKPKAIVHTEKVNMMSLTVLGLRMLFAKTVAVNFLLTAKLFFL

SEQ ID NO: 15127 - protein, 833 aa, Artificial Sequence
  Synthetic Polypeptide
MALPVTALLLPLALLLHAARPQLQLQESGPGLVKPSETLSLTCTVSGDSISSGDYYWGWIRQPPGKGLEWIGHIYYSGVTYYNPSLKSRVTISVDTSRNQFSLKLSSVTAADTAVYYCTREDSSNWRSRGQGTLVTVSSGTGGGGSGGGGSGGGGSEFDIQMTQSPSSLSASVGDRVTITCKASDHINNWLAWYQQKPGQAPKLLIYGATTLETGVPSRFSGSGSGTDYTLTISSLQPEDFATYYCQQSWNTPWTFGQGTKLEIKRLEGQPKANPTVTLFPPSSEELQANKATLVCLISDFYPGAVTVAWKADGSPVKAGVETTKPSKQSNNKYAASSYLSLTPEQWKSHRSYSCQVTHEGSTVEKTVAPTECSGRADCGITSASYHQGVLSATILYEILLGKATLYAVLVSALVLMAMVKRKDSRGRAKRSGSGATNFSLLKQAGDVEENPGPTSMDWIWRILFLVGAATGAHSGPMDPDLEIRAAFLRQRNTALRTEVAELEQEVQRLENEVSQYETRYGPLGGGKGSGGGGSGGGGSGGGGSFEQVQLQQPGAELVKPGASVKMSCKASGYAFSSYWINWMKQKPGQGLEWIGQIYPGDGDTNYNGKFKGRATLTADTSSSTAYMQLSSLTSEDSAVYFCARSITTVVGCAMDYWGQGTSVTVSSTRASTKGPSVFPLAPSSKSTSGGTAALGCLVKDYFPEPVTVSWNSGALTSGVHTFPAVLQSSGLYSLSSVVTVPSSSLGTQTYICNVNHKPSNTKVDKRVEPKSCIPEDTFFPSSDVPCDVKLVEKSFETDTNLNFQNLSVIGFRILLLKVAGFNLLMTLRLWSS

SEQ ID NO: 15128 - protein, 833 aa, Artificial Sequence
  Synthetic Polypeptide
MALPVTALLLPLALLLHAARPQLQLQESGPGLVKPSETLSLTCTVSGDSISSGDYYWGWIRQPPGKGLEWIGHIYYSGVTYYNPSLKSRVTISVDTSRNQFSLKLSSVTAADTAVYYCTREDSSNWRSRGQGTLVTVSSGTGGGGSGGGGSGGGGSEFDIQMTQSPSSLSASVGDRVTITCKASDHINNWLAWYQQKPGQAPKLLIYGATTLETGVPSRFSGSGSGTDYTLTISSLQPEDFATYYCQQSWNTPWTFGQGTKLEIKRLEGQPKANPTVTLFPPSSEELQANKATLVCLISDFYPGAVTVAWKADGSPVKAGVETTKPSKQSNNKYAASSYLSLTPEQWKSHRSYSCQVTHEGSTVEKTVAPTECSGRADCGFTSESYQQGVLSATILYEILLGKATLYAVLVSALVLMAMVKRKDSRGRAKRSGSGATNFSLLKQAGDVEENPGPTSMDWIWRILFLVGAATGAHSGPMDPDLEIRAAFLRQRNTALRTEVAELEQEVQRLENEVSQYETRYGPLGGGKGSGGGGSGGGGSGGGGSFEQVQLQQPGAELVKPGASVKMSCKASGYAFSSYWINWMKQKPGQGLEWIGQIYPGDGDTNYNGKFKGRATLTADTSSSTAYMQLSSLTSEDSAVYFCARSITTVVGCAMDYWGQGTSVTVSSTRASTKGPSVFPLAPSSKSTSGGTAALGCLVKDYFPEPVTVSWNSGALTSGVHTFPAVLQSSGLYSLSSVVTVPSSSLGTQTYICNVNHKPSNTKVDKRVEPKSCIPEDTFFPSPESSCDVKLVEKSFETDTNLNFQNLSVIGFRILLLKVAGFNLLMTLRLWSS

SEQ ID NO: 15129 - protein, 799 aa, Artificial Sequence
  Synthetic Polypeptide
MALPVTALLLPLALLLHAARPQLQLQESGPGLVKPSETLSLTCTVSGDSISSGDYYWGWIRQPPGKGLEWIGHIYYSGVTYYNPSLKSRVTISVDTSRNQFSLKLSSVTAADTAVYYCTREDSSNWRSRGQGTLVTVSSLEGQPKANPTVTLFPPSSEELQANKATLVCLISDFYPGAVTVAWKADGSPVKAGVETTKPSKQSNNKYAASSYLSLTPEQWKSHRSYSCQVTHEGSTVEKTVAPTECSGRADCGFTSESYQQGVLSATILYEILLGKATLYAVLVSALVLMAMVKRKDSRGRAKRSGSGATNFSLLKQAGDVEENPGPTSMDWIWRILFLVGAATGAHSGPMDPDLEIRAAFLRQRNTALRTEVAELEQEVQRLENEVSQYETRYGPLGGGKTRASTKGPSVFPLAPSSKSTSGGTAALGCLVKDYFPEPVTVSWNSGALTSGVHTFPAVLQSSGLYSLSSVVTVPSSSLGTQTYICNVNHKPSNTKVDKRVEPKSCIPEDTFFPSPESSCDVKLVEKSFETDTNLNFQNLSVIGFRILLLKVAGFNLLMTLRLWSSRAKRSGSGVKQTLNFDLLKLAGDVESNPGPSRGHMTEYKPTVRLATRDDVPRAVRTLAAAFADYPATRHTVDPDRHIERVTELQELFLTRVGLDIGKVWVADDGAAVAVWTTPESVEAGAVFAEIGPRMAELSGSRLAAQQQMEGLLAPHRPKEPAWFLATVGVSPDHQGKGLGSAVVLPGVEAAERAGVPAFLETSAPRNLPFYERLGFTVTADVEVPEGPRTWCMTRKPGA

SEQ ID NO: 15130 - protein, 566 aa, Artificial Sequence
  Synthetic Polypeptide
MALPVTALLLPLALLLHAARPQLQLQESGPGLVKPSETLSLTCTVSGDSISSGDYYWGWIRQPPGKGLEWIGHIYYSGVTYYNPSLKSRVTISVDTSRNQFSLKLSSVTAADTAVYYCTREDSSNWRSRGQGTLVTVSSLEGQPKANPTVTLFPPSSEELQANKATLVCLISDFYPGAVTVAWKADGSPVKAGVETTKPSKQSNNKYAASSYLSLTPEQWKSHRSYSCQVTHEGSTVEKTVAPTECSGRADCGFTSESYQQGVLSATILYEILLGKATLYAVLVSALVLMAMVKRKDSRGRAKRSGSGATNFSLLKQAGDVEENPGPTSMDWIWRILFLVGAATGAHSGPMDPDLEIRAAFLRQRNTALRTEVAELEQEVQRLENEVSQYETRYGPLGGGKTRASTKGPSVFPLAPSSKSTSGGTAALGCLVKDYFPEPVTVSWNSGALTSGVHTFPAVLQSSGLYSLSSVVTVPSSSLGTQTYICNVNHKPSNTKVDKRVEPKSCIPEDTFFPSPESSCDVKLVEKSFETDTNLNFQNLSVIGFRILLLKVAGFNLLMTLRLWSS

SEQ ID NO: 15131 - protein, 594 aa, Artificial Sequence
  Synthetic Polypeptide
MALPVTALLLPLALLLHAARPQLQLQESGPGLVKPSETLSLTCTVSGDSISSGDYYWGWIRQPPGKGLEWIGHIYYSGVTYYNPSLKSRVTISVDTSRNQFSLKLSSVTAADTAVYYCTREDSSNWRSRGQGTLVTVSSLEGSGRADCGFTSESYQQGVLSATILYEILLGKATLYAVLVSALVLMAMVKRKDSRGRAKRSGSGATNFSLLKQAGDVEENPGPTSMDWIWRILFLVGAATGAHSGPMDPDLEIRAAFLRQRNTALRTEVAELEQEVQRLENEVSQYETRYGPLGGGKTRGSIPEDTFFPSPESSCDVKLVEKSFETDTNLNFQNLSVIGFRILLLKVAGFNLLMTLRLWSSRAKRSGSGVKQTLNFDLLKLAGDVESNPGPSRGHMTEYKPTVRLATRDDVPRAVRTLAAAFADYPATRHTVDPDRHIERVTELQELFLTRVGLDIGKVWVADDGAAVAVWTTPESVEAGAVFAEIGPRMAELSGSRLAAQQQMEGLLAPHRPKEPAWFLATVGVSPDHQGKGLGSAVVLPGVEAAERAGVPAFLETSAPRNLPFYERLGFTVTADVEVPEGPRTWCMTRKPGA

SEQ ID NO: 15132 - protein, 361 aa, Artificial Sequence
  Synthetic Polypeptide
MALPVTALLLPLALLLHAARPQLQLQESGPGLVKPSETLSLTCTVSGDSISSGDYYWGWIRQPPGKGLEWIGHIYYSGVTYYNPSLKSRVTISVDTSRNQFSLKLSSVTAADTAVYYCTREDSSNWRSRGQGTLVTVSSLEGSGRADCGFTSESYQQGVLSATILYEILLGKATLYAVLVSALVLMAMVKRKDSRGRAKRSGSGATNFSLLKQAGDVEENPGPTSMDWIWRILFLVGAATGAHSGPMDPDLEIRAAFLRQRNTALRTEVAELEQEVQRLENEVSQYETRYGPLGGGKTRGSIPEDTFFPSPESSCDVKLVEKSFETDTNLNFQNLSVIGFRILLLKVAGFNLLMTLRLWSS

SEQ ID NO: 15133 - protein, 603 aa, Artificial Sequence
  Synthetic Polypeptide
MALPVTALLLPLALLLHAARPQLQLQESGPGLVKPSETLSLTCTVSGDSISSGDYYWGWIRQPPGKGLEWIGHIYYSGVTYYNPSLKSRVTISVDTSRNQFSLKLSSVTAADTAVYYCTREDSSNWRSRGQGTLVTVSSLEDKTHTCPPCPAGRADCGFTSESYQQGVLSATILYEILLGKATLYAVLVSALVLMAMVKRKDSRGRAKRSGSGATNFSLLKQAGDVEENPGPTSMDWIWRILFLVGAATGAHSGPMDPDLEIRAAFLRQRNTALRTEVAELEQEVQRLENEVSQYETRYGPLGGGKTRGSIPEDTFFPSPESSCDVKLVEKSFETDTNLNFQNLSVIGFRILLLKVAGFNLLMTLRLWSSRAKRSGSGVKQTLNFDLLKLAGDVESNPGPSRGHMTEYKPTVRLATRDDVPRAVRTLAAAFADYPATRHTVDPDRHIERVTELQELFLTRVGLDIGKVWVADDGAAVAVWTTPESVEAGAVFAEIGPRMAELSGSRLAAQQQMEGLLAPHRPKEPAWFLATVGVSPDHQGKGLGSAVVLPGVEAAERAGVPAFLETSAPRNLPFYERLGFTVTADVEVPEGPRTWCMTRKPGA

SEQ ID NO: 15134 - protein, 603 aa, Artificial Sequence
  Synthetic Polypeptide
MALPVTALLLPLALLLHAARPQLQLQESGPGLVKPSETLSLTCTVSGDSISSGDYYWGWIRQPPGKGLEWIGHIYYSGVTYYNPSLKSRVTISVDTSRNQFSLKLSSVTAADTAVYYCTREDSSNWRSRGQGTLVTVSSLEGSGRADCGFTSESYQQGVLSATILYEILLGKATLYAVLVSALVLMAMVKRKDSRGRAKRSGSGATNFSLLKQAGDVEENPGPTSMDWIWRILFLVGAATGAHSGPMDPDLEIRAAFLRQRNTALRTEVAELEQEVQRLENEVSQYETRYGPLGGGKTRDKTHTCPPCPAIPEDTFFPSPESSCDVKLVEKSFETDTNLNFQNLSVIGFRILLLKVAGFNLLMTLRLWSSRAKRSGSGVKQTLNFDLLKLAGDVESNPGPSRGHMTEYKPTVRLATRDDVPRAVRTLAAAFADYPATRHTVDPDRHIERVTELQELFLTRVGLDIGKVWVADDGAAVAVWTTPESVEAGAVFAEIGPRMAELSGSRLAAQQQMEGLLAPHRPKEPAWFLATVGVSPDHQGKGLGSAVVLPGVEAAERAGVPAFLETSAPRNLPFYERLGFTVTADVEVPEGPRTWCMTRKPGA

SEQ ID NO: 15135 - protein, 612 aa, Artificial Sequence
  Synthetic Polypeptide
MALPVTALLLPLALLLHAARPQLQLQESGPGLVKPSETLSLTCTVSGDSISSGDYYWGWIRQPPGKGLEWIGHIYYSGVTYYNPSLKSRVTISVDTSRNQFSLKLSSVTAADTAVYYCTREDSSNWRSRGQGTLVTVSSLEDKTHTCPPCPAGRADCGFTSESYQQGVLSATILYEILLGKATLYAVLVSALVLMAMVKRKDSRGRAKRSGSGATNFSLLKQAGDVEENPGPTSMDWIWRILFLVGAATGAHSGPMDPDLEIRAAFLRQRNTALRTEVAELEQEVQRLENEVSQYETRYGPLGGGKTRDKTHTCPPCPAIPEDTFFPSPESSCDVKLVEKSFETDTNLNFQNLSVIGFRILLLKVAGFNLLMTLRLWSSRAKRSGSGVKQTLNFDLLKLAGDVESNPGPSRGHMTEYKPTVRLATRDDVPRAVRTLAAAFADYPATRHTVDPDRHIERVTELQELFLTRVGLDIGKVWVADDGAAVAVWTTPESVEAGAVFAEIGPRMAELSGSRLAAQQQMEGLLAPHRPKEPAWFLATVGVSPDHQGKGLGSAVVLPGVEAAERAGVPAFLETSAPRNLPFYERLGFTVTADVEVPEGPRTWCMTRKPGA

SEQ ID NO: 15136 - protein, 379 aa, Artificial Sequence
  Synthetic Polypeptide
MALPVTALLLPLALLLHAARPQLQLQESGPGLVKPSETLSLTCTVSGDSISSGDYYWGWIRQPPGKGLEWIGHIYYSGVTYYNPSLKSRVTISVDTSRNQFSLKLSSVTAADTAVYYCTREDSSNWRSRGQGTLVTVSSLEDKTHTCPPCPAGRADCGFTSESYQQGVLSATILYEILLGKATLYAVLVSALVLMAMVKRKDSRGRAKRSGSGATNFSLLKQAGDVEENPGPTSMDWIWRILFLVGAATGAHSGPMDPDLEIRAAFLRQRNTALRTEVAELEQEVQRLENEVSQYETRYGPLGGGKTRDKTHTCPPCPAIPEDTFFPSPESSCDVKLVEKSFETDTNLNFQNLSVIGFRILLLKVAGFNLLMTLRLWSS

SEQ ID NO: 15137 - protein, 370 aa, Artificial Sequence
  Synthetic Polypeptide
MALPVTALLLPLALLLHAARPQLQLQESGPGLVKPSETLSLTCTVSGDSISSGDYYWGWIRQPPGKGLEWIGHIYYSGVTYYNPSLKSRVTISVDTSRNQFSLKLSSVTAADTAVYYCTREDSSNWRSRGQGTLVTVSSLEGSGRADCGFTSESYQQGVLSATILYEILLGKATLYAVLVSALVLMAMVKRKDSRGRAKRSGSGATNFSLLKQAGDVEENPGPTSMDWIWRILFLVGAATGAHSGPMDPDLEIRAAFLRQRNTALRTEVAELEQEVQRLENEVSQYETRYGPLGGGKTRDKTHTCPPCPAIPEDTFFPSPESSCDVKLVEKSFETDTNLNFQNLSVIGFRILLLKVAGFNLLMTLRLWSS

SEQ ID NO: 15138 - protein, 821 aa, Artificial Sequence
  Synthetic Polypeptide
MALPVTALLLPLALLLHAARPQLQLQESGPGLVKPSETLSLTCTVSGDSISSGDYYWGWIRQPPGKGLEWIGHIYYSGVTYYNPSLKSRVTISVDTSRNQFSLKLSSVTAADTAVYYCTREDSSNWRSRGQGTLVTVSSLEGQPKANPTVTLFPPSSEELQANKATLVCLISDFYPGAVTVAWKADGSPVKAGVETTKPSKQSNNKYAASSYLSLTPEQWKSHRSYSCQVTHEGSTVEKTVAPTECSPIKTDVITMDPKDNCSKDANDTLLLQLTNTSAYYMYLLLLLKSVVYFAIITCCLLRRTAFCCNGEKSRAKRSGSGATNFSLLKQAGDVEENPGPTSMDWIWRILFLVGAATGAHSGPMDPDLEIRAAFLRQRNTALRTEVAELEQEVQRLENEVSQYETRYGPLGGGKTRASTKGPSVFPLAPSSKSTSGGTAALGCLVKDYFPEPVTVSWNSGALTSGVHTFPAVLQSSGLYSLSSVVTVPSSSLGTQTYICNVNHKPSNTKVDKRVEPKSCEVKTDSTDHVKPKETENTKQPSKSCHKPKAIVHTEKVNMMSLTVLGLRMLFAKTVAVNFLLTAKLFFLRAKRSGSGVKQTLNFDLLKLAGDVESNPGPSRGHMTEYKPTVRLATRDDVPRAVRTLAAAFADYPATRHTVDPDRHIERVTELQELFLTRVGLDIGKVWVADDGAAVAVWTTPESVEAGAVFAEIGPRMAELSGSRLAAQQQMEGLLAPHRPKEPAWFLATVGVSPDHQGKGLGSAVVLPGVEAAERAGVPAFLETSAPRNLPFYERLGFTVTADVEVPEGPRTWCMTRKPGA

SEQ ID NO: 15139 - protein, 588 aa, Artificial Sequence
  Synthetic Polypeptide
MALPVTALLLPLALLLHAARPQLQLQESGPGLVKPSETLSLTCTVSGDSISSGDYYWGWIRQPPGKGLEWIGHIYYSGVTYYNPSLKSRVTISVDTSRNQFSLKLSSVTAADTAVYYCTREDSSNWRSRGQGTLVTVSSLEGQPKANPTVTLFPPSSEELQANKATLVCLISDFYPGAVTVAWKADGSPVKAGVETTKPSKQSNNKYAASSYLSLTPEQWKSHRSYSCQVTHEGSTVEKTVAPTECSPIKTDVITMDPKDNCSKDANDTLLLQLTNTSAYYMYLLLLLKSVVYFAIITCCLLRRTAFCCNGEKSRAKRSGSGATNFSLLKQAGDVEENPGPTSMDWIWRILFLVGAATGAHSGPMDPDLEIRAAFLRQRNTALRTEVAELEQEVQRLENEVSQYETRYGPLGGGKTRASTKGPSVFPLAPSSKSTSGGTAALGCLVKDYFPEPVTVSWNSGALTSGVHTFPAVLQSSGLYSLSSVVTVPSSSLGTQTYICNVNHKPSNTKVDKRVEPKSCEVKTDSTDHVKPKETENTKQPSKSCHKPKAIVHTEKVNMMSLTVLGLRMLFAKTVAVNFLLTAKLFFL

SEQ ID NO: 15140 - protein, 616 aa, Artificial Sequence
  Synthetic Polypeptide
MALPVTALLLPLALLLHAARPQLQLQESGPGLVKPSETLSLTCTVSGDSISSGDYYWGWIRQPPGKGLEWIGHIYYSGVTYYNPSLKSRVTISVDTSRNQFSLKLSSVTAADTAVYYCTREDSSNWRSRGQGTLVTVSSLEGSPIKTDVITMDPKDNCSKDANDTLLLQLTNTSAYYMYLLLLLKSVVYFAIITCCLLRRTAFCCNGEKSRAKRSGSGATNFSLLKQAGDVEENPGPTSMDWIWRILFLVGAATGAHSGPMDPDLEIRAAFLRQRNTALRTEVAELEQEVQRLENEVSQYETRYGPLGGGKTRGSEVKTDSTDHVKPKETENTKQPSKSCHKPKAIVHTEKVNMMSLTVLGLRMLFAKTVAVNFLLTAKLFFLRAKRSGSGVKQTLNFDLLKLAGDVESNPGPSRGHMTEYKPTVRLATRDDVPRAVRTLAAAFADYPATRHTVDPDRHIERVTELQELFLTRVGLDIGKVWVADDGAAVAVWTTPESVEAGAVFAEIGPRMAELSGSRLAAQQQMEGLLAPHRPKEPAWFLATVGVSPDHQGKGLGSAVVLPGVEAAERAGVPAFLETSAPRNLPFYERLGFTVTADVEVPEGPRTWCMTRKPGA

SEQ ID NO: 15141 - protein, 383 aa, Artificial Sequence
  Synthetic Polypeptide
MALPVTALLLPLALLLHAARPQLQLQESGPGLVKPSETLSLTCTVSGDSISSGDYYWGWIRQPPGKGLEWIGHIYYSGVTYYNPSLKSRVTISVDTSRNQFSLKLSSVTAADTAVYYCTREDSSNWRSRGQGTLVTVSSLEGSPIKTDVITMDPKDNCSKDANDTLLLQLTNTSAYYMYLLLLLKSVVYFAIITCCLLRRTAFCCNGEKSRAKRSGSGATNFSLLKQAGDVEENPGPTSMDWIWRILFLVGAATGAHSGPMDPDLEIRAAFLRQRNTALRTEVAELEQEVQRLENEVSQYETRYGPLGGGKTRGSEVKTDSTDHVKPKETENTKQPSKSCHKPKAIVHTEKVNMMSLTVLGLRMLFAKTVAVNFLLTAKLFFL

SEQ ID NO: 15142 - protein, 625 aa, Artificial Sequence
  Synthetic Polypeptide
MALPVTALLLPLALLLHAARPQLQLQESGPGLVKPSETLSLTCTVSGDSISSGDYYWGWIRQPPGKGLEWIGHIYYSGVTYYNPSLKSRVTISVDTSRNQFSLKLSSVTAADTAVYYCTREDSSNWRSRGQGTLVTVSSLEDKTHTCPPCPAPIKTDVITMDPKDNCSKDANDTLLLQLTNTSAYYMYLLLLLKSVVYFAIITCCLLRRTAFCCNGEKSRAKRSGSGATNFSLLKQAGDVEENPGPTSMDWIWRILFLVGAATGAHSGPMDPDLEIRAAFLRQRNTALRTEVAELEQEVQRLENEVSQYETRYGPLGGGKTRGSEVKTDSTDHVKPKETENTKQPSKSCHKPKAIVHTEKVNMMSLTVLGLRMLFAKTVAVNFLLTAKLFFLRAKRSGSGVKQTLNFDLLKLAGDVESNPGPSRGHMTEYKPTVRLATRDDVPRAVRTLAAAFADYPATRHTVDPDRHIERVTELQELFLTRVGLDIGKVWVADDGAAVAVWTTPESVEAGAVFAEIGPRMAELSGSRLAAQQQMEGLLAPHRPKEPAWFLATVGVSPDHQGKGLGSAVVLPGVEAAERAGVPAFLETSAPRNLPFYERLGFTVTADVEVPEGPRTWCMTRKPGA

SEQ ID NO: 15143 - protein, 625 aa, Artificial Sequence
  Synthetic Polypeptide
MALPVTALLLPLALLLHAARPQLQLQESGPGLVKPSETLSLTCTVSGDSISSGDYYWGWIRQPPGKGLEWIGHIYYSGVTYYNPSLKSRVTISVDTSRNQFSLKLSSVTAADTAVYYCTREDSSNWRSRGQGTLVTVSSLEGSPIKTDVITMDPKDNCSKDANDTLLLQLTNTSAYYMYLLLLLKSVVYFAIITCCLLRRTAFCCNGEKSRAKRSGSGATNFSLLKQAGDVEENPGPTSMDWIWRILFLVGAATGAHSGPMDPDLEIRAAFLRQRNTALRTEVAELEQEVQRLENEVSQYETRYGPLGGGKTRDKTHTCPPCPAEVKTDSTDHVKPKETENTKQPSKSCHKPKAIVHTEKVNMMSLTVLGLRMLFAKTVAVNFLLTAKLFFLRAKRSGSGVKQTLNFDLLKLAGDVESNPGPSRGHMTEYKPTVRLATRDDVPRAVRTLAAAFADYPATRHTVDPDRHIERVTELQELFLTRVGLDIGKVWVADDGAAVAVWTTPESVEAGAVFAEIGPRMAELSGSRLAAQQQMEGLLAPHRPKEPAWFLATVGVSPDHQGKGLGSAVVLPGVEAAERAGVPAFLETSAPRNLPFYERLGFTVTADVEVPEGPRTWCMTRKPGA

SEQ ID NO: 15144 - protein, 634 aa, Artificial Sequence
  Synthetic Polypeptide
MALPVTALLLPLALLLHAARPQLQLQESGPGLVKPSETLSLTCTVSGDSISSGDYYWGWIRQPPGKGLEWIGHIYYSGVTYYNPSLKSRVTISVDTSRNQFSLKLSSVTAADTAVYYCTREDSSNWRSRGQGTLVTVSSLEDKTHTCPPCPAPIKTDVITMDPKDNCSKDANDTLLLQLTNTSAYYMYLLLLLKSVVYFAIITCCLLRRTAFCCNGEKSRAKRSGSGATNFSLLKQAGDVEENPGPTSMDWIWRILFLVGAATGAHSGPMDPDLEIRAAFLRQRNTALRTEVAELEQEVQRLENEVSQYETRYGPLGGGKTRDKTHTCPPCPAEVKTDSTDHVKPKETENTKQPSKSCHKPKAIVHTEKVNMMSLTVLGLRMLFAKTVAVNFLLTAKLFFLRAKRSGSGVKQTLNFDLLKLAGDVESNPGPSRGHMTEYKPTVRLATRDDVPRAVRTLAAAFADYPATRHTVDPDRHIERVTELQELFLTRVGLDIGKVWVADDGAAVAVWTTPESVEAGAVFAEIGPRMAELSGSRLAAQQQMEGLLAPHRPKEPAWFLATVGVSPDHQGKGLGSAVVLPGVEAAERAGVPAFLETSAPRNLPFYERLGFTVTADVEVPEGPRTWCMTRKPGA

SEQ ID NO: 15145 - protein, 401 aa, Artificial Sequence
  Synthetic Polypeptide
MALPVTALLLPLALLLHAARPQLQLQESGPGLVKPSETLSLTCTVSGDSISSGDYYWGWIRQPPGKGLEWIGHIYYSGVTYYNPSLKSRVTISVDTSRNQFSLKLSSVTAADTAVYYCTREDSSNWRSRGQGTLVTVSSLEDKTHTCPPCPAPIKTDVITMDPKDNCSKDANDTLLLQLTNTSAYYMYLLLLLKSVVYFAIITCCLLRRTAFCCNGEKSRAKRSGSGATNFSLLKQAGDVEENPGPTSMDWIWRILFLVGAATGAHSGPMDPDLEIRAAFLRQRNTALRTEVAELEQEVQRLENEVSQYETRYGPLGGGKTRDKTHTCPPCPAEVKTDSTDHVKPKETENTKQPSKSCHKPKAIVHTEKVNMMSLTVLGLRMLFAKTVAVNFLLTAKLFFL

SEQ ID NO: 15146 - protein, 392 aa, Artificial Sequence
  Synthetic Polypeptide
MALPVTALLLPLALLLHAARPQLQLQESGPGLVKPSETLSLTCTVSGDSISSGDYYWGWIRQPPGKGLEWIGHIYYSGVTYYNPSLKSRVTISVDTSRNQFSLKLSSVTAADTAVYYCTREDSSNWRSRGQGTLVTVSSLEGSPIKTDVITMDPKDNCSKDANDTLLLQLTNTSAYYMYLLLLLKSVVYFAIITCCLLRRTAFCCNGEKSRAKRSGSGATNFSLLKQAGDVEENPGPTSMDWIWRILFLVGAATGAHSGPMDPDLEIRAAFLRQRNTALRTEVAELEQEVQRLENEVSQYETRYGPLGGGKTRDKTHTCPPCPAEVKTDSTDHVKPKETENTKQPSKSCHKPKAIVHTEKVNMMSLTVLGLRMLFAKTVAVNFLLTAKLFFL

SEQ ID NO: 15147 - protein, 608 aa, Artificial Sequence
  Synthetic Polypeptide
MALPVTALLLPLALLLHAARPQLQLQESGPGLVKPSETLSLTCTVSGDSISSGDYYWGWIRQPPGKGLEWIGHIYYSGVTYYNPSLKSRVTISVDTSRNQFSLKLSSVTAADTAVYYCTREDSSNWRSRGQGTLVTVSSLEGSMDPKDNCSKDANDTLLLQLTNTSAYYMYLLLLLKSVVYFAIITCCLLRRTAFCCNGEKSRAKRSGSGATNFSLLKQAGDVEENPGPTSMDWIWRILFLVGAATGAHSGPMDPDLEIRAAFLRQRNTALRTEVAELEQEVQRLENEVSQYETRYGPLGGGKTRGSEVKTDSTDHVKPKETENTKQPSKSCHKPKAIVHTEKVNMMSLTVLGLRMLFAKTVAVNFLLTAKLFFLRAKRSGSGVKQTLNFDLLKLAGDVESNPGPSRGHMTEYKPTVRLATRDDVPRAVRTLAAAFADYPATRHTVDPDRHIERVTELQELFLTRVGLDIGKVWVADDGAAVAVWTTPESVEAGAVFAEIGPRMAELSGSRLAAQQQMEGLLAPHRPKEPAWFLATVGVSPDHQGKGLGSAVVLPGVEAAERAGVPAFLETSAPRNLPFYERLGFTVTADVEVPEGPRTWCMTRKPGA

SEQ ID NO: 15148 - protein, 609 aa, Artificial Sequence
  Synthetic Polypeptide
MALPVTALLLPLALLLHAARPQLQLQESGPGLVKPSETLSLTCTVSGDSISSGDYYWGWIRQPPGKGLEWIGHIYYSGVTYYNPSLKSRVTISVDTSRNQFSLKLSSVTAADTAVYYCTREDSSNWRSRGQGTLVTVSSLEGSPIKTDVITMDPKDNCSKDANDTLLLQLTNTSAYYMYLLLLLKSVVYFAIITCCLLRRTAFCCNGEKSRAKRSGSGATNFSLLKQAGDVEENPGPTSMDWIWRILFLVGAATGAHSGPMDPDLEIRAAFLRQRNTALRTEVAELEQEVQRLENEVSQYETRYGPLGGGKTRGSDHVKPKETENTKQPSKSCHKPKAIVHTEKVNMMSLTVLGLRMLFAKTVAVNFLLTAKLFFLRAKRSGSGVKQTLNFDLLKLAGDVESNPGPSRGHMTEYKPTVRLATRDDVPRAVRTLAAAFADYPATRHTVDPDRHIERVTELQELFLTRVGLDIGKVWVADDGAAVAVWTTPESVEAGAVFAEIGPRMAELSGSRLAAQQQMEGLLAPHRPKEPAWFLATVGVSPDHQGKGLGSAVVLPGVEAAERAGVPAFLETSAPRNLPFYERLGFTVTADVEVPEGPRTWCMTRKPGA

SEQ ID NO: 15149 - protein, 601 aa, Artificial Sequence
  Synthetic Polypeptide
MALPVTALLLPLALLLHAARPQLQLQESGPGLVKPSETLSLTCTVSGDSISSGDYYWGWIRQPPGKGLEWIGHIYYSGVTYYNPSLKSRVTISVDTSRNQFSLKLSSVTAADTAVYYCTREDSSNWRSRGQGTLVTVSSLEGSMDPKDNCSKDANDTLLLQLTNTSAYYMYLLLLLKSVVYFAIITCCLLRRTAFCCNGEKSRAKRSGSGATNFSLLKQAGDVEENPGPTSMDWIWRILFLVGAATGAHSGPMDPDLEIRAAFLRQRNTALRTEVAELEQEVQRLENEVSQYETRYGPLGGGKTRGSDHVKPKETENTKQPSKSCHKPKAIVHTEKVNMMSLTVLGLRMLFAKTVAVNFLLTAKLFFLRAKRSGSGVKQTLNFDLLKLAGDVESNPGPSRGHMTEYKPTVRLATRDDVPRAVRTLAAAFADYPATRHTVDPDRHIERVTELQELFLTRVGLDIGKVWVADDGAAVAVWTTPESVEAGAVFAEIGPRMAELSGSRLAAQQQMEGLLAPHRPKEPAWFLATVGVSPDHQGKGLGSAVVLPGVEAAERAGVPAFLETSAPRNLPFYERLGFTVTADVEVPEGPRTWCMTRKPGA

SEQ ID NO: 15150 - protein, 368 aa, Artificial Sequence
  Synthetic Polypeptide
MALPVTALLLPLALLLHAARPQLQLQESGPGLVKPSETLSLTCTVSGDSISSGDYYWGWIRQPPGKGLEWIGHIYYSGVTYYNPSLKSRVTISVDTSRNQFSLKLSSVTAADTAVYYCTREDSSNWRSRGQGTLVTVSSLEGSMDPKDNCSKDANDTLLLQLTNTSAYYMYLLLLLKSVVYFAIITCCLLRRTAFCCNGEKSRAKRSGSGATNFSLLKQAGDVEENPGPTSMDWIWRILFLVGAATGAHSGPMDPDLEIRAAFLRQRNTALRTEVAELEQEVQRLENEVSQYETRYGPLGGGKTRGSDHVKPKETENTKQPSKSCHKPKAIVHTEKVNMMSLTVLGLRMLFAKTVAVNFLLTAKLFFL

SEQ ID NO: 15151 - protein, 610 aa, Artificial Sequence
  Synthetic Polypeptide
MALPVTALLLPLALLLHAARPQLQLQESGPGLVKPSETLSLTCTVSGDSISSGDYYWGWIRQPPGKGLEWIGHIYYSGVTYYNPSLKSRVTISVDTSRNQFSLKLSSVTAADTAVYYCTREDSSNWRSRGQGTLVTVSSLEDKTHTCPPCPAMDPKDNCSKDANDTLLLQLTNTSAYYMYLLLLLKSVVYFAIITCCLLRRTAFCCNGEKSRAKRSGSGATNFSLLKQAGDVEENPGPTSMDWIWRILFLVGAATGAHSGPMDPDLEIRAAFLRQRNTALRTEVAELEQEVQRLENEVSQYETRYGPLGGGKTRGSDHVKPKETENTKQPSKSCHKPKAIVHTEKVNMMSLTVLGLRMLFAKTVAVNFLLTAKLFFLRAKRSGSGVKQTLNFDLLKLAGDVESNPGPSRGHMTEYKPTVRLATRDDVPRAVRTLAAAFADYPATRHTVDPDRHIERVTELQELFLTRVGLDIGKVWVADDGAAVAVWTTPESVEAGAVFAEIGPRMAELSGSRLAAQQQMEGLLAPHRPKEPAWFLATVGVSPDHQGKGLGSAVVLPGVEAAERAGVPAFLETSAPRNLPFYERLGFTVTADVEVPEGPRTWCMTRKPGA

SEQ ID NO: 15152 - protein, 619 aa, Artificial Sequence
  Synthetic Polypeptide
MALPVTALLLPLALLLHAARPQLQLQESGPGLVKPSETLSLTCTVSGDSISSGDYYWGWIRQPPGKGLEWIGHIYYSGVTYYNPSLKSRVTISVDTSRNQFSLKLSSVTAADTAVYYCTREDSSNWRSRGQGTLVTVSSLEDKTHTCPPCPAMDPKDNCSKDANDTLLLQLTNTSAYYMYLLLLLKSVVYFAIITCCLLRRTAFCCNGEKSRAKRSGSGATNFSLLKQAGDVEENPGPTSMDWIWRILFLVGAATGAHSGPMDPDLEIRAAFLRQRNTALRTEVAELEQEVQRLENEVSQYETRYGPLGGGKTRDKTHTCPPCPADHVKPKETENTKQPSKSCHKPKAIVHTEKVNMMSLTVLGLRMLFAKTVAVNFLLTAKLFFLRAKRSGSGVKQTLNFDLLKLAGDVESNPGPSRGHMTEYKPTVRLATRDDVPRAVRTLAAAFADYPATRHTVDPDRHIERVTELQELFLTRVGLDIGKVWVADDGAAVAVWTTPESVEAGAVFAEIGPRMAELSGSRLAAQQQMEGLLAPHRPKEPAWFLATVGVSPDHQGKGLGSAVVLPGVEAAERAGVPAFLETSAPRNLPFYERLGFTVTADVEVPEGPRTWCMTRKPGA

SEQ ID NO: 15153 - protein, 386 aa, Artificial Sequence
  Synthetic Polypeptide
MALPVTALLLPLALLLHAARPQLQLQESGPGLVKPSETLSLTCTVSGDSISSGDYYWGWIRQPPGKGLEWIGHIYYSGVTYYNPSLKSRVTISVDTSRNQFSLKLSSVTAADTAVYYCTREDSSNWRSRGQGTLVTVSSLEDKTHTCPPCPAMDPKDNCSKDANDTLLLQLTNTSAYYMYLLLLLKSVVYFAIITCCLLRRTAFCCNGEKSRAKRSGSGATNFSLLKQAGDVEENPGPTSMDWIWRILFLVGAATGAHSGPMDPDLEIRAAFLRQRNTALRTEVAELEQEVQRLENEVSQYETRYGPLGGGKTRDKTHTCPPCPADHVKPKETENTKQPSKSCHKPKAIVHTEKVNMMSLTVLGLRMLFAKTVAVNFLLTAKLFFL

SEQ ID NO: 15154 - protein, 300 aa, Artificial Sequence; identical to SEQ ID NO: 14900
  Synthetic Polypeptide

SEQ ID NO: 15155 - protein, 237 aa, Artificial Sequence
  Synthetic Polypeptide
MDWIWRILFLVGAATGAHSGPMDPDLEIRAAFLRQRNTALRTEVAELEQEVQRLENEVSQYETRYGPLGGGKTRASTKGPSVFPLAPSSKSTSGGTAALGCLVKDYFPEPVTVSWNSGALTSGVHTFPAVLQSSGLYSLSSVVTVPSSSLGTQTYICNVNHKPSNTKVDKRVEPKSCIPEDTFFPSPESSCDVKLVEKSFETDTNLNFQNLSVIGFRILLLKVAGFNLLMTLRLWSS

SEQ ID NO: 15156 - protein, 314 aa, Artificial Sequence; identical to SEQ ID NO: 14902
  Synthetic Polypeptide

SEQ ID NO: 15157 - protein, 245 aa, Artificial Sequence
  Synthetic Polypeptide
MDWIWRILFLVGAATGAHSGPMDPDLEIRAAFLRQRNTALRTEVAELEQEVQRLENEVSQYETRYGPLGGGKTRASTKGPSVFPLAPSSKSTSGGTAALGCLVKDYFPEPVTVSWNSGALTSGVHTFPAVLQSSGLYSLSSVVTVPSSSLGTQTYICNVNHKPSNTKVDKRVEPKSCEVKTDSTDHVKPKETENTKQPSKSCHKPKAIVHTEKVNMMSLTVLGLRMLFAKTVAVNFLLTAKLFFL

SEQ ID NO: 15158 - protein, 550 aa, Artificial Sequence
  Synthetic Polypeptide
MDWIWRILFLVGAATGAHSGPEVAALEKEVAALEKEVAALEKEVAALEKGSGGGGSGGGGSGGGGSFEQVQLQQPGAELVKPGASVKMSCKASGYAFSSYWINWMKQKPGQGLEWIGQIYPGDGDTNYNGKFKGRATLTADTSSSTAYMQLSSLTSEDSAVYFCARSITTVVGCAMDYWGQGTSVTVSSGGGGSGGGGSGGGGSDIQMTQSPSSLSASVGDRVTITCKASDHINNWLAWYQQKPGQAPKLLIYGATTLETGVPSRFSGSGSGTDYTLTISSLQPEDFATYYCQQSWNTPWTFGQGTKLEIKRTREQKLISEEDLAKPTTTPAPRPPTPAPTIASQPLSLRPEACRPAAGGAVHTRGLDFACDIYIWAPLAGTCGVLLLSLVITLYCKRGRKKLLYIFKQPFMRPVQTTQEEDGCSCRFPEEEEGGCELRVKFSRSADAPAYQQGQNQLYNELNLGRREEYDVLDKRRGRDPEMGGKPRRKNPQEGLYNELQKDKMAEAYSEIGMKGERRRGKGHDGLYQGLSTATKDTYDALHMQALPPR

SEQ ID NO: 15159 - protein, 903 aa, Artificial Sequence
  Synthetic Polypeptide
MALPVTALLLPLALLLHAARPDIQMTQSPSSLSASVGDRVTITCKASDHINNWLAWYQQKPGQAPKLLIYGATTLETGVPSRFSGSGSGTDYTLTISSLQPEDFATYYCQQSWNTPWTFGQGTKLEIKRLEIQNPDPAVYQLRDSKSSDKSVCLFTDFDSQTNVSQSKDSDVYITDKCVLDMRSMDFKSNSAVAWSNKSDFACANAFNNSIIPEDTFFPSSDVPCDVKLVEKSFETDTNLNFQNLSVIGFRILLLKVAGFNLLMTLRLWSSRAKRSGSGVKQTLNFDLLKLAGDVESNPGPTSMDWIWRILFLVGAATGAHSGPEVAALEKEVAALEKEVAALEKEVAALEKGSGGGGSGGGGSGGGGSFEQVQLQQPGAELVKPGASVKMSCKASGYAFSSYWINWMKQKPGQGLEWIGQIYPGDGDTNYNGKFKGRATLTADTSSSTAYMQLSSLTSEDSAVYFCARSITTVVGCAMDYWGQGTSVTVSSTREDLKNVFPPEVAVFEPSKAEIAHTQKATLVCLATGFYPDHVELSWWVNGKEVHSGVCTDPQPLKEQPALNDSRYCLSSRLRVSATFWQNPRNHFRCQVQFYGLSENDEWTQDRAKPVTQIVSAEAWGRADCGITSASYHQGVLSATILYEILLGKATLYAVLVSALVLMAMVKRKDSRGRAKRSGSGATNFSLLKQAGDVEENPGPSRGHMTEYKPTVRLATRDDVPRAVRTLAAAFADYPATRHTVDPDRHIERVTELQELFLTRVGLDIGKVWVADDGAAVAVWTTPESVEAGAVFAEIGPRMAELSGSRLAAQQQMEGLLAPHRPKEPAWFLATVGVSPDHQGKGLGSAVVLPGVEAAERAGVPAFLETSAPRNLPFYERLGFTVTADVEVPEGPRTWCMTRKPGA

SEQ ID NO: 15160 - protein, 902 aa, Artificial Sequence
  Synthetic Polypeptide
MALPVTALLLPLALLLHAARPDIQMTQSPSSLSASVGDRVTITCKASDHINNWLAWYQQKPGQAPKLLIYGATTLETGVPSRFSGSGSGTDYTLTISSLQPEDFATYYCQQSWNTPWTFGQGTKLEIKRLEDLKNVFPPEVAVFEPSKAEIAHTQKATLVCLATGFYPDHVELSWWVNGKEVHSGVCTDPQPLKEQPALNDSRYCLSSRLRVSATFWQNPRNHFRCQVQFYGLSENDEWTQDRAKPVTQIVSAEAWGRADCGITSASYHQGVLSATILYEILLGKATLYAVLVSALVLMAMVKRKDSRGRAKRSGSGATNFSLLKQAGDVEENPGPTSMDWIWRILFLVGAATGAHSGPEVAALEKEVAALEKEVAALEKEVAALEKGSGGGGSGGGGSGGGGSFEQVQLQQPGAELVKPGASVKMSCKASGYAFSSYWINWMKQKPGQGLEWIGQIYPGDGDTNYNGKFKGRATLTADTSSSTAYMQLSSLTSEDSAVYFCARSITTVVGCAMDYWGQGTSVTVSSTRIQNPDPAVYQLRDSKSSDKSVCLFTDFDSQTNVSQSKDSDVYITDKCVLDMRSMDFKSNSAVAWSNKSDFACANAFNNSIIPEDTFFPSSDVPCDVKLVEKSFETDTNLNFQNLSVIGFRILLLKVAGFNLLMTLRLWSSRAKRSGSGVKQTLNFDLLKLAGDVESNPGPSRGHMTEYKPTVRLATRDDVPRAVRTLAAAFADYPATRHTVDPDRHIERVTELQELFLTRVGLDIGKVWVADDGAAVAVWTTPESVEAGAVFAEIGPRMAELSGSRLAAQQQMEGLLAPHRPKEPAWFLATVGVSPDHQGKGLGSAVVLPGVEAAERAGVPAFLETSAPRNLPFYERLGFTVTADVEVPEGPRTWCMTRKPGA

SEQ ID NO: 15161 - protein, 902 aa, Artificial Sequence
  Synthetic Polypeptide
MALPVTALLLPLALLLHAARPDIQMTQSPSSLSASVGDRVTITCKASDHINNWLAWYQQKPGQAPKLLIYGATTLETGVPSRFSGSGSGTDYTLTISSLQPEDFATYYCQQSWNTPWTFGQGTKLEIKRLEDLKNVFPPEVAVFEPSEAEISHTQKATLVCLATGFYPDHVELSWWVNGKEVHSGVCTDPQPLKEQPALNDSRYCLSSRLRVSATFWQNPRNHFRCQVQFYGLSENDEWTQDRAKPVTQIVSAEAWGRADCGFTSESYQQGVLSATILYEILLGKATLYAVLVSALVLMAMVKRKDSRGRAKRSGSGATNFSLLKQAGDVEENPGPTSMDWIWRILFLVGAATGAHSGPEVAALEKEVAALEKEVAALEKEVAALEKGSGGGGSGGGGSGGGGSFEQVQLQQPGAELVKPGASVKMSCKASGYAFSSYWINWMKQKPGQGLEWIGQIYPGDGDTNYNGKFKGRATLTADTSSSTAYMQLSSLTSEDSAVYFCARSITTVVGCAMDYWGQGTSVTVSSTRIQNPDPAVYQLRDSKSSDKSVCLFTDFDSQTNVSQSKDSDVYITDKCVLDMRSMDFKSNSAVAWSNKSDFACANAFNNSIIPEDTFFPSPESSCDVKLVEKSFETDTNLNFQNLSVIGFRILLLKVAGFNLLMTLRLWSSRAKRSGSGVKQTLNFDLLKLAGDVESNPGPSRGHMTEYKPTVRLATRDDVPRAVRTLAAAFADYPATRHTVDPDRHIERVTELQELFLTRVGLDIGKVWVADDGAAVAVWTTPESVEAGAVFAEIGPRMAELSGSRLAAQQQMEGLLAPHRPKEPAWFLATVGVSPDHQGKGLGSAVVLPGVEAAERAGVPAFLETSAPRNLPFYERLGFTVTADVEVPEGPRTWCMTRKPGA

SEQ ID NO: 15162 - protein, 669 aa, Artificial Sequence
  Synthetic Polypeptide
MALPVTALLLPLALLLHAARPDIQMTQSPSSLSASVGDRVTITCKASDHINNWLAWYQQKPGQAPKLLIYGATTLETGVPSRFSGSGSGTDYTLTISSLQPEDFATYYCQQSWNTPWTFGQGTKLEIKRLEDLKNVFPPEVAVFEPSEAEISHTQKATLVCLATGFYPDHVELSWWVNGKEVHSGVCTDPQPLKEQPALNDSRYCLSSRLRVSATFWQNPRNHFRCQVQFYGLSENDEWTQDRAKPVTQIVSAEAWGRADCGFTSESYQQGVLSATILYEILLGKATLYAVLVSALVLMAMVKRKDSRGRAKRSGSGATNFSLLKQAGDVEENPGPTSMDWIWRILFLVGAATGAHSGPEVAALEKEVAALEKEVAALEKEVAALEKGSGGGGSGGGGSGGGGSFEQVQLQQPGAELVKPGASVKMSCKASGYAFSSYWINWMKQKPGQGLEWIGQIYPGDGDTNYNGKFKGRATLTADTSSSTAYMQLSSLTSEDSAVYFCARSITTVVGCAMDYWGQGTSVTVSSTRIQNPDPAVYQLRDSKSSDKSVCLFTDFDSQTNVSQSKDSDVYITDKCVLDMRSMDFKSNSAVAWSNKSDFACANAFNNSIIPEDTFFPSPESSCDVKLVEKSFETDTNLNFQNLSVIGFRILLLKVAGFNLLMTLRLWSS

SEQ ID NO: 15163 - protein, 894 aa, Artificial Sequence
  Synthetic Polypeptide
MALPVTALLLPLALLLHAARPDIQMTQSPSSLSASVGDRVTITCKASDHINNWLAWYQQKPGQAPKLLIYGATTLETGVPSRFSGSGSGTDYTLTISSLQPEDFATYYCQQSWNTPWTFGQGTKLEIKRLEDLKNVFPPEVAVFEPSEAEISHTQKATLVCLATGFYPDHVELSWWVNGKEVHSGVCTDPQPLKEQPALNDSRYCLSSRLRVSATFWQNPRNHFRCQVQFYGLSENDEWTQDRAKPVTQIVSAEAWGRADCGFTSESYQQGVLSATILYEILLGKATLYAVLVSALVLMAMVKRKDSRGRAKRSGSGATNFSLLKQAGDVEENPGPTSMDWIWRILFLVGAATGAHSGPEVAALEKEVAALEKEVAALEKEVAALEKGSGGGGSGGGGSGGGGSFEQVQLQQPGAELVKPGASVKMSCKASGYAFSSYWINWMKQKPGQGLEWIGQIYPGDGDTNYNGKFKGRATLTADTSSSTAYMQLSSLTSEDSAVYFCARSITTVVGCAMDYWGQGTSVTVSSTRIQNPDPAVYQLRDSKSSDKSVCLFTDFDSQTNVSQSKDSDVYITDKCVLDMRSMDFKSNSAVAWSNKSDFACANAFNNSIIPEDTFFPSPESSCDVKLVEKSFETDTNLNFQNLSVIGFRILLLKVAGFNLLMTLRLWSSRAKRSGSGVKQTLNFDLLKLAGDVESNPGPSRGGIHTMATYEVLCEVARKLGTDDREVVLFLLNVFIPQPTLAQLIGALRALKEEGRLTFPLLAECLFRAGRRDLLRDLLHLDPRFLERHLAGTMSYFSPYQLTVLHVDGELCARDIRSLIFLSKDTIGSRSTPQTFLHWVYCMENLDLLGPTDVDALMSMLRSLSRVDLQRQVQTLMGLHLSGPSHSQHYRHTP

SEQ ID NO: 15164 - protein, 673 aa, Artificial Sequence
  Synthetic Polypeptide
MALPVTALLLPLALLLHAARPDIQMTQSPSSLSASVGDRVTITCKASDHINNWLAWYQQKPGQAPKLLIYGATTLETGVPSRFSGSGSGTDYTLTISSLQPEDFATYYCQQSWNTPWTFGQGTKLEIKRLEIQNPDPAVYQLRDSKSSDKSVCLFTDFDSQTNVSQSKDSDVYITDKCVLDMRSMDFKSNSAVAWSNKSDFACANAFNNSIIPEDTFFPSPESSCDVKLVEKSFETDTNLNFQNLSVIGFRILLLKVAGFNLLMTLRLWSSRAKRSGSGVKQTLNFDLLKLAGDVESNPGPTSMDWIWRILFLVGAATGAHSGPEVAALEKEVAALEKEVAALEKEVAALEKGSGGGGSGGGGSGGGGSFEQVQLQQPGAELVKPGASVKMSCKASGYAFSSYWINWMKQKPGQGLEWIGQIYPGDGDTNYNGKFKGRATLTADTSSSTAYMQLSSLTSEDSAVYFCARSITTVVGCAMDYWGQGTSVTVSSTREDLKNVFPPEVAVFEPSEAEISHTQKATLVCLATGFYPDHVELSWWVNGKEVHSGVCTDPQPLKEQPALNDSRYCLSSRLRVSATFWQNPRNHFRCQVQFYGLSENDEWTQDRAKPVTQIVSAEAWGRADCGFTSESYQQGVLSATILYEILLGKATLYAVLVSALVLMAMVKRKDSRG

SEQ ID NO: 15165 - protein, 895 aa, Artificial Sequence
  Synthetic Polypeptide
MALPVTALLLPLALLLHAARPDIQMTQSPSSLSASVGDRVTITCKASDHINNWLAWYQQKPGQAPKLLIYGATTLETGVPSRFSGSGSGTDYTLTISSLQPEDFATYYCQQSWNTPWTFGQGTKLEIKRLEIQNPDPAVYQLRDSKSSDKSVCLFTDFDSQTNVSQSKDSDVYITDKCVLDMRSMDFKSNSAVAWSNKSDFACANAFNNSIIPEDTFFPSPESSCDVKLVEKSFETDTNLNFQNLSVIGFRILLLKVAGFNLLMTLRLWSSRAKRSGSGVKQTLNFDLLKLAGDVESNPGPTSMDWIWRILFLVGAATGAHSGPEVAALEKEVAALEKEVAALEKEVAALEKGSGGGGSGGGGSGGGGSFEQVQLQQPGAELVKPGASVKMSCKASGYAFSSYWINWMKQKPGQGLEWIGQIYPGDGDTNYNGKFKGRATLTADTSSSTAYMQLSSLTSEDSAVYFCARSITTVVGCAMDYWGQGTSVTVSSTREDLKNVFPPEVAVFEPSEAEISHTQKATLVCLATGFYPDHVELSWWVNGKEVHSGVCTDPQPLKEQPALNDSRYCLSSRLRVSATFWQNPRNHFRCQVQFYGLSENDEWTQDRAKPVTQIVSAEAWGRADCGFTSESYQQGVLSATILYEILLGKATLYAVLVSALVLMAMVKRKDSRGRAKRSGSGATNFSLLKQAGDVEENPGPSRGGIHTMATYEVLCEVARKLGTDDREVVLFLLNVFIPQPTLAQLIGALRALKEEGRLTFPLLAECLFRAGRRDLLRDLLHLDPRFLERHLAGTMSYFSPYQLTVLHVDGELCARDIRSLIFLSKDTIGSRSTPQTFLHWVYCMENLDLLGPTDVDALMSMLRSLSRVDLQRQVQTLMGLHLSGPSHSQHYRHTP

SEQ ID NO: 15166 - protein, 902 aa, Artificial Sequence
  Synthetic Polypeptide
MALPVTALLLPLALLLHAARPDIQMTQSPSSLSASVGDRVTITCKASDHINNWLAWYQQKPGQAPKLLIYGATTLETGVPSRFSGSGSGTDYTLTISSLQPEDFATYYCQQSWNTPWTFGQGTKLEIKRLEDLKNVFPPEVAVFEPSEAEISHTQKATLVCLATGFYPDHVELSWWVNGKEVHSGVSTDPQPLKEQPALNDSRYCLSSRLRVSATFWQNPRNHFRCQVQFYGLSENDEWTQDRAKPVTQIVSAEAWGRADCGFTSESYQQGVLSATILYEILLGKATLYAVLVSALVLMAMVKRKDSRGRAKRSGSGATNFSLLKQAGDVEENPGPTSMDWIWRILFLVGAATGAHSGPEVAALEKEVAALEKEVAALEKEVAALEKGSGGGGSGGGGSGGGGSFEQVQLQQPGAELVKPGASVKMSCKASGYAFSSYWINWMKQKPGQGLEWIGQIYPGDGDTNYNGKFKGRATLTADTSSSTAYMQLSSLTSEDSAVYFCARSITTVVGCAMDYWGQGTSVTVSSTRIQNPDPAVYQLRDSKSSDKSVCLFTDFDSQTNVSQSKDSDVYITDKTVLDMRSMDFKSNSAVAWSNKSDFACANAFNNSIIPEDTFFPSPESSCDVKLVEKSFETDTNLNFQNLSVIGFRILLLKVAGFNLLMTLRLWSSRAKRSGSGVKQTLNFDLLKLAGDVESNPGPSRGHMTEYKPTVRLATRDDVPRAVRTLAAAFADYPATRHTVDPDRHIERVTELQELFLTRVGLDIGKVWVADDGAAVAVWTTPESVEAGAVFAEIGPRMAELSGSRLAAQQQMEGLLAPHRPKEPAWFLATVGVSPDHQGKGLGSAVVLPGVEAAERAGVPAFLETSAPRNLPFYERLGFTVTADVEVPEGPRTWCMTRKPGA

SEQ ID NO: 15167 - protein, 984 aa, Artificial Sequence
  Synthetic Polypeptide
MALPVTALLLPLALLLHAARPDIQMTQSPSSLSASVGDRVTITCKASDHINNWLAWYQQKPGQAPKLLIYGATTLETGVPSRFSGSGSGTDYTLTISSLQPEDFATYYCQQSWNTPWTFGQGTKLEIKRLEDLKNVFPPEVAVFEPSEAEISHTQKATLVCLATGFYPDHVELSWWVNGKEVHSGVSTDPQPLKEQPALNDSRYCLSSRLRVSATFWQNPRNHFRCQVQFYGLSENDEWTQDRAKPVTQIVSAEAWGRADCGFTSESYQQGVLSATILYEILLGKATLYAVLVSALVLMAMVKRKDSRGRAKRSGSGATNFSLLKQAGDVEENPGPTSMDWIWRILFLVGAATGAHSGPEVAALEKEVAALEKEVAALEKEVAALEKGSGGGGSGGGGSGGGGSFEQVQLQQPGAELVKPGASVKMSCKASGYAFSSYWINWMKQKPGQGLEWIGQIYPGDGDTNYNGKFKGRATLTADTSSSTAYMQLSSLTSEDSAVYFCARSITTVVGCAMDYWGQGTSVTVSSTREQKLISEEDGSGTPFPSLAPPIMLLVDGKQQMVVVCLVLDVAPPGLDSPIWFSAGNGSALDAFTYGPSPATDGTWTNLAHLSLPSEELASWEPLVCHTGPGAEGHSRSTQPMHLSGEASTARTCPQEPLRGTPGGALWLGVLRLLLFKLLLFDLLLTCSCLCDPAGPLPSPATTTRLRALGSHRLHPATETGGREATSSPRPQPRDRRWGDTPPGRKPGSPVRAKRSGSGVKQTLNFDLLKLAGDVESNPGPSRGHMTEYKPTVRLATRDDVPRAVRTLAAAFADYPATRHTVDPDRHIERVTELQELFLTRVGLDIGKVWVADDGAAVAVWTTPESVEAGAVFAEIGPRMAELSGSRLAAQQQMEGLLAPHRPKEPAWFLATVGVSPDHQGKGLGSAVVLPGVEAAERAGVPAFLETSAPRNLPFYERLGFTVTADVEVPEGPRTWCMTRKPGA

SEQ ID NO: 15168 - protein, 939 aa, Artificial Sequence
  Synthetic Polypeptide
MALPVTALLLPLALLLHAARPDIQMTQSPSSLSASVGDRVTITCKASDHINNWLAWYQQKPGQAPKLLIYGATTLETGVPSRFSGSGSGTDYTLTISSLQPEDFATYYCQQSWNTPWTFGQGTKLEIKRLEGKPIPNPLLGLDSTGSGDKQLDADVSPKPTIFLPSIAETKLQKAGTYLCLLEKFFPDVIKIHWQEKKSNTILGSQEGNTMKTNDTYMKFSWLTVPEKSLDKEHRCIVRHENNKNGVDQEIIFPPIKTDVITMDPKDNCSKDANDTLLLQLTNTSAYYMYLLLLLKSVVYFAIITCCLLRRTAFCCNGEKSRAKRSGSGATNFSLLKQAGDVEENPGPTSMDWIWRILFLVGAATGAHSGPEVAALEKEVAALEKEVAALEKEVAALEKGSGGGGSGGGGSGGGGSFEQVQLQQPGAELVKPGASVKMSCKASGYAFSSYWINWMKQKPGQGLEWIGQIYPGDGDTNYNGKFKGRATLTADTSSSTAYMQLSSLTSEDSAVYFCARSITTVVGCAMDYWGQGTSVTVSSTREQKLISEEDGSGSQPHTKPSVFVMKNGTNVACLVKEFYPKDIRINLVSSKKITEFDPAIVISPSGKYNAVKLGKYEDSNSVTCSVQHDNKTVHSTDFEVKTDSTDHVKPKETENTKQPSKSCHKPKAIVHTEKVNMMSLTVLGLRMLFAKTVAVNFLLTAKLFFLRAKRSGSGVKQTLNFDLLKLAGDVESNPGPSRGHMTEYKPTVRLATRDDVPRAVRTLAAAFADYPATRHTVDPDRHIERVTELQELFLTRVGLDIGKVWVADDGAAVAVWTTPESVEAGAVFAEIGPRMAELSGSRLAAQQQMEGLLAPHRPKEPAWFLATVGVSPDHQGKGLGSAVVLPGVEAAERAGVPAFLETSAPRNLPFYERLGFTVTADVEVPEGPRTWCMTRKPGA

SEQ ID NO: 15169 - protein, 677 aa, Artificial Sequence
  Synthetic Polypeptide
MALPVTALLLPLALLLHAARPDIQMTQSPSSLSASVGDRVTITCKASDHINNWLAWYQQKPGQAPKLLIYGATTLETGVPSRFSGSGSGTDYTLTISSLQPEDFATYYCQQSWNTPWTFGQGTKLEIKRLESQPHTKPSVFVMKNGTNVACLVKEFYPKDIRINLVSSKKITEFDPAIVISPSGKYNAVKLGKYEDSNSVTCSVQHDNKTVHSTDFEVKTDSTDHVKPKETENTKQPSKSCHKPKAIVHTEKVNMMSLTVLGLRMLFAKTVAVNFLLTAKLFFLRAKRSGSGATNFSLLKQAGDVEENPGPTSMDWIWRILFLVGAATGAHSGPEVAALEKEVAALEKEVAALEKEVAALEKGSGGGGSGGGGSGGGGSFEQVQLQQPGAELVKPGASVKMSCKASGYAFSSYWINWMKQKPGQGLEWIGQIYPGDGDTNYNGKFKGRATLTADTSSSTAYMQLSSLTSEDSAVYFCARSITTVVGCAMDYWGQGTSVTVSSTRDKQLDADVSPKPTIFLPSIAETKLQKAGTYLCLLEKFFPDVIKIHWQEKKSNTILGSQEGNTMKTNDTYMKFSWLTVPEKSLDKEHRCIVRHENNKNGVDQEIIFPPIKTDVITMDPKDNCSKDANDTLLLQLTNTSAYYMYLLLLLKSVVYFAIITCCLLRRTAFCCNGEKS

SEQ ID NO: 15170 - protein, 1079 aa, Artificial Sequence
  Synthetic Polypeptide
MALPVTALLLPLALLLHAARPDIQMTQSPSSLSASVGDRVTITCKASDHINNWLAWYQQKPGQAPKLLIYGATTLETGVPSRFSGSGSGTDYTLTISSLQPEDFATYYCQQSWNTPWTFGQGTKLEIKRGQPKANPTVTLFPPSSEELQANKATLVCLISDFYPGAVTVAWKADGSPVKAGVETTKPSKQSNNKYAASSYLSLTPEQWKSHRSYSCQVTHEGSTVEKTVAPTECSGSQSFGLLDPKLCYLLDGILFIYGVILTALFLRVKFSRSADAPAYQQGQNQLYNELNLGRREEYDVLDKRRGRDPEMGGKPQRRKNPQEGLYNELQKDKMAEAYSEIGMKGERRRGKGHDGLYQGLSTATKDTYDALHMQALPPRRAKRSGSGATNFSLLKQAGDVEENPGPTSMDWIWRILFLVGAATGAHSGPEVAALEKEVAALEKEVAALEKEVAALEKGSGGGGSGGGGSGGGGSFEQVQLQQPGAELVKPGASVKMSCKASGYAFSSYWINWMKQKPGQGLEWIGQIYPGDGDTNYNGKFKGRATLTADTSSSTAYMQLSSLTSEDSAVYFCARSITTVVGCAMDYWGQGTSVTVSSASTKGPSVFPLAPSSKSTSGGTAALGCLVKDYFPEPVTVSWNSGALTSGVHTFPAVLQSSGLYSLSSVVTVPSSSLGTQTYICNVNHKPSNTKVDKRVEPKSCGTQSFGLLDPKLCYLLDGILFIYGVILTALFLRVKFSRSADAPAYQQGQNQLYNELNLGRREEYDVLDKRRGRDPEMGGKPQRRKNPQEGLYNELQKDKMAEAYSEIGMKGERRRGKGHDGLYQGLSTATKDTYDALHMQALPPRRAKRSGSGVKQTLNFDLLKLAGDVESNPGPSRGHMTEYKPTVRLATRDDVPRAVRTLAAAFADYPATRHTVDPDRHIERVTELQELFLTRVGLDIGKVWVADDGAAVAVWTTPESVEAGAVFAEIGPRMAELSGSRLAAQQQMEGLLAPHRPKEPAWFLATVGVSPDHQGKGLGSAVVLPGVEAAERAGVPAFLETSAPRNLPFYERLGFTVTADVEVPEGPRTWCMTRKPGA

SEQ ID NO: 15171 - protein, 865 aa, Artificial Sequence
  Synthetic Polypeptide
MALPVTALLLPLALLLHAARPDIQMTQSPSSLSASVGDRVTITCKASDHINNWLAWYQQKPGQAPKLLIYGATTLETGVPSRFSGSGSGTDYTLTISSLQPEDFATYYCQQSWNTPWTFGQGTKLEIKRLEDLKNVFPPEVAVFEPSEAEISHTQKATLVCLATGFYPDHVELSWWVNGKEVHSGVSTDPQPLKEQPALNDSRYCLSSRLRVSATFWQNPRNHFRCQVQFYGLSENDEWTQDRAKPVTQIVSAEAWGRADCGSQSFGLLDPKLCYLLDGILFIYGVILTALFLRVKFSRSADAPAYQQGQNQLYNELNLGRREEYDVLDKRRGRDPEMGGKPQRRKNPQEGLYNELQKDKMAEAYSEIGMKGERRRGKGHDGLYQGLSTATKDTYDALHMQALPPRRAKRSGSGATNFSLLKQAGDVEENPGPTSMDWIWRILFLVGAATGAHSGPEVAALEKEVAALEKEVAALEKEVAALEKGSGGGGSGGGGSGGGGSFEQVQLQQPGAELVKPGASVKMSCKASGYAFSSYWINWMKQKPGQGLEWIGQIYPGDGDTNYNGKFKGRATLTADTSSSTAYMQLSSLTSEDSAVYFCARSITTVVGCAMDYWGQGTSVTVSSTRIQNPDPAVYQLRDSKSSDKSVCLFTDFDSQTNVSQSKDSDVYITDKTVLDMRSMDFKSNSAVAWSNKSDFACANAFNNSIIPEDTFFPSPESSCGTQSFGLLDPKLCYLLDGILFIYGVILTALFLRVKFSRSADAPAYQQGQNQLYNELNLGRREEYDVLDKRRGRDPEMGGKPQRRKNPQEGLYNELQKDKMAEAYSEIGMKGERRRGKGHDGLYQGLSTATKDTYDALHMQALPPR

SEQ ID NO: 15172 - protein, 865 aa, Artificial Sequence
  Synthetic Polypeptide
MALPVTALLLPLALLLHAARPDIQMTQSPSSLSASVGDRVTITCKASDHINNWLAWYQQKPGQAPKLLIYGATTLETGVPSRFSGSGSGTDYTLTISSLQPEDFATYYCQQSWNTPWTFGQGTKLEIKRLEDLKNVFPPEVAVFEPSKAEIAHTQKATLVCLATGFYPDHVELSWWVNGKEVHSGVCTDPQPLKEQPALNDSRYCLSSRLRVSATFWQNPRNHFRCQVQFYGLSENDEWTQDRAKPVTQIVSAEAWGRADCGSQSFGLLDPKLCYLLDGILFIYGVILTALFLRVKFSRSADAPAYQQGQNQLYNELNLGRREEYDVLDKRRGRDPEMGGKPQRRKNPQEGLYNELQKDKMAEAYSEIGMKGERRRGKGHDGLYQGLSTATKDTYDALHMQALPPRRAKRSGSGATNFSLLKQAGDVEENPGPTSMDWIWRILFLVGAATGAHSGPEVAALEKEVAALEKEVAALEKEVAALEKGSGGGGSGGGGSGGGGSFEQVQLQQPGAELVKPGASVKMSCKASGYAFSSYWINWMKQKPGQGLEWIGQIYPGDGDTNYNGKFKGRATLTADTSSSTAYMQLSSLTSEDSAVYFCARSITTVVGCAMDYWGQGTSVTVSSTRIQNPDPAVYQLRDSKSSDKSVCLFTDFDSQTNVSQSKDSDVYITDKCVLDMRSMDFKSNSAVAWSNKSDFACANAFNNSIIPEDTFFPSSDVPCGTQSFGLLDPKLCYLLDGILFIYGVILTALFLRVKFSRSADAPAYQQGQNQLYNELNLGRREEYDVLDKRRGRDPEMGGKPQRRKNPQEGLYNELQKDKMAEAYSEIGMKGERRRGKGHDGLYQGLSTATKDTYDALHMQALPPR

SEQ ID NO: 15173 - protein, 936 aa, Artificial Sequence
  Synthetic Polypeptide
MALPVTALLLPLALLLHAARPDIQMTQSPSSLSASVGDRVTITCKASDHINNWLAWYQQKPGQAPKLLIYGATTLETGVPSRFSGSGSGTDYTLTISSLQPEDFATYYCQQSWNTPWTFGQGTKLEIKRLEGKPIPNPLLGLDSTGSGEDLKNVFPPEVAVFEPSEAEISHTQKATLVCLATGFYPDHVELSWWVNGKEVHSGVSTDPQPLKEQPALNDSRYCLSSRLRVSATFWQNPRNHFRCQVQFYGLSENDEWTQDRAKPVTQIVSAEAWGRADCGSQSFGLLDPKLCYLLDGILFIYGVILTALFLRVKFSRSADAPAYQQGQNQLYNELNLGRREEYDVLDKRRGRDPEMGGKPQRRKNPQEGLYNELQKDKMAEAYSEIGMKGERRRGKGHDGLYQGLSTATKDTYDALHMQALPPRRAKRSGSGATNFSLLKQAGDVEENPGPTSMDWIWRILFLVGAATGAHSGPEVAALEKEVAALEKEVAALEKEVAALEKGSGGGGSGGGGSGGGGSFEQVQLQQPGAELVKPGASVKMSCKASGYAFSSYWINWMKQKPGQGLEWIGQIYPGDGDTNYNGKFKGRATLTADTSSSTAYMQLSSLTSEDSAVYFCARSITTVVGCAMDYWGQGTSVTVSSTREQKLISEEDGSGIQNPDPAVYQLRDSKSSDKSVCLFTDFDSQTNVSQSKDSDVYITDKTVLDMRSMDFKSNSAVAWSNKSDFACANAFNNSIIPEDTFFPSPESSCGTQSFGLLDPKLCYLLDGILFIYGVILTALFLRSKRSRLLHSDYMNMTPRRPGPTRKHYQPYAPPRDFAAYRSRVKFSRSADAPAYQQGQNQLYNELNLGRREEYDVLDKRRGRDPEMGGKPQRRKNPQEGLYNELQKDKMAEAYSEIGMKGERRRGKGHDGLYQGLSTATKDTYDALHMQALPPR

SEQ ID NO: 15174 - protein, 977 aa, Artificial Sequence
  Synthetic Polypeptide
MALPVTALLLPLALLLHAARPDIQMTQSPSSLSASVGDRVTITCKASDHINNWLAWYQQKPGQAPKLLIYGATTLETGVPSRFSGSGSGTDYTLTISSLQPEDFATYYCQQSWNTPWTFGQGTKLEIKRLEGKPIPNPLLGLDSTGSGEDLKNVFPPEVAVFEPSEAEISHTQKATLVCLATGFYPDHVELSWWVNGKEVHSGVSTDPQPLKEQPALNDSRYCLSSRLRVSATFWQNPRNHFRCQVQFYGLSENDEWTQDRAKPVTQIVSAEAWGRADCGSQSFGLLDPKLCYLLDGILFIYGVILTALFLRSKRSRLLHSDYMNMTPRRPGPTRKHYQPYAPPRDFAAYRSRVKFSRSADAPAYQQGQNQLYNELNLGRREEYDVLDKRRGRDPEMGGKPQRRKNPQEGLYNELQKDKMAEAYSEIGMKGERRRGKGHDGLYQGLSTATKDTYDALHMQALPPRRAKRSGSGATNFSLLKQAGDVEENPGPTSMDWIWRILFLVGAATGAHSGPEVAALEKEVAALEKEVAALEKEVAALEKGSGGGGSGGGGSGGGGSFEQVQLQQPGAELVKPGASVKMSCKASGYAFSSYWINWMKQKPGQGLEWIGQIYPGDGDTNYNGKFKGRATLTADTSSSTAYMQLSSLTSEDSAVYFCARSITTVVGCAMDYWGQGTSVTVSSTREQKLISEEDGSGIQNPDPAVYQLRDSKSSDKSVCLFTDFDSQTNVSQSKDSDVYITDKTVLDMRSMDFKSNSAVAWSNKSDFACANAFNNSIIPEDTFFPSPESSCGTQSFGLLDPKLCYLLDGILFIYGVILTALFLRSKRSRLLHSDYMNMTPRRPGPTRKHYQPYAPPRDFAAYRSRVKFSRSADAPAYQQGQNQLYNELNLGRREEYDVLDKRRGRDPEMGGKPQRRKNPQEGLYNELQKDKMAEAYSEIGMKGERRRGKGHDGLYQGLSTATKDTYDALHMQALPPR

SEQ ID NO: 15175 - protein, 938 aa, Artificial Sequence
  Synthetic Polypeptide
MALPVTALLLPLALLLHAARPDIQMTQSPSSLSASVGDRVTITCKASDHINNWLAWYQQKPGQAPKLLIYGATTLETGVPSRFSGSGSGTDYTLTISSLQPEDFATYYCQQSWNTPWTFGQGTKLEIKRLEGKPIPNPLLGLDSTGSGEDLKNVFPPEVAVFEPSEAEISHTQKATLVCLATGFYPDHVELSWWVNGKEVHSGVSTDPQPLKEQPALNDSRYCLSSRLRVSATFWQNPRNHFRCQVQFYGLSENDEWTQDRAKPVTQIVSAEAWGRADCGSQSFGLLDPKLCYLLDGILFIYGVILTALFLRVKFSRSADAPAYQQGQNQLYNELNLGRREEYDVLDKRRGRDPEMGGKPQRRKNPQEGLYNELQKDKMAEAYSEIGMKGERRRGKGHDGLYQGLSTATKDTYDALHMQALPPRRAKRSGSGATNFSLLKQAGDVEENPGPTSMDWIWRILFLVGAATGAHSGPEVAALEKEVAALEKEVAALEKEVAALEKGSGGGGSGGGGSGGGGSFEQVQLQQPGAELVKPGASVKMSCKASGYAFSSYWINWMKQKPGQGLEWIGQIYPGDGDTNYNGKFKGRATLTADTSSSTAYMQLSSLTSEDSAVYFCARSITTVVGCAMDYWGQGTSVTVSSTREQKLISEEDLGSGIQNPDPAVYQLRDSKSSDKSVCLFTDFDSQTNVSQSKDSDVYITDKTVLDMRSMDFKSNSAVAWSNKSDFACANAFNNSIIPEDTFFPSPESSCGTQSFGLLDPKLCYLLDGILFIYGVILTALFLKRGRKKLLYIFKQPFMRPVQTTQEEDGCSCRFPEEEEGGCELRVKFSRSADAPAYQQGQNQLYNELNLGRREEYDVLDKRRGRDPEMGGKPQRRKNPQEGLYNELQKDKMAEAYSEIGMKGERRRGKGHDGLYQGLSTATKDTYDALHMQALPPR

SEQ ID NO: 15176 - protein, 980 aa, Artificial Sequence
  Synthetic Polypeptide
MALPVTALLLPLALLLHAARPDIQMTQSPSSLSASVGDRVTITCKASDHINNWLAWYQQKPGQAPKLLIYGATTLETGVPSRFSGSGSGTDYTLTISSLQPEDFATYYCQQSWNTPWTFGQGTKLEIKRLEGKPIPNPLLGLDSTGSGEDLKNVFPPEVAVFEPSEAEISHTQKATLVCLATGFYPDHVELSWWVNGKEVHSGVSTDPQPLKEQPALNDSRYCLSSRLRVSATFWQNPRNHFRCQVQFYGLSENDEWTQDRAKPVTQIVSAEAWGRADCGSQSFGLLDPKLCYLLDGILFIYGVILTALFLKRGRKKLLYIFKQPFMRPVQTTQEEDGCSCRFPEEEEGGCELRVKFSRSADAPAYQQGQNQLYNELNLGRREEYDVLDKRRGRDPEMGGKPQRRKNPQEGLYNELQKDKMAEAYSEIGMKGERRRGKGHDGLYQGLSTATKDTYDALHMQALPPRRAKRSGSGATNFSLLKQAGDVEENPGPTSMDWIWRILFLVGAATGAHSGPEVAALEKEVAALEKEVAALEKEVAALEKGSGGGGSGGGGSGGGGSFEQVQLQQPGAELVKPGASVKMSCKASGYAFSSYWINWMKQKPGQGLEWIGQIYPGDGDTNYNGKFKGRATLTADTSSSTAYMQLSSLTSEDSAVYFCARSITTVVGCAMDYWGQGTSVTVSSTREQKLISEEDLGSGIQNPDPAVYQLRDSKSSDKSVCLFTDFDSQTNVSQSKDSDVYITDKTVLDMRSMDFKSNSAVAWSNKSDFACANAFNNSIIPEDTFFPSPESSCGTQSFGLLDPKLCYLLDGILFIYGVILTALFLKRGRKKLLYIFKQPFMRPVQTTQEEDGCSCRFPEEEEGGCELRVKFSRSADAPAYQQGQNQLYNELNLGRREEYDVLDKRRGRDPEMGGKPQRRKNPQEGLYNELQKDKMAEAYSEIGMKGERRRGKGHDGLYQGLSTATKDTYDALHMQALPPR

SEQ ID NO: 15177 - protein, 870 aa, Artificial Sequence
  Synthetic Polypeptide
MALPVTALLLPLALLLHAARPDIQMTQSPSSLSASVGDRVTITCKASDHINNWLAWYQQKPGQAPKLLIYGATTLETGVPSRFSGSGSGTDYTLTISSLQPEDFATYYCQQSWNTPWTFGQGTKLEIKRLEQSFGLLDPKLCYLLDGILFIYGVILTALFLRVKFSRSADAPAYQQGQNQLYNELNLGRREEYDVLDKRRGRDPEMGGKPQRRKNPQEGLYNELQKDKMAEAYSEIGMKGERRRGKGHDGLYQGLSTATKDTYDALHMQALPPRRAKRSGSGATNFSLLKQAGDVEENPGPTSMDWIWRILFLVGAATGAHSGPEVAALEKEVAALEKEVAALEKEVAALEKGSGGGGSGGGGSGGGGSFEQVQLQQPGAELVKPGASVKMSCKASGYAFSSYWINWMKQKPGQGLEWIGQIYPGDGDTNYNGKFKGRATLTADTSSSTAYMQLSSLTSEDSAVYFCARSITTVVGCAMDYWGQGTSVTVSSTRQSFGLLDPKLCYLLDGILFIYGVILTALFLRVKFSRSADAPAYQQGQNQLYNELNLGRREEYDVLDKRRGRDPEMGGKPQRRKNPQEGLYNELQKDKMAEAYSEIGMKGERRRGKGHDGLYQGLSTATKDTYDALHMQALPPRRAKRSGSGVKQTLNFDLLKLAGDVESNPGPSRGHMTEYKPTVRLATRDDVPRAVRTLAAAFADYPATRHTVDPDRHIERVTELQELFLTRVGLDIGKVWVADDGAAVAVWTTPESVEAGAVFAEIGPRMAELSGSRLAAQQQMEGLLAPHRPKEPAWFLATVGVSPDHQGKGLGSAVVLPGVEAAERAGVPAFLETSAPRNLPFYERLGFTVTADVEVPEGPRTWCMTRKPGA

SEQ ID NO: 15178 - protein, 695 aa, Artificial Sequence
  Synthetic Polypeptide
MALPVTALLLPLALLLHAARPDIQMTQSPSSLSASVGDRVTITCKASDHINNWLAWYQQKPGQAPKLLIYGATTLETGVPSRFSGSGSGTDYTLTISSLQPEDFATYYCQQSWNTPWTFGQGTKLEIKRLEGQPKANPTVTLFPPSSEELQANKATLVCLISDFYPGAVTVAWKADGSPVKAGVETTKPSKQSNNKYAASSYLSLTPEQWKSHRSYSCQVTHEGSTVEKTVAPTECSPIKTDVITMDPKDNCSKDANDTLLLQLTNTSAYYMYLLLLLKSVVYFAIITCCLLRRTAFCCNGEKSRAKRSGSGATNFSLLKQAGDVEENPGPTSMDWIWRILFLVGAATGAHSGPEVAALEKEVAALEKEVAALEKEVAALEKGSGGGGSGGGGSGGGGSFEQVQLQQPGAELVKPGASVKMSCKASGYAFSSYWINWMKQKPGQGLEWIGQIYPGDGDTNYNGKFKGRATLTADTSSSTAYMQLSSLTSEDSAVYFCARSITTVVGCAMDYWGQGTSVTVSSTRASTKGPSVFPLAPSSKSTSGGTAALGCLVKDYFPEPVTVSWNSGALTSGVHTFPAVLQSSGLYSLSSVVTVPSSSLGTQTYICNVNHKPSNTKVDKRVEPKSCEVKTDSTDHVKPKETENTKQPSKSCHKPKAIVHTEKVNMMSLTVLGLRMLFAKTVAVNFLLTAKLFFL

SEQ ID NO: 15179 - protein, 673 aa, Artificial Sequence
  Synthetic Polypeptide
MALPVTALLLPLALLLHAARPDIQMTQSPSSLSASVGDRVTITCKASDHINNWLAWYQQKPGQAPKLLIYGATTLETGVPSRFSGSGSGTDYTLTISSLQPEDFATYYCQQSWNTPWTFGQGTKLEIKRLEGQPKANPTVTLFPPSSEELQANKATLVCLISDFYPGAVTVAWKADGSPVKAGVETTKPSKQSNNKYAASSYLSLTPEQWKSHRSYSCQVTHEGSTVEKTVAPTECSGRADCGITSASYHQGVLSATILYEILLGKATLYAVLVSALVLMAMVKRKDSRGRAKRSGSGATNFSLLKQAGDVEENPGPTSMDWIWRILFLVGAATGAHSGPEVAALEKEVAALEKEVAALEKEVAALEKGSGGGGSGGGGSGGGGSFEQVQLQQPGAELVKPGASVKMSCKASGYAFSSYWINWMKQKPGQGLEWIGQIYPGDGDTNYNGKFKGRATLTADTSSSTAYMQLSSLTSEDSAVYFCARSITTVVGCAMDYWGQGTSVTVSSTRASTKGPSVFPLAPSSKSTSGGTAALGCLVKDYFPEPVTVSWNSGALTSGVHTFPAVLQSSGLYSLSSVVTVPSSSLGTQTYICNVNHKPSNTKVDKRVEPKSCIPEDTFFPSSDVPCDVKLVEKSFETDTNLNFQNLSVIGFRILLLKVAGFNLLMTLRLWSS

SEQ ID NO: 15180 - protein, 673 aa, Artificial Sequence
  Synthetic Polypeptide
MALPVTALLLPLALLLHAARPDIQMTQSPSSLSASVGDRVTITCKASDHINNWLAWYQQKPGQAPKLLIYGATTLETGVPSRFSGSGSGTDYTLTISSLQPEDFATYYCQQSWNTPWTFGQGTKLEIKRLEGQPKANPTVTLFPPSSEELQANKATLVCLISDFYPGAVTVAWKADGSPVKAGVETTKPSKQSNNKYAASSYLSLTPEQWKSHRSYSCQVTHEGSTVEKTVAPTECSGRADCGFTSESYQQGVLSATILYEILLGKATLYAVLVSALVLMAMVKRKDSRGRAKRSGSGATNFSLLKQAGDVEENPGPTSMDWIWRILFLVGAATGAHSGPEVAALEKEVAALEKEVAALEKEVAALEKGSGGGGSGGGGSGGGGSFEQVQLQQPGAELVKPGASVKMSCKASGYAFSSYWINWMKQKPGQGLEWIGQIYPGDGDTNYNGKFKGRATLTADTSSSTAYMQLSSLTSEDSAVYFCARSITTVVGCAMDYWGQGTSVTVSSTRASTKGPSVFPLAPSSKSTSGGTAALGCLVKDYFPEPVTVSWNSGALTSGVHTFPAVLQSSGLYSLSSVVTVPSSSLGTQTYICNVNHKPSNTKVDKRVEPKSCIPEDTFFPSPESSCDVKLVEKSFETDTNLNFQNLSVIGFRILLLKVAGFNLLMTLRLWSS

SEQ ID NO: 15181 - protein, 503 aa, Artificial Sequence
  Synthetic Polypeptide
MDWIWRILFLVGAATGAHSGPEVAALEKEVAALEKEVAALEKEVAALEKGSGGGGSGGGGSGGGGSFEQVQLQQPGAELVKPGASVKMSCKASGYAFSSYWINWMKQKPGQGLEWIGQIYPGDGDTNYNGKFKGRATLTADTSSSTAYMQLSSLTSEDSAVYFCARSITTVVGCAMDYWGQGTSVTVSSGGGGSGGGGSGGGGSDIQMTQSPSSLSASVGDRVTITCKASDHINNWLAWYQQKPGQAPKLLIYGATTLETGVPSRFSGSGSGTDYTLTISSLQPEDFATYYCQQSWNTPWTFGQGTKLEIKRTRGGGSDGNEEMGGITQTPYKVSISGTTVILTCPQYPGSEILWQHNDKNIGGDEDDKNIGSDEDHLSLKEFSELEQSGYYVCYPRGSKPEDANFYLYLRARVCENCMEMDVMSVATIVIVDICITGGLLLLVYYWSKNRKAKAKPVTRGAGAGGRQRGQNKERPPPVPNPDYEPIRKGQRDLYSGLNQRRI

SEQ ID NO: 15182 - protein, 468 aa, Artificial Sequence
  Synthetic Polypeptide
MDWIWRILFLVGAATGAHSGPEVAALEKEVAALEKEVAALEKEVAALEKGSGGGGSGGGGSGGGGSFEQVQLQQPGAELVKPGASVKMSCKASGYAFSSYWINWMKQKPGQGLEWIGQIYPGDGDTNYNGKFKGRATLTADTSSSTAYMQLSSLTSEDSAVYFCARSITTVVGCAMDYWGQGTSVTVSSGGGGSGGGGSGGGGSDIQMTQSPSSLSASVGDRVTITCKASDHINNWLAWYQQKPGQAPKLLIYGATTLETGVPSRFSGSGSGTDYTLTISSLQPEDFATYYCQQSWNTPWTFGQGTKLEIKRTRGGGSFKIPIEELEDRVFVNCNTSITWVEGTVGTLLSDITRLDLGKRILDPRGIYRCNGTDIYKDKESTVQVHYRMCQSCVELDPATVAGIIVTDVIATLLLALGVFCFAGHETGRLSGAADTQALLRNDQVYQPLRDRDDAQYSHLGGNWARNK

SEQ ID NO: 15183 - protein, 478 aa, Artificial Sequence
  Synthetic Polypeptide
MDWIWRILFLVGAATGAHSGPEVAALEKEVAALEKEVAALEKEVAALEKGSGGGGSGGGGSGGGGSFEQVQLQQPGAELVKPGASVKMSCKASGYAFSSYWINWMKQKPGQGLEWIGQIYPGDGDTNYNGKFKGRATLTADTSSSTAYMQLSSLTSEDSAVYFCARSITTVVGCAMDYWGQGTSVTVSSGGGGSGGGGSGGGGSDIQMTQSPSSLSASVGDRVTITCKASDHINNWLAWYQQKPGQAPKLLIYGATTLETGVPSRFSGSGSGTDYTLTISSLQPEDFATYYCQQSWNTPWTFGQGTKLEIKRTRGGGSQSIKGNHLVKVYDYQEDGSVLLTCDAEAKNITWFKDGKMIGFLTEDKKKWNLGSNAKDPRGMYQCKGSQNKSKPLQVYYRMCQNCIELNAATISGFLFAEIVSIFVLAVGVYFIAGQDGVRQSRASDKQTLLPNDQLYQPLKDREDDQYSHLQGNQLRRN

SEQ ID NO: 15184 - protein, 461 aa, Artificial Sequence
  Synthetic Polypeptide
MDWIWRILFLVGAATGAHSGPEVAALEKEVAALEKEVAALEKEVAALEKGSGGGGSGGGGSGGGGSFEQVQLQQPGAELVKPGASVKMSCKASGYAFSSYWINWMKQKPGQGLEWIGQIYPGDGDTNYNGKFKGRATLTADTSSSTAYMQLSSLTSEDSAVYFCARSITTVVGCAMDYWGQGTSVTVSSGGGGSGGGGSGGGGSDIQMTQSPSSLSASVGDRVTITCKASDHINNWLAWYQQKPGQAPKLLIYGATTLETGVPSRFSGSGSGTDYTLTISSLQPEDFATYYCQQSWNTPWTFGQGTKLEIKRTRGGGSQSFGLLDPKLCYLLDGILFIYGVILTALFLRVKFSRSADAPAYQQGQNQLYNELNLGRREEYDVLDKRRGRDPEMGGKPQRRKNPQEGLYNELQKDKMAEAYSEIGMKGERRRGKGHDGLYQGLSTATKDTYDALHMQALPPR

SEQ ID NO: 15185 - protein, 497 aa, Artificial Sequence
  Synthetic Polypeptide
MDWIWRILFLVGAATGAHSGPEVAALEKEVAALEKEVAALEKEVAALEKGSGGGGSGGGGSGGGGSFEQVQLQQPGAELVKPGASVKMSCKASGYAFSSYWINWMKQKPGQGLEWIGQIYPGDGDTNYNGKFKGRATLTADTSSSTAYMQLSSLTSEDSAVYFCARSITTVVGCAMDYWGQGTSVTVSSTRIQNPDPAVYQLRDSKSSDKSVCLFTDFDSQTNVSQSKDSDVYITDKTVLDMRSMDFKSNSAVAWSNKSDFACANAFNNSIIPEDTFFPSPESSCDVKLVEKSFETDTNLNFQNLSVIGFRILLLKVAGFNLLMTLRLWSSRAKRSGSGVKQTLNFDLLKLAGDVESNPGPSRGHMAKPLSQEESTLIERATATINSIPISEDYSVASAALSSDGRIFTGVNVYHFTGGPCAELVVLGTAAAAAAGNLTCIVAIGNENRGILSPCGRCRQVLLDLHPGIKAIVKDSDGQPTAVGIRELLPSGYVWEG

SEQ ID NO: 15186 - protein, 331 aa, Artificial Sequence
  Synthetic Polypeptide
MDWIWRILFLVGAATGAHSGPEVAALEKEVAALEKEVAALEKEVAALEKGSGGGGSGGGGSGGGGSFEQVQLQQPGAELVKPGASVKMSCKASGYAFSSYWINWMKQKPGQGLEWIGQIYPGDGDTNYNGKFKGRATLTADTSSSTAYMQLSSLTSEDSAVYFCARSITTVVGCAMDYWGQGTSVTVSSTRIQNPDPAVYQLRDSKSSDKSVCLFTDFDSQTNVSQSKDSDVYITDKTVLDMRSMDFKSNSAVAWSNKSDFACANAFNNSIIPEDTFFPSPESSCDVKLVEKSFETDTNLNFQNLSVIGFRILLLKVAGFNLLMTLRLWSS

SEQ ID NO: 15187 - protein, 509 aa, Artificial Sequence
  Synthetic Polypeptide
MDWIWRILFLVGAATGAHSGPEVAALEKEVAALEKEVAALEKEVAALEKGSGGGGSGGGGSGGGGSFEQVQLQQPGAELVKPGASVKMSCKASGYAFSSYWINWMKQKPGQGLEWIGQIYPGDGDTNYNGKFKGRATLTADTSSSTAYMQLSSLTSEDSAVYFCARSITTVVGCAMDYWGQGTSVTVSSTREQKLISEEDGSGIQNPDPAVYQLRDSKSSDKSVCLFTDFDSQTNVSQSKDSDVYITDKCVLDMRSMDFKSNSAVAWSNKSDFACANAFNNSIIPEDTFFPSPESSCDVKLVEKSFETDTNLNFQNLSVIGFRILLLKVAGFNLLMTLRLWSSRAKRSGSGVKQTLNFDLLKLAGDVESNPGPSRGHMAKPLSQEESTLIERATATINSIPISEDYSVASAALSSDGRIFTGVNVYHFTGGPCAELVVLGTAAAAAAGNLTCIVAIGNENRGILSPCGRCRQVLLDLHPGIKAIVKDSDGQPTAVGIRELLPSGYVWEG

SEQ ID NO: 15188 - protein, 343 aa, Artificial Sequence
  Synthetic Polypeptide
MDWIWRILFLVGAATGAHSGPEVAALEKEVAALEKEVAALEKEVAALEKGSGGGGSGGGGSGGGGSFEQVQLQQPGAELVKPGASVKMSCKASGYAFSSYWINWMKQKPGQGLEWIGQIYPGDGDTNYNGKFKGRATLTADTSSSTAYMQLSSLTSEDSAVYFCARSITTVVGCAMDYWGQGTSVTVSSTREQKLISEEDGSGIQNPDPAVYQLRDSKSSDKSVCLFTDFDSQTNVSQSKDSDVYITDKCVLDMRSMDFKSNSAVAWSNKSDFACANAFNNSIIPEDTFFPSPESSCDVKLVEKSFETDTNLNFQNLSVIGFRILLLKVAGFNLLMTLRLWSS

SEQ ID NO: 15189 - protein, 641 aa, Artificial Sequence; identical to SEQ ID NO: 14935
  Synthetic Polypeptide

SEQ ID NO: 15190 - protein, 647 aa, Artificial Sequence; identical to SEQ ID NO: 14936
  Synthetic Polypeptide

SEQ ID NO: 15191 - protein, 1060 aa, Artificial Sequence; identical to SEQ ID NO: 14937
  Synthetic Polypeptide

SEQ ID NO: 15192 - protein, 1000 aa, Artificial Sequence; identical to SEQ ID NO: 14938
  Synthetic Polypeptide

SEQ ID NO: 15193 - protein, 999 aa, Artificial Sequence; identical to SEQ ID NO: 14939
  Synthetic Polypeptide

SEQ ID NO: 15194 - protein, 766 aa, Artificial Sequence; identical to SEQ ID NO: 14940
  Synthetic Polypeptide

SEQ ID NO: 15195 - protein, 991 aa, Artificial Sequence; identical to SEQ ID NO: 14941
  Synthetic Polypeptide

SEQ ID NO: 15196 - protein, 770 aa, Artificial Sequence; identical to SEQ ID NO: 14942
  Synthetic Polypeptide

SEQ ID NO: 15197 - protein, 992 aa, Artificial Sequence; identical to SEQ ID NO: 14943
  Synthetic Polypeptide

SEQ ID NO: 15198 - protein, 1044 aa, Artificial Sequence; identical to SEQ ID NO: 14944
  Synthetic Polypeptide

SEQ ID NO: 15199 - protein, 1045 aa, Artificial Sequence; identical to SEQ ID NO: 14945
  Synthetic Polypeptide

SEQ ID NO: 15200 - protein, 999 aa, Artificial Sequence; identical to SEQ ID NO: 14946
  Synthetic Polypeptide

SEQ ID NO: 15201 - protein, 1081 aa, Artificial Sequence; identical to SEQ ID NO: 14947
  Synthetic Polypeptide

SEQ ID NO: 15202 - protein, 1099 aa, Artificial Sequence; identical to SEQ ID NO: 14948
  Synthetic Polypeptide

SEQ ID NO: 15203 - protein, 1036 aa, Artificial Sequence; identical to SEQ ID NO: 14949
  Synthetic Polypeptide

SEQ ID NO: 15204 - protein, 774 aa, Artificial Sequence; identical to SEQ ID NO: 14950
  Synthetic Polypeptide

SEQ ID NO: 15205 - protein, 1051 aa, Artificial Sequence; identical to SEQ ID NO: 14951
  Synthetic Polypeptide

SEQ ID NO: 15206 - protein, 1176 aa, Artificial Sequence; identical to SEQ ID NO: 14952
  Synthetic Polypeptide

SEQ ID NO: 15207 - protein, 962 aa, Artificial Sequence; identical to SEQ ID NO: 14953
  Synthetic Polypeptide

SEQ ID NO: 15208 - protein, 962 aa, Artificial Sequence; identical to SEQ ID NO: 14954
  Synthetic Polypeptide

SEQ ID NO: 15209 - protein, 1033 aa, Artificial Sequence; identical to SEQ ID NO: 14955
  Synthetic Polypeptide

SEQ ID NO: 15210 - protein, 1074 aa, Artificial Sequence; identical to SEQ ID NO: 14956
  Synthetic Polypeptide

SEQ ID NO: 15211 - protein, 1035 aa, Artificial Sequence; identical to SEQ ID NO: 14957
  Synthetic Polypeptide

SEQ ID NO: 15212 - protein, 1077 aa, Artificial Sequence; identical to SEQ ID NO: 14958
  Synthetic Polypeptide

SEQ ID NO: 15213 - protein, 967 aa, Artificial Sequence; identical to SEQ ID NO: 14959
  Synthetic Polypeptide

SEQ ID NO: 15214 - protein, 792 aa, Artificial Sequence; identical to SEQ ID NO: 14960
  Synthetic Polypeptide

SEQ ID NO: 15215 - protein, 770 aa, Artificial Sequence; identical to SEQ ID NO: 14961
  Synthetic Polypeptide

SEQ ID NO: 15216 - protein, 770 aa, Artificial Sequence; identical to SEQ ID NO: 14962
  Synthetic Polypeptide

SEQ ID NO: 15217 - protein, 596 aa, Artificial Sequence; identical to SEQ ID NO: 14963
  Synthetic Polypeptide

SEQ ID NO: 15218 - protein, 561 aa, Artificial Sequence; identical to SEQ ID NO: 14964
  Synthetic Polypeptide

SEQ ID NO: 15219 - protein, 571 aa, Artificial Sequence; identical to SEQ ID NO: 14965
  Synthetic Polypeptide

SEQ ID NO: 15220 - protein, 554 aa, Artificial Sequence; identical to SEQ ID NO: 14966
  Synthetic Polypeptide

SEQ ID NO: 15221 - protein, 787 aa, Artificial Sequence; identical to SEQ ID NO: 14967
  Synthetic Polypeptide

SEQ ID NO: 15222 - protein, 819 aa, Artificial Sequence; identical to SEQ ID NO: 14968
  Synthetic Polypeptide

SEQ ID NO: 15223 - protein, 869 aa, Artificial Sequence; identical to SEQ ID NO: 14969
  Synthetic Polypeptide

SEQ ID NO: 15224 - protein, 683 aa, Artificial Sequence; identical to SEQ ID NO: 14970
  Synthetic Polypeptide

SEQ ID NO: 15225 - protein, 453 aa, Artificial Sequence; identical to SEQ ID NO: 14971
  Synthetic Polypeptide

SEQ ID NO: 15226 - protein, 450 aa, Artificial Sequence; identical to SEQ ID NO: 14845
  Synthetic Polypeptide

SEQ ID NO: 15227 - protein, 284 aa, Artificial Sequence; identical to SEQ ID NO: 14846
  Synthetic Polypeptide

SEQ ID NO: 15228 - protein, 701 aa, Artificial Sequence; identical to SEQ ID NO: 14974
  Synthetic Polypeptide

SEQ ID NO: 15229 - protein, 471 aa, Artificial Sequence; identical to SEQ ID NO: 14975
  Synthetic Polypeptide

SEQ ID NO: 15230 - protein, 462 aa, Artificial Sequence; identical to SEQ ID NO: 14849
  Synthetic Polypeptide

SEQ ID NO: 15231 - protein, 296 aa, Artificial Sequence; identical to SEQ ID NO: 14850
  Synthetic Polypeptide

SEQ ID NO: 15232 - protein, 787 aa, Artificial Sequence; identical to SEQ ID NO: 14978
  Synthetic Polypeptide

SEQ ID NO: 15233 - protein, 819 aa, Artificial Sequence; identical to SEQ ID NO: 14979
  Synthetic Polypeptide

SEQ ID NO: 15234 - protein, 1047 aa, Artificial Sequence
  Synthetic Polypeptide
MALPVTALLLPLALLLHAARPACQVQLVESGGGLVQAGDSVTLSCTASGRTFSSYALAWFRQRPGKEREFVAGLRWGGPTNYADSVKDRFTISGDSAKHTMYLQMNSLKPEDTAVYYCGYNPGGWAVPSQYEYDSWGQGTQVTVSSGTGGGGSGGGGSGGGGSEFDIQMTQSPSSLSASVGDRVTITCKASDHINNWLAWYQQKPGQAPKLLIYGATTLETGVPSRFSGSGSGTDYTLTISSLQPEDFATYYCQQSWNTPWTFGQGTKLEIKRLEIQNPDPAVYQLRDSKSSDKSVCLFTDFDSQTNVSQSKDSDVYITDKCVLDMRSMDFKSNSAVAWSNKSDFACANAFNNSIIPEDTFFPSSDVPCDVKLVEKSFETDTNLNFQNLSVIGFRILLLKVAGFNLLMTLRLWSSRAKRSGSGVKQTLNFDLLKLAGDVESNPGPTSMDWIWRILFLVGAATGAHSGPEVAALEKEVAALEKEVAALEKEVAALEKGSGGGGSGGGGSGGGGSFEQVQLQQPGAELVKPGASVKMSCKASGYAFSSYWINWMKQKPGQGLEWIGQIYPGDGDTNYNGKFKGRATLTADTSSSTAYMQLSSLTSEDSAVYFCARSITTVVGCAMDYWGQGTSVTVSSTREDLKNVFPPEVAVFEPSKAEIAHTQKATLVCLATGFYPDHVELSWWVNGKEVHSGVCTDPQPLKEQPALNDSRYCLSSRLRVSATFWQNPRNHFRCQVQFYGLSENDEWTQDRAKPVTQIVSAEAWGRADCGITSASYHQGVLSATILYEILLGKATLYAVLVSALVLMAMVKRKDSRGRAKRSGSGATNFSLLKQAGDVEENPGPSRGHMTEYKPTVRLATRDDVPRAVRTLAAAFADYPATRHTVDPDRHIERVTELQELFLTRVGLDIGKVWVADDGAAVAVWTTPESVEAGAVFAEIGPRMAELSGSRLAAQQQMEGLLAPHRPKEPAWFLATVGVSPDHQGKGLGSAVVLPGVEAAERAGVPAFLETSAPRNLPFYERLGFTVTADVEVPEGPRTWCMTRKPGA

SEQ ID NO: 15235 - protein, 1046 aa, Artificial Sequence
  Synthetic Polypeptide
MALPVTALLLPLALLLHAARPACQVQLVESGGGLVQAGDSVTLSCTASGRTFSSYALAWFRQRPGKEREFVAGLRWGGPTNYADSVKDRFTISGDSAKHTMYLQMNSLKPEDTAVYYCGYNPGGWAVPSQYEYDSWGQGTQVTVSSGTGGGGSGGGGSGGGGSEFDIQMTQSPSSLSASVGDRVTITCKASDHINNWLAWYQQKPGQAPKLLIYGATTLETGVPSRFSGSGSGTDYTLTISSLQPEDFATYYCQQSWNTPWTFGQGTKLEIKRLEDLKNVFPPEVAVFEPSKAEIAHTQKATLVCLATGFYPDHVELSWWVNGKEVHSGVCTDPQPLKEQPALNDSRYCLSSRLRVSATFWQNPRNHFRCQVQFYGLSENDEWTQDRAKPVTQIVSAEAWGRADCGITSASYHQGVLSATILYEILLGKATLYAVLVSALVLMAMVKRKDSRGRAKRSGSGATNFSLLKQAGDVEENPGPTSMDWIWRILFLVGAATGAHSGPEVAALEKEVAALEKEVAALEKEVAALEKGSGGGGSGGGGSGGGGSFEQVQLQQPGAELVKPGASVKMSCKASGYAFSSYWINWMKQKPGQGLEWIGQIYPGDGDTNYNGKFKGRATLTADTSSSTAYMQLSSLTSEDSAVYFCARSITTVVGCAMDYWGQGTSVTVSSTRIQNPDPAVYQLRDSKSSDKSVCLFTDFDSQTNVSQSKDSDVYITDKCVLDMRSMDFKSNSAVAWSNKSDFACANAFNNSIIPEDTFFPSSDVPCDVKLVEKSFETDTNLNFQNLSVIGFRILLLKVAGFNLLMTLRLWSSRAKRSGSGVKQTLNFDLLKLAGDVESNPGPSRGHMTEYKPTVRLATRDDVPRAVRTLAAAFADYPATRHTVDPDRHIERVTELQELFLTRVGLDIGKVWVADDGAAVAVWTTPESVEAGAVFAEIGPRMAELSGSRLAAQQQMEGLLAPHRPKEPAWFLATVGVSPDHQGKGLGSAVVLPGVEAAERAGVPAFLETSAPRNLPFYERLGFTVTADVEVPEGPRTWCMTRKPGA

SEQ ID NO: 15236 - protein, 1046 aa, Artificial Sequence
  Synthetic Polypeptide
MALPVTALLLPLALLLHAARPACQVQLVESGGGLVQAGDSVTLSCTASGRTFSSYALAWFRQRPGKEREFVAGLRWGGPTNYADSVKDRFTISGDSAKHTMYLQMNSLKPEDTAVYYCGYNPGGWAVPSQYEYDSWGQGTQVTVSSGTGGGGSGGGGSGGGGSEFDIQMTQSPSSLSASVGDRVTITCKASDHINNWLAWYQQKPGQAPKLLIYGATTLETGVPSRFSGSGSGTDYTLTISSLQPEDFATYYCQQSWNTPWTFGQGTKLEIKRLEDLKNVFPPEVAVFEPSEAEISHTQKATLVCLATGFYPDHVELSWWVNGKEVHSGVCTDPQPLKEQPALNDSRYCLSSRLRVSATFWQNPRNHFRCQVQFYGLSENDEWTQDRAKPVTQIVSAEAWGRADCGFTSESYQQGVLSATILYEILLGKATLYAVLVSALVLMAMVKRKDSRGRAKRSGSGATNFSLLKQAGDVEENPGPTSMDWIWRILFLVGAATGAHSGPEVAALEKEVAALEKEVAALEKEVAALEKGSGGGGSGGGGSGGGGSFEQVQLQQPGAELVKPGASVKMSCKASGYAFSSYWINWMKQKPGQGLEWIGQIYPGDGDTNYNGKFKGRATLTADTSSSTAYMQLSSLTSEDSAVYFCARSITTVVGCAMDYWGQGTSVTVSSTRIQNPDPAVYQLRDSKSSDKSVCLFTDFDSQTNVSQSKDSDVYITDKCVLDMRSMDFKSNSAVAWSNKSDFACANAFNNSIIPEDTFFPSPESSCDVKLVEKSFETDTNLNFQNLSVIGFRILLLKVAGFNLLMTLRLWSSRAKRSGSGVKQTLNFDLLKLAGDVESNPGPSRGHMTEYKPTVRLATRDDVPRAVRTLAAAFADYPATRHTVDPDRHIERVTELQELFLTRVGLDIGKVWVADDGAAVAVWTTPESVEAGAVFAEIGPRMAELSGSRLAAQQQMEGLLAPHRPKEPAWFLATVGVSPDHQGKGLGSAVVLPGVEAAERAGVPAFLETSAPRNLPFYERLGFTVTADVEVPEGPRTWCMTRKPGA

SEQ ID NO: 15237 - protein, 813 aa, Artificial Sequence
  Synthetic Polypeptide
MALPVTALLLPLALLLHAARPACQVQLVESGGGLVQAGDSVTLSCTASGRTFSSYALAWFRQRPGKEREFVAGLRWGGPTNYADSVKDRFTISGDSAKHTMYLQMNSLKPEDTAVYYCGYNPGGWAVPSQYEYDSWGQGTQVTVSSGTGGGGSGGGGSGGGGSEFDIQMTQSPSSLSASVGDRVTITCKASDHINNWLAWYQQKPGQAPKLLIYGATTLETGVPSRFSGSGSGTDYTLTISSLQPEDFATYYCQQSWNTPWTFGQGTKLEIKRLEDLKNVFPPEVAVFEPSEAEISHTQKATLVCLATGFYPDHVELSWWVNGKEVHSGVCTDPQPLKEQPALNDSRYCLSSRLRVSATFWQNPRNHFRCQVQFYGLSENDEWTQDRAKPVTQIVSAEAWGRADCGFTSESYQQGVLSATILYEILLGKATLYAVLVSALVLMAMVKRKDSRGRAKRSGSGATNFSLLKQAGDVEENPGPTSMDWIWRILFLVGAATGAHSGPEVAALEKEVAALEKEVAALEKEVAALEKGSGGGGSGGGGSGGGGSFEQVQLQQPGAELVKPGASVKMSCKASGYAFSSYWINWMKQKPGQGLEWIGQIYPGDGDTNYNGKFKGRATLTADTSSSTAYMQLSSLTSEDSAVYFCARSITTVVGCAMDYWGQGTSVTVSSTRIQNPDPAVYQLRDSKSSDKSVCLFTDFDSQTNVSQSKDSDVYITDKCVLDMRSMDFKSNSAVAWSNKSDFACANAFNNSIIPEDTFFPSPESSCDVKLVEKSFETDTNLNFQNLSVIGFRILLLKVAGFNLLMTLRLWSS

SEQ ID NO: 15238 - protein, 1038 aa, Artificial Sequence
  Synthetic Polypeptide
MALPVTALLLPLALLLHAARPACQVQLVESGGGLVQAGDSVTLSCTASGRTFSSYALAWFRQRPGKEREFVAGLRWGGPTNYADSVKDRFTISGDSAKHTMYLQMNSLKPEDTAVYYCGYNPGGWAVPSQYEYDSWGQGTQVTVSSGTGGGGSGGGGSGGGGSEFDIQMTQSPSSLSASVGDRVTITCKASDHINNWLAWYQQKPGQAPKLLIYGATTLETGVPSRFSGSGSGTDYTLTISSLQPEDFATYYCQQSWNTPWTFGQGTKLEIKRLEDLKNVFPPEVAVFEPSEAEISHTQKATLVCLATGFYPDHVELSWWVNGKEVHSGVCTDPQPLKEQPALNDSRYCLSSRLRVSATFWQNPRNHFRCQVQFYGLSENDEWTQDRAKPVTQIVSAEAWGRADCGFTSESYQQGVLSATILYEILLGKATLYAVLVSALVLMAMVKRKDSRGRAKRSGSGATNFSLLKQAGDVEENPGPTSMDWIWRILFLVGAATGAHSGPEVAALEKEVAALEKEVAALEKEVAALEKGSGGGGSGGGGSGGGGSFEQVQLQQPGAELVKPGASVKMSCKASGYAFSSYWINWMKQKPGQGLEWIGQIYPGDGDTNYNGKFKGRATLTADTSSSTAYMQLSSLTSEDSAVYFCARSITTVVGCAMDYWGQGTSVTVSSTRIQNPDPAVYQLRDSKSSDKSVCLFTDFDSQTNVSQSKDSDVYITDKCVLDMRSMDFKSNSAVAWSNKSDFACANAFNNSIIPEDTFFPSPESSCDVKLVEKSFETDTNLNFQNLSVIGFRILLLKVAGFNLLMTLRLWSSRAKRSGSGVKQTLNFDLLKLAGDVESNPGPSRGGIHTMATYEVLCEVARKLGTDDREVVLFLLNVFIPQPTLAQLIGALRALKEEGRLTFPLLAECLFRAGRRDLLRDLLHLDPRFLERHLAGTMSYFSPYQLTVLHVDGELCARDIRSLIFLSKDTIGSRSTPQTFLHWVYCMENLDLLGPTDVDALMSMLRSLSRVDLQRQVQTLMGLHLSGPSHSQHYRHTP

SEQ ID NO: 15239 - protein, 817 aa, Artificial Sequence
  Synthetic Polypeptide
MALPVTALLLPLALLLHAARPACQVQLVESGGGLVQAGDSVTLSCTASGRTFSSYALAWFRQRPGKEREFVAGLRWGGPTNYADSVKDRFTISGDSAKHTMYLQMNSLKPEDTAVYYCGYNPGGWAVPSQYEYDSWGQGTQVTVSSGTGGGGSGGGGSGGGGSEFDIQMTQSPSSLSASVGDRVTITCKASDHINNWLAWYQQKPGQAPKLLIYGATTLETGVPSRFSGSGSGTDYTLTISSLQPEDFATYYCQQSWNTPWTFGQGTKLEIKRLEIQNPDPAVYQLRDSKSSDKSVCLFTDFDSQTNVSQSKDSDVYITDKCVLDMRSMDFKSNSAVAWSNKSDFACANAFNNSIIPEDTFFPSPESSCDVKLVEKSFETDTNLNFQNLSVIGFRILLLKVAGFNLLMTLRLWSSRAKRSGSGVKQTLNFDLLKLAGDVESNPGPTSMDWIWRILFLVGAATGAHSGPEVAALEKEVAALEKEVAALEKEVAALEKGSGGGGSGGGGSGGGGSFEQVQLQQPGAELVKPGASVKMSCKASGYAFSSYWINWMKQKPGQGLEWIGQIYPGDGDTNYNGKFKGRATLTADTSSSTAYMQLSSLTSEDSAVYFCARSITTVVGCAMDYWGQGTSVTVSSTREDLKNVFPPEVAVFEPSEAEISHTQKATLVCLATGFYPDHVELSWWVNGKEVHSGVCTDPQPLKEQPALNDSRYCLSSRLRVSATFWQNPRNHFRCQVQFYGLSENDEWTQDRAKPVTQIVSAEAWGRADCGFTSESYQQGVLSATILYEILLGKATLYAVLVSALVLMAMVKRKDSRG

SEQ ID NO: 15240 - protein, 1039 aa, Artificial Sequence
  Synthetic Polypeptide
MALPVTALLLPLALLLHAARPACQVQLVESGGGLVQAGDSVTLSCTASGRTFSSYALAWFRQRPGKEREFVAGLRWGGPTNYADSVKDRFTISGDSAKHTMYLQMNSLKPEDTAVYYCGYNPGGWAVPSQYEYDSWGQGTQVTVSSGTGGGGSGGGGSGGGGSEFDIQMTQSPSSLSASVGDRVTITCKASDHINNWLAWYQQKPGQAPKLLIYGATTLETGVPSRFSGSGSGTDYTLTISSLQPEDFATYYCQQSWNTPWTFGQGTKLEIKRLEIQNPDPAVYQLRDSKSSDKSVCLFTDFDSQTNVSQSKDSDVYITDKCVLDMRSMDFKSNSAVAWSNKSDFACANAFNNSIIPEDTFFPSPESSCDVKLVEKSFETDTNLNFQNLSVIGFRILLLKVAGFNLLMTLRLWSSRAKRSGSGVKQTLNFDLLKLAGDVESNPGPTSMDWIWRILFLVGAATGAHSGPEVAALEKEVAALEKEVAALEKEVAALEKGSGGGGSGGGGSGGGGSFEQVQLQQPGAELVKPGASVKMSCKASGYAFSSYWINWMKQKPGQGLEWIGQIYPGDGDTNYNGKFKGRATLTADTSSSTAYMQLSSLTSEDSAVYFCARSITTVVGCAMDYWGQGTSVTVSSTREDLKNVFPPEVAVFEPSEAEISHTQKATLVCLATGFYPDHVELSWWVNGKEVHSGVCTDPQPLKEQPALNDSRYCLSSRLRVSATFWQNPRNHFRCQVQFYGLSENDEWTQDRAKPVTQIVSAEAWGRADCGFTSESYQQGVLSATILYEILLGKATLYAVLVSALVLMAMVKRKDSRGRAKRSGSGATNFSLLKQAGDVEENPGPSRGGIHTMATYEVLCEVARKLGTDDREVVLFLLNVFIPQPTLAQLIGALRALKEEGRLTFPLLAECLFRAGRRDLLRDLLHLDPRFLERHLAGTMSYFSPYQLTVLHVDGELCARDIRSLIFLSKDTIGSRSTPQTFLHWVYCMENLDLLGPTDVDALMSMLRSLSRVDLQRQVQTLMGLHLSGPSHSQHYRHTP

SEQ ID NO: 15241 - protein, 1046 aa, Artificial Sequence
  Synthetic Polypeptide
MALPVTALLLPLALLLHAARPACQVQLVESGGGLVQAGDSVTLSCTASGRTFSSYALAWFRQRPGKEREFVAGLRWGGPTNYADSVKDRFTISGDSAKHTMYLQMNSLKPEDTAVYYCGYNPGGWAVPSQYEYDSWGQGTQVTVSSGTGGGGSGGGGSGGGGSEFDIQMTQSPSSLSASVGDRVTITCKASDHINNWLAWYQQKPGQAPKLLIYGATTLETGVPSRFSGSGSGTDYTLTISSLQPEDFATYYCQQSWNTPWTFGQGTKLEIKRLEDLKNVFPPEVAVFEPSEAEISHTQKATLVCLATGFYPDHVELSWWVNGKEVHSGVSTDPQPLKEQPALNDSRYCLSSRLRVSATFWQNPRNHFRCQVQFYGLSENDEWTQDRAKPVTQIVSAEAWGRADCGFTSESYQQGVLSATILYEILLGKATLYAVLVSALVLMAMVKRKDSRGRAKRSGSGATNFSLLKQAGDVEENPGPTSMDWIWRILFLVGAATGAHSGPEVAALEKEVAALEKEVAALEKEVAALEKGSGGGGSGGGGSGGGGSFEQVQLQQPGAELVKPGASVKMSCKASGYAFSSYWINWMKQKPGQGLEWIGQIYPGDGDTNYNGKFKGRATLTADTSSSTAYMQLSSLTSEDSAVYFCARSITTVVGCAMDYWGQGTSVTVSSTRIQNPDPAVYQLRDSKSSDKSVCLFTDFDSQTNVSQSKDSDVYITDKTVLDMRSMDFKSNSAVAWSNKSDFACANAFNNSIIPEDTFFPSPESSCDVKLVEKSFETDTNLNFQNLSVIGFRILLLKVAGFNLLMTLRLWSSRAKRSGSGVKQTLNFDLLKLAGDVESNPGPSRGHMTEYKPTVRLATRDDVPRAVRTLAAAFADYPATRHTVDPDRHIERVTELQELFLTRVGLDIGKVWVADDGAAVAVWTTPESVEAGAVFAEIGPRMAELSGSRLAAQQQMEGLLAPHRPKEPAWFLATVGVSPDHQGKGLGSAVVLPGVEAAERAGVPAFLETSAPRNLPFYERLGFTVTADVEVPEGPRTWCMTRKPGA

SEQ ID NO: 15242 - protein, 1128 aa, Artificial Sequence
  Synthetic Polypeptide
MALPVTALLLPLALLLHAARPACQVQLVESGGGLVQAGDSVTLSCTASGRTFSSYALAWFRQRPGKEREFVAGLRWGGPTNYADSVKDRFTISGDSAKHTMYLQMNSLKPEDTAVYYCGYNPGGWAVPSQYEYDSWGQGTQVTVSSGTGGGGSGGGGSGGGGSEFDIQMTQSPSSLSASVGDRVTITCKASDHINNWLAWYQQKPGQAPKLLIYGATTLETGVPSRFSGSGSGTDYTLTISSLQPEDFATYYCQQSWNTPWTFGQGTKLEIKRLEDLKNVFPPEVAVFEPSEAEISHTQKATLVCLATGFYPDHVELSWWVNGKEVHSGVSTDPQPLKEQPALNDSRYCLSSRLRVSATFWQNPRNHFRCQVQFYGLSENDEWTQDRAKPVTQIVSAEAWGRADCGFTSESYQQGVLSATILYEILLGKATLYAVLVSALVLMAMVKRKDSRGRAKRSGSGATNFSLLKQAGDVEENPGPTSMDWIWRILFLVGAATGAHSGPEVAALEKEVAALEKEVAALEKEVAALEKGSGGGGSGGGGSGGGGSFEQVQLQQPGAELVKPGASVKMSCKASGYAFSSYWINWMKQKPGQGLEWIGQIYPGDGDTNYNGKFKGRATLTADTSSSTAYMQLSSLTSEDSAVYFCARSITTVVGCAMDYWGQGTSVTVSSTREQKLISEEDGSGTPFPSLAPPIMLLVDGKQQMVVVCLVLDVAPPGLDSPIWFSAGNGSALDAFTYGPSPATDGTWTNLAHLSLPSEELASWEPLVCHTGPGAEGHSRSTQPMHLSGEASTARTCPQEPLRGTPGGALWLGVLRLLLFKLLLFDLLLTCSCLCDPAGPLPSPATTTRLRALGSHRLHPATETGGREATSSPRPQPRDRRWGDTPPGRKPGSPVRAKRSGSGVKQTLNFDLLKLAGDVESNPGPSRGHMTEYKPTVRLATRDDVPRAVRTLAAAFADYPATRHTVDPDRHIERVTELQELFLTRVGLDIGKVWVADDGAAVAVWTTPESVEAGAVFAEIGPRMAELSGSRLAAQQQMEGLLAPHRPKEPAWFLATVGVSPDHQGKGLGSAVVLPGVEAAERAGVPAFLETSAPRNLPFYERLGFTVTADVEVPEGPRTWCMTRKPGA

SEQ ID NO: 15243 - protein, 1083 aa, Artificial Sequence
  Synthetic Polypeptide
MALPVTALLLPLALLLHAARPACQVQLVESGGGLVQAGDSVTLSCTASGRTFSSYALAWFRQRPGKEREFVAGLRWGGPTNYADSVKDRFTISGDSAKHTMYLQMNSLKPEDTAVYYCGYNPGGWAVPSQYEYDSWGQGTQVTVSSGTGGGGSGGGGSGGGGSEFDIQMTQSPSSLSASVGDRVTITCKASDHINNWLAWYQQKPGQAPKLLIYGATTLETGVPSRFSGSGSGTDYTLTISSLQPEDFATYYCQQSWNTPWTFGQGTKLEIKRLEGKPIPNPLLGLDSTGSGDKQLDADVSPKPTIFLPSIAETKLQKAGTYLCLLEKFFPDVIKIHWQEKKSNTILGSQEGNTMKTNDTYMKFSWLTVPEKSLDKEHRCIVRHENNKNGVDQEIIFPPIKTDVITMDPKDNCSKDANDTLLLQLTNTSAYYMYLLLLLKSVVYFAIITCCLLRRTAFCCNGEKSRAKRSGSGATNFSLLKQAGDVEENPGPTSMDWIWRILFLVGAATGAHSGPEVAALEKEVAALEKEVAALEKEVAALEKGSGGGGSGGGGSGGGGSFEQVQLQQPGAELVKPGASVKMSCKASGYAFSSYWINWMKQKPGQGLEWIGQIYPGDGDTNYNGKFKGRATLTADTSSSTAYMQLSSLTSEDSAVYFCARSITTVVGCAMDYWGQGTSVTVSSTREQKLISEEDGSGSQPHTKPSVFVMKNGTNVACLVKEFYPKDIRINLVSSKKITEFDPAIVISPSGKYNAVKLGKYEDSNSVTCSVQHDNKTVHSTDFEVKTDSTDHVKPKETENTKQPSKSCHKPKAIVHTEKVNMMSLTVLGLRMLFAKTVAVNFLLTAKLFFLRAKRSGSGVKQTLNFDLLKLAGDVESNPGPSRGHMTEYKPTVRLATRDDVPRAVRTLAAAFADYPATRHTVDPDRHIERVTELQELFLTRVGLDIGKVWVADDGAAVAVWTTPESVEAGAVFAEIGPRMAELSGSRLAAQQQMEGLLAPHRPKEPAWFLATVGVSPDHQGKGLGSAVVLPGVEAAERAGVPAFLETSAPRNLPFYERLGFTVTADVEVPEGPRTWCMTRKPGA

SEQ ID NO: 15244 - protein, 821 aa, Artificial Sequence
  Synthetic Polypeptide
MALPVTALLLPLALLLHAARPACQVQLVESGGGLVQAGDSVTLSCTASGRTFSSYALAWFRQRPGKEREFVAGLRWGGPTNYADSVKDRFTISGDSAKHTMYLQMNSLKPEDTAVYYCGYNPGGWAVPSQYEYDSWGQGTQVTVSSGTGGGGSGGGGSGGGGSEFDIQMTQSPSSLSASVGDRVTITCKASDHINNWLAWYQQKPGQAPKLLIYGATTLETGVPSRFSGSGSGTDYTLTISSLQPEDFATYYCQQSWNTPWTFGQGTKLEIKRLESQPHTKPSVFVMKNGTNVACLVKEFYPKDIRINLVSSKKITEFDPAIVISPSGKYNAVKLGKYEDSNSVTCSVQHDNKTVHSTDFEVKTDSTDHVKPKETENTKQPSKSCHKPKAIVHTEKVNMMSLTVLGLRMLFAKTVAVNFLLTAKLFFLRAKRSGSGATNFSLLKQAGDVEENPGPTSMDWIWRILFLVGAATGAHSGPEVAALEKEVAALEKEVAALEKEVAALEKGSGGGGSGGGGSGGGGSFEQVQLQQPGAELVKPGASVKMSCKASGYAFSSYWINWMKQKPGQGLEWIGQIYPGDGDTNYNGKFKGRATLTADTSSSTAYMQLSSLTSEDSAVYFCARSITTVVGCAMDYWGQGTSVTVSSTRDKQLDADVSPKPTIFLPSIAETKLQKAGTYLCLLEKFFPDVIKIHWQEKKSNTILGSQEGNTMKTNDTYMKFSWLTVPEKSLDKEHRCIVRHENNKNGVDQEIIFPPIKTDVITMDPKDNCSKDANDTLLLQLTNTSAYYMYLLLLLKSVVYFAIITCCLLRRTAFCCNGEKS

SEQ ID NO: 15245 - protein, 1223 aa, Artificial Sequence
  Synthetic Polypeptide
MALPVTALLLPLALLLHAARPACQVQLVESGGGLVQAGDSVTLSCTASGRTFSSYALAWFRQRPGKEREFVAGLRWGGPTNYADSVKDRFTISGDSAKHTMYLQMNSLKPEDTAVYYCGYNPGGWAVPSQYEYDSWGQGTQVTVSSGTGGGGSGGGGSGGGGSEFDIQMTQSPSSLSASVGDRVTITCKASDHINNWLAWYQQKPGQAPKLLIYGATTLETGVPSRFSGSGSGTDYTLTISSLQPEDFATYYCQQSWNTPWTFGQGTKLEIKRGQPKANPTVTLFPPSSEELQANKATLVCLISDFYPGAVTVAWKADGSPVKAGVETTKPSKQSNNKYAASSYLSLTPEQWKSHRSYSCQVTHEGSTVEKTVAPTECSGSQSFGLLDPKLCYLLDGILFIYGVILTALFLRVKFSRSADAPAYQQGQNQLYNELNLGRREEYDVLDKRRGRDPEMGGKPQRRKNPQEGLYNELQKDKMAEAYSEIGMKGERRRGKGHDGLYQGLSTATKDTYDALHMQALPPRRAKRSGSGATNFSLLKQAGDVEENPGPTSMDWIWRILFLVGAATGAHSGPEVAALEKEVAALEKEVAALEKEVAALEKGSGGGGSGGGGSGGGGSFEQVQLQQPGAELVKPGASVKMSCKASGYAFSSYWINWMKQKPGQGLEWIGQIYPGDGDTNYNGKFKGRATLTADTSSSTAYMQLSSLTSEDSAVYFCARSITTVVGCAMDYWGQGTSVTVSSASTKGPSVFPLAPSSKSTSGGTAALGCLVKDYFPEPVTVSWNSGALTSGVHTFPAVLQSSGLYSLSSVVTVPSSSLGTQTYICNVNHKPSNTKVDKRVEPKSCGTQSFGLLDPKLCYLLDGILFIYGVILTALFLRVKFSRSADAPAYQQGQNQLYNELNLGRREEYDVLDKRRGRDPEMGGKPQRRKNPQEGLYNELQKDKMAEAYSEIGMKGERRRGKGHDGLYQGLSTATKDTYDALHMQALPPRRAKRSGSGVKQTLNFDLLKLAGDVESNPGPSRGHMTEYKPTVRLATRDDVPRAVRTLAAAFADYPATRHTVDPDRHIERVTELQELFLTRVGLDIGKVWVADDGAAVAVWTTPESVEAGAVFAEIGPRMAELSGSRLAAQQQMEGLLAPHRPKEPAWFLATVGVSPDHQGKGLGSAVVLPGVEAAERAGVPAFLETSAPRNLPFYERLGFTVTADVEVPEGPRTWCMTRKPGA

SEQ ID NO: 15246 - protein, 1009 aa, Artificial Sequence
  Synthetic Polypeptide
MALPVTALLLPLALLLHAARPACQVQLVESGGGLVQAGDSVTLSCTASGRTFSSYALAWFRQRPGKEREFVAGLRWGGPTNYADSVKDRFTISGDSAKHTMYLQMNSLKPEDTAVYYCGYNPGGWAVPSQYEYDSWGQGTQVTVSSGTGGGGSGGGGSGGGGSEFDIQMTQSPSSLSASVGDRVTITCKASDHINNWLAWYQQKPGQAPKLLIYGATTLETGVPSRFSGSGSGTDYTLTISSLQPEDFATYYCQQSWNTPWTFGQGTKLEIKRLEDLKNVFPPEVAVFEPSEAEISHTQKATLVCLATGFYPDHVELSWWVNGKEVHSGVSTDPQPLKEQPALNDSRYCLSSRLRVSATFWQNPRNHFRCQVQFYGLSENDEWTQDRAKPVTQIVSAEAWGRADCGSQSFGLLDPKLCYLLDGILFIYGVILTALFLRVKFSRSADAPAYQQGQNQLYNELNLGRREEYDVLDKRRGRDPEMGGKPQRRKNPQEGLYNELQKDKMAEAYSEIGMKGERRRGKGHDGLYQGLSTATKDTYDALHMQALPPRRAKRSGSGATNFSLLKQAGDVEENPGPTSMDWIWRILFLVGAATGAHSGPEVAALEKEVAALEKEVAALEKEVAALEKGSGGGGSGGGGSGGGGSFEQVQLQQPGAELVKPGASVKMSCKASGYAFSSYWINWMKQKPGQGLEWIGQIYPGDGDTNYNGKFKGRATLTADTSSSTAYMQLSSLTSEDSAVYFCARSITTVVGCAMDYWGQGTSVTVSSTRIQNPDPAVYQLRDSKSSDKSVCLFTDFDSQTNVSQSKDSDVYITDKTVLDMRSMDFKSNSAVAWSNKSDFACANAFNNSIIPEDTFFPSPESSCGTQSFGLLDPKLCYLLDGILFIYGVILTALFLRVKFSRSADAPAYQQGQNQLYNELNLGRREEYDVLDKRRGRDPEMGGKPQRRKNPQEGLYNELQKDKMAEAYSEIGMKGERRRGKGHDGLYQGLSTATKDTYDALHMQALPPR

SEQ ID NO: 15247 - protein, 1009 aa, Artificial Sequence
  Synthetic Polypeptide
MALPVTALLLPLALLLHAARPACQVQLVESGGGLVQAGDSVTLSCTASGRTFSSYALAWFRQRPGKEREFVAGLRWGGPTNYADSVKDRFTISGDSAKHTMYLQMNSLKPEDTAVYYCGYNPGGWAVPSQYEYDSWGQGTQVTVSSGTGGGGSGGGGSGGGGSEFDIQMTQSPSSLSASVGDRVTITCKASDHINNWLAWYQQKPGQAPKLLIYGATTLETGVPSRFSGSGSGTDYTLTISSLQPEDFATYYCQQSWNTPWTFGQGTKLEIKRLEDLKNVFPPEVAVFEPSKAEIAHTQKATLVCLATGFYPDHVELSWWVNGKEVHSGVCTDPQPLKEQPALNDSRYCLSSRLRVSATFWQNPRNHFRCQVQFYGLSENDEWTQDRAKPVTQIVSAEAWGRADCGSQSFGLLDPKLCYLLDGILFIYGVILTALFLRVKFSRSADAPAYQQGQNQLYNELNLGRREEYDVLDKRRGRDPEMGGKPQRRKNPQEGLYNELQKDKMAEAYSEIGMKGERRRGKGHDGLYQGLSTATKDTYDALHMQALPPRRAKRSGSGATNFSLLKQAGDVEENPGPTSMDWIWRILFLVGAATGAHSGPEVAALEKEVAALEKEVAALEKEVAALEKGSGGGGSGGGGSGGGGSFEQVQLQQPGAELVKPGASVKMSCKASGYAFSSYWINWMKQKPGQGLEWIGQIYPGDGDTNYNGKFKGRATLTADTSSSTAYMQLSSLTSEDSAVYFCARSITTVVGCAMDYWGQGTSVTVSSTRIQNPDPAVYQLRDSKSSDKSVCLFTDFDSQTNVSQSKDSDVYITDKCVLDMRSMDFKSNSAVAWSNKSDFACANAFNNSIIPEDTFFPSSDVPCGTQSFGLLDPKLCYLLDGILFIYGVILTALFLRVKFSRSADAPAYQQGQNQLYNELNLGRREEYDVLDKRRGRDPEMGGKPQRRKNPQEGLYNELQKDKMAEAYSEIGMKGERRRGKGHDGLYQGLSTATKDTYDALHMQALPPR

SEQ ID NO: 15248 - protein, 1080 aa, Artificial Sequence
  Synthetic Polypeptide
MALPVTALLLPLALLLHAARPACQVQLVESGGGLVQAGDSVTLSCTASGRTFSSYALAWFRQRPGKEREFVAGLRWGGPTNYADSVKDRFTISGDSAKHTMYLQMNSLKPEDTAVYYCGYNPGGWAVPSQYEYDSWGQGTQVTVSSGTGGGGSGGGGSGGGGSEFDIQMTQSPSSLSASVGDRVTITCKASDHINNWLAWYQQKPGQAPKLLIYGATTLETGVPSRFSGSGSGTDYTLTISSLQPEDFATYYCQQSWNTPWTFGQGTKLEIKRLEGKPIPNPLLGLDSTGSGEDLKNVFPPEVAVFEPSEAEISHTQKATLVCLATGFYPDHVELSWWVNGKEVHSGVSTDPQPLKEQPALNDSRYCLSSRLRVSATFWQNPRNHFRCQVQFYGLSENDEWTQDRAKPVTQIVSAEAWGRADCGSQSFGLLDPKLCYLLDGILFIYGVILTALFLRVKFSRSADAPAYQQGQNQLYNELNLGRREEYDVLDKRRGRDPEMGGKPQRRKNPQEGLYNELQKDKMAEAYSEIGMKGERRRGKGHDGLYQGLSTATKDTYDALHMQALPPRRAKRSGSGATNFSLLKQAGDVEENPGPTSMDWIWRILFLVGAATGAHSGPEVAALEKEVAALEKEVAALEKEVAALEKGSGGGGSGGGGSGGGGSFEQVQLQQPGAELVKPGASVKMSCKASGYAFSSYWINWMKQKPGQGLEWIGQIYPGDGDTNYNGKFKGRATLTADTSSSTAYMQLSSLTSEDSAVYFCARSITTVVGCAMDYWGQGTSVTVSSTREQKLISEEDGSGIQNPDPAVYQLRDSKSSDKSVCLFTDFDSQTNVSQSKDSDVYITDKTVLDMRSMDFKSNSAVAWSNKSDFACANAFNNSIIPEDTFFPSPESSCGTQSFGLLDPKLCYLLDGILFIYGVILTALFLRSKRSRLLHSDYMNMTPRRPGPTRKHYQPYAPPRDFAAYRSRVKFSRSADAPAYQQGQNQLYNELNLGRREEYDVLDKRRGRDPEMGGKPQRRKNPQEGLYNELQKDKMAEAYSEIGMKGERRRGKGHDGLYQGLSTATKDTYDALHMQALPPR

SEQ ID NO: 15249 - protein, 1121 aa, Artificial Sequence
  Synthetic Polypeptide
MALPVTALLLPLALLLHAARPACQVQLVESGGGLVQAGDSVTLSCTASGRTFSSYALAWFRQRPGKEREFVAGLRWGGPTNYADSVKDRFTISGDSAKHTMYLQMNSLKPEDTAVYYCGYNPGGWAVPSQYEYDSWGQGTQVTVSSGTGGGGSGGGGSGGGGSEFDIQMTQSPSSLSASVGDRVTITCKASDHINNWLAWYQQKPGQAPKLLIYGATTLETGVPSRFSGSGSGTDYTLTISSLQPEDFATYYCQQSWNTPWTFGQGTKLEIKRLEGKPIPNPLLGLDSTGSGEDLKNVFPPEVAVFEPSEAEISHTQKATLVCLATGFYPDHVELSWWVNGKEVHSGVSTDPQPLKEQPALNDSRYCLSSRLRVSATFWQNPRNHFRCQVQFYGLSENDEWTQDRAKPVTQIVSAEAWGRADCGSQSFGLLDPKLCYLLDGILFIYGVILTALFLRSKRSRLLHSDYMNMTPRRPGPTRKHYQPYAPPRDFAAYRSRVKFSRSADAPAYQQGQNQLYNELNLGRREEYDVLDKRRGRDPEMGGKPQRRKNPQEGLYNELQKDKMAEAYSEIGMKGERRRGKGHDGLYQGLSTATKDTYDALHMQALPPRRAKRSGSGATNFSLLKQAGDVEENPGPTSMDWIWRILFLVGAATGAHSGPEVAALEKEVAALEKEVAALEKEVAALEKGSGGGGSGGGGSGGGGSFEQVQLQQPGAELVKPGASVKMSCKASGYAFSSYWINWMKQKPGQGLEWIGQIYPGDGDTNYNGKFKGRATLTADTSSSTAYMQLSSLTSEDSAVYFCARSITTVVGCAMDYWGQGTSVTVSSTREQKLISEEDGSGIQNPDPAVYQLRDSKSSDKSVCLFTDFDSQTNVSQSKDSDVYITDKTVLDMRSMDFKSNSAVAWSNKSDFACANAFNNSIIPEDTFFPSPESSCGTQSFGLLDPKLCYLLDGILFIYGVILTALFLRSKRSRLLHSDYMNMTPRRPGPTRKHYQPYAPPRDFAAYRSRVKFSRSADAPAYQQGQNQLYNELNLGRREEYDVLDKRRGRDPEMGGKPQRRKNPQEGLYNELQKDKMAEAYSEIGMKGERRRGKGHDGLYQGLSTATKDTYDALHMQALPPR

SEQ ID NO: 15250 - protein, 1082 aa, Artificial Sequence
  Synthetic Polypeptide
MALPVTALLLPLALLLHAARPACQVQLVESGGGLVQAGDSVTLSCTASGRTFSSYALAWFRQRPGKEREFVAGLRWGGPTNYADSVKDRFTISGDSAKHTMYLQMNSLKPEDTAVYYCGYNPGGWAVPSQYEYDSWGQGTQVTVSSGTGGGGSGGGGSGGGGSEFDIQMTQSPSSLSASVGDRVTITCKASDHINNWLAWYQQKPGQAPKLLIYGATTLETGVPSRFSGSGSGTDYTLTISSLQPEDFATYYCQQSWNTPWTFGQGTKLEIKRLEGKPIPNPLLGLDSTGSGEDLKNVFPPEVAVFEPSEAEISHTQKATLVCLATGFYPDHVELSWWVNGKEVHSGVSTDPQPLKEQPALNDSRYCLSSRLRVSATFWQNPRNHFRCQVQFYGLSENDEWTQDRAKPVTQIVSAEAWGRADCGSQSFGLLDPKLCYLLDGILFIYGVILTALFLRVKFSRSADAPAYQQGQNQLYNELNLGRREEYDVLDKRRGRDPEMGGKPQRRKNPQEGLYNELQKDKMAEAYSEIGMKGERRRGKGHDGLYQGLSTATKDTYDALHMQALPPRRAKRSGSGATNFSLLKQAGDVEENPGPTSMDWIWRILFLVGAATGAHSGPEVAALEKEVAALEKEVAALEKEVAALEKGSGGGGSGGGGSGGGGSFEQVQLQQPGAELVKPGASVKMSCKASGYAFSSYWINWMKQKPGQGLEWIGQIYPGDGDTNYNGKFKGRATLTADTSSSTAYMQLSSLTSEDSAVYFCARSITTVVGCAMDYWGQGTSVTVSSTREQKLISEEDLGSGIQNPDPAVYQLRDSKSSDKSVCLFTDFDSQTNVSQSKDSDVYITDKTVLDMRSMDFKSNSAVAWSNKSDFACANAFNNSIIPEDTFFPSPESSCGTQSFGLLDPKLCYLLDGILFIYGVILTALFLKRGRKKLLYIFKQPFMRPVQTTQEEDGCSCRFPEEEEGGCELRVKFSRSADAPAYQQGQNQLYNELNLGRREEYDVLDKRRGRDPEMGGKPQRRKNPQEGLYNELQKDKMAEAYSEIGMKGERRRGKGHDGLYQGLSTATKDTYDALHMQALPPR

SEQ ID NO: 15251 - protein, 1124 aa, Artificial Sequence
  Synthetic Polypeptide
MALPVTALLLPLALLLHAARPACQVQLVESGGGLVQAGDSVTLSCTASGRTFSSYALAWFRQRPGKEREFVAGLRWGGPTNYADSVKDRFTISGDSAKHTMYLQMNSLKPEDTAVYYCGYNPGGWAVPSQYEYDSWGQGTQVTVSSGTGGGGSGGGGSGGGGSEFDIQMTQSPSSLSASVGDRVTITCKASDHINNWLAWYQQKPGQAPKLLIYGATTLETGVPSRFSGSGSGTDYTLTISSLQPEDFATYYCQQSWNTPWTFGQGTKLEIKRLEGKPIPNPLLGLDSTGSGEDLKNVFPPEVAVFEPSEAEISHTQKATLVCLATGFYPDHVELSWWVNGKEVHSGVSTDPQPLKEQPALNDSRYCLSSRLRVSATFWQNPRNHFRCQVQFYGLSENDEWTQDRAKPVTQIVSAEAWGRADCGSQSFGLLDPKLCYLLDGILFIYGVILTALFLKRGRKKLLYIFKQPFMRPVQTTQEEDGCSCRFPEEEEGGCELRVKFSRSADAPAYQQGQNQLYNELNLGRREEYDVLDKRRGRDPEMGGKPQRRKNPQEGLYNELQKDKMAEAYSEIGMKGERRRGKGHDGLYQGLSTATKDTYDALHMQALPPRRAKRSGSGATNFSLLKQAGDVEENPGPTSMDWIWRILFLVGAATGAHSGPEVAALEKEVAALEKEVAALEKEVAALEKGSGGGGSGGGGSGGGGSFEQVQLQQPGAELVKPGASVKMSCKASGYAFSSYWINWMKQKPGQGLEWIGQIYPGDGDTNYNGKFKGRATLTADTSSSTAYMQLSSLTSEDSAVYFCARSITTVVGCAMDYWGQGTSVTVSSTREQKLISEEDLGSGIQNPDPAVYQLRDSKSSDKSVCLFTDFDSQTNVSQSKDSDVYITDKTVLDMRSMDFKSNSAVAWSNKSDFACANAFNNSIIPEDTFFPSPESSCGTQSFGLLDPKLCYLLDGILFIYGVILTALFLKRGRKKLLYIFKQPFMRPVQTTQEEDGCSCRFPEEEEGGCELRVKFSRSADAPAYQQGQNQLYNELNLGRREEYDVLDKRRGRDPEMGGKPQRRKNPQEGLYNELQKDKMAEAYSEIGMKGERRRGKGHDGLYQGLSTATKDTYDALHMQALPPR

SEQ ID NO: 15252 - protein, 1014 aa, Artificial Sequence
  Synthetic Polypeptide
MALPVTALLLPLALLLHAARPACQVQLVESGGGLVQAGDSVTLSCTASGRTFSSYALAWFRQRPGKEREFVAGLRWGGPTNYADSVKDRFTISGDSAKHTMYLQMNSLKPEDTAVYYCGYNPGGWAVPSQYEYDSWGQGTQVTVSSGTGGGGSGGGGSGGGGSEFDIQMTQSPSSLSASVGDRVTITCKASDHINNWLAWYQQKPGQAPKLLIYGATTLETGVPSRFSGSGSGTDYTLTISSLQPEDFATYYCQQSWNTPWTFGQGTKLEIKRLEQSFGLLDPKLCYLLDGILFIYGVILTALFLRVKFSRSADAPAYQQGQNQLYNELNLGRREEYDVLDKRRGRDPEMGGKPQRRKNPQEGLYNELQKDKMAEAYSEIGMKGERRRGKGHDGLYQGLSTATKDTYDALHMQALPPRRAKRSGSGATNFSLLKQAGDVEENPGPTSMDWIWRILFLVGAATGAHSGPEVAALEKEVAALEKEVAALEKEVAALEKGSGGGGSGGGGSGGGGSFEQVQLQQPGAELVKPGASVKMSCKASGYAFSSYWINWMKQKPGQGLEWIGQIYPGDGDTNYNGKFKGRATLTADTSSSTAYMQLSSLTSEDSAVYFCARSITTVVGCAMDYWGQGTSVTVSSTRQSFGLLDPKLCYLLDGILFIYGVILTALFLRVKFSRSADAPAYQQGQNQLYNELNLGRREEYDVLDKRRGRDPEMGGKPQRRKNPQEGLYNELQKDKMAEAYSEIGMKGERRRGKGHDGLYQGLSTATKDTYDALHMQALPPRRAKRSGSGVKQTLNFDLLKLAGDVESNPGPSRGHMTEYKPTVRLATRDDVPRAVRTLAAAFADYPATRHTVDPDRHIERVTELQELFLTRVGLDIGKVWVADDGAAVAVWTTPESVEAGAVFAEIGPRMAELSGSRLAAQQQMEGLLAPHRPKEPAWFLATVGVSPDHQGKGLGSAVVLPGVEAAERAGVPAFLETSAPRNLPFYERLGFTVTADVEVPEGPRTWCMTRKPGA

SEQ ID NO: 15253 - protein, 839 aa, Artificial Sequence
  Synthetic Polypeptide
MALPVTALLLPLALLLHAARPACQVQLVESGGGLVQAGDSVTLSCTASGRTFSSYALAWFRQRPGKEREFVAGLRWGGPTNYADSVKDRFTISGDSAKHTMYLQMNSLKPEDTAVYYCGYNPGGWAVPSQYEYDSWGQGTQVTVSSGTGGGGSGGGGSGGGGSEFDIQMTQSPSSLSASVGDRVTITCKASDHINNWLAWYQQKPGQAPKLLIYGATTLETGVPSRFSGSGSGTDYTLTISSLQPEDFATYYCQQSWNTPWTFGQGTKLEIKRLEGQPKANPTVTLFPPSSEELQANKATLVCLISDFYPGAVTVAWKADGSPVKAGVETTKPSKQSNNKYAASSYLSLTPEQWKSHRSYSCQVTHEGSTVEKTVAPTECSPIKTDVITMDPKDNCSKDANDTLLLQLTNTSAYYMYLLLLLKSVVYFAIITCCLLRRTAFCCNGEKSRAKRSGSGATNFSLLKQAGDVEENPGPTSMDWIWRILFLVGAATGAHSGPEVAALEKEVAALEKEVAALEKEVAALEKGSGGGGSGGGGSGGGGSFEQVQLQQPGAELVKPGASVKMSCKASGYAFSSYWINWMKQKPGQGLEWIGQIYPGDGDTNYNGKFKGRATLTADTSSSTAYMQLSSLTSEDSAVYFCARSITTVVGCAMDYWGQGTSVTVSSTRASTKGPSVFPLAPSSKSTSGGTAALGCLVKDYFPEPVTVSWNSGALTSGVHTFPAVLQSSGLYSLSSVVTVPSSSLGTQTYICNVNHKPSNTKVDKRVEPKSCEVKTDSTDHVKPKETENTKQPSKSCHKPKAIVHTEKVNMMSLTVLGLRMLFAKTVAVNFLLTAKLFFL

SEQ ID NO: 15254 - protein, 817 aa, Artificial Sequence
  Synthetic Polypeptide
MALPVTALLLPLALLLHAARPACQVQLVESGGGLVQAGDSVTLSCTASGRTFSSYALAWFRQRPGKEREFVAGLRWGGPTNYADSVKDRFTISGDSAKHTMYLQMNSLKPEDTAVYYCGYNPGGWAVPSQYEYDSWGQGTQVTVSSGTGGGGSGGGGSGGGGSEFDIQMTQSPSSLSASVGDRVTITCKASDHINNWLAWYQQKPGQAPKLLIYGATTLETGVPSRFSGSGSGTDYTLTISSLQPEDFATYYCQQSWNTPWTFGQGTKLEIKRLEGQPKANPTVTLFPPSSEELQANKATLVCLISDFYPGAVTVAWKADGSPVKAGVETTKPSKQSNNKYAASSYLSLTPEQWKSHRSYSCQVTHEGSTVEKTVAPTECSGRADCGITSASYHQGVLSATILYEILLGKATLYAVLVSALVLMAMVKRKDSRGRAKRSGSGATNFSLLKQAGDVEENPGPTSMDWIWRILFLVGAATGAHSGPEVAALEKEVAALEKEVAALEKEVAALEKGSGGGGSGGGGSGGGGSFEQVQLQQPGAELVKPGASVKMSCKASGYAFSSYWINWMKQKPGQGLEWIGQIYPGDGDTNYNGKFKGRATLTADTSSSTAYMQLSSLTSEDSAVYFCARSITTVVGCAMDYWGQGTSVTVSSTRASTKGPSVFPLAPSSKSTSGGTAALGCLVKDYFPEPVTVSWNSGALTSGVHTFPAVLQSSGLYSLSSVVTVPSSSLGTQTYICNVNHKPSNTKVDKRVEPKSCIPEDTFFPSSDVPCDVKLVEKSFETDTNLNFQNLSVIGFRILLLKVAGFNLLMTLRLWSS

SEQ ID NO: 15255 - protein, 817 aa, Artificial Sequence
  Synthetic Polypeptide
MALPVTALLLPLALLLHAARPACQVQLVESGGGLVQAGDSVTLSCTASGRTFSSYALAWFRQRPGKEREFVAGLRWGGPTNYADSVKDRFTISGDSAKHTMYLQMNSLKPEDTAVYYCGYNPGGWAVPSQYEYDSWGQGTQVTVSSGTGGGGSGGGGSGGGGSEFDIQMTQSPSSLSASVGDRVTITCKASDHINNWLAWYQQKPGQAPKLLIYGATTLETGVPSRFSGSGSGTDYTLTISSLQPEDFATYYCQQSWNTPWTFGQGTKLEIKRLEGQPKANPTVTLFPPSSEELQANKATLVCLISDFYPGAVTVAWKADGSPVKAGVETTKPSKQSNNKYAASSYLSLTPEQWKSHRSYSCQVTHEGSTVEKTVAPTECSGRADCGFTSESYQQGVLSATILYEILLGKATLYAVLVSALVLMAMVKRKDSRGRAKRSGSGATNFSLLKQAGDVEENPGPTSMDWIWRILFLVGAATGAHSGPEVAALEKEVAALEKEVAALEKEVAALEKGSGGGGSGGGGSGGGGSFEQVQLQQPGAELVKPGASVKMSCKASGYAFSSYWINWMKQKPGQGLEWIGQIYPGDGDTNYNGKFKGRATLTADTSSSTAYMQLSSLTSEDSAVYFCARSITTVVGCAMDYWGQGTSVTVSSTRASTKGPSVFPLAPSSKSTSGGTAALGCLVKDYFPEPVTVSWNSGALTSGVHTFPAVLQSSGLYSLSSVVTVPSSSLGTQTYICNVNHKPSNTKVDKRVEPKSCIPEDTFFPSPESSCDVKLVEKSFETDTNLNFQNLSVIGFRILLLKVAGFNLLMTLRLWSS

SEQ ID NO: 15256 - protein, 783 aa, Artificial Sequence
  Synthetic Polypeptide
MALPVTALLLPLALLLHAARPQLQLQESGPGLVKPSETLSLTCTVSGDSISSGDYYWGWIRQPPGKGLEWIGHIYWGGPTNYADSVKDRFTISGDSAKHTMYLQMNSLKPEDTAVYYCGYNPGGWAVPSQYEYDSWGQGTQVTVSSLEGQPKANPTVTLFPPSSEELQANKATLVCLISDFYPGAVTVAWKADGSPVKAGVETTKPSKQSNNKYAASSYLSLTPEQWKSHRSYSCQVTHEGSTVEKTVAPTECSGRADCGFTSESYQQGVLSATILYEILLGKATLYAVLVSALVLMAMVKRKDSRGRAKRSGSGATNFSLLKQAGDVEENPGPTSMDWIWRILFLVGAATGAHSGPEVAALEKEVAALEKEVAALEKEVAALEKTRASTKGPSVFPLAPSSKSTSGGTAALGCLVKDYFPEPVTVSWNSGALTSGVHTFPAVLQSSGLYSLSSVVTVPSSSLGTQTYICNVNHKPSNTKVDKRVEPKSCIPEDTFFPSPESSCDVKLVEKSFETDTNLNFQNLSVIGFRILLLKVAGFNLLMTLRLWSSRAKRSGSGVKQTLNFDLLKLAGDVESNPGPSRGHMTEYKPTVRLATRDDVPRAVRTLAAAFADYPATRHTVDPDRHIERVTELQELFLTRVGLDIGKVWVADDGAAVAVWTTPESVEAGAVFAEIGPRMAELSGSRLAAQQQMEGLLAPHRPKEPAWFLATVGVSPDHQGKGLGSAVVLPGVEAAERAGVPAFLETSAPRNLPFYERLGFTVTADVEVPEGPRTWCMTRKPGA

SEQ ID NO: 15257 - protein, 550 aa, Artificial Sequence
  Synthetic Polypeptide
MALPVTALLLPLALLLHAARPQLQLQESGPGLVKPSETLSLTCTVSGDSISSGDYYWGWIRQPPGKGLEWIGHIYWGGPTNYADSVKDRFTISGDSAKHTMYLQMNSLKPEDTAVYYCGYNPGGWAVPSQYEYDSWGQGTQVTVSSLEGQPKANPTVTLFPPSSEELQANKATLVCLISDFYPGAVTVAWKADGSPVKAGVETTKPSKQSNNKYAASSYLSLTPEQWKSHRSYSCQVTHEGSTVEKTVAPTECSGRADCGFTSESYQQGVLSATILYEILLGKATLYAVLVSALVLMAMVKRKDSRGRAKRSGSGATNFSLLKQAGDVEENPGPTSMDWIWRILFLVGAATGAHSGPEVAALEKEVAALEKEVAALEKEVAALEKTRASTKGPSVFPLAPSSKSTSGGTAALGCLVKDYFPEPVTVSWNSGALTSGVHTFPAVLQSSGLYSLSSVVTVPSSSLGTQTYICNVNHKPSNTKVDKRVEPKSCIPEDTFFPSPESSCDVKLVEKSFETDTNLNFQNLSVIGFRILLLKVAGFNLLMTLRLWSS

SEQ ID NO: 15258 - protein, 578 aa, Artificial Sequence
  Synthetic Polypeptide
MALPVTALLLPLALLLHAARPQLQLQESGPGLVKPSETLSLTCTVSGDSISSGDYYWGWIRQPPGKGLEWIGHIYWGGPTNYADSVKDRFTISGDSAKHTMYLQMNSLKPEDTAVYYCGYNPGGWAVPSQYEYDSWGQGTQVTVSSLEGSGRADCGFTSESYQQGVLSATILYEILLGKATLYAVLVSALVLMAMVKRKDSRGRAKRSGSGATNFSLLKQAGDVEENPGPTSMDWIWRILFLVGAATGAHSGPEVAALEKEVAALEKEVAALEKEVAALEKTRGSIPEDTFFPSPESSCDVKLVEKSFETDTNLNFQNLSVIGFRILLLKVAGFNLLMTLRLWSSRAKRSGSGVKQTLNFDLLKLAGDVESNPGPSRGHMTEYKPTVRLATRDDVPRAVRTLAAAFADYPATRHTVDPDRHIERVTELQELFLTRVGLDIGKVWVADDGAAVAVWTTPESVEAGAVFAEIGPRMAELSGSRLAAQQQMEGLLAPHRPKEPAWFLATVGVSPDHQGKGLGSAVVLPGVEAAERAGVPAFLETSAPRNLPFYERLGFTVTADVEVPEGPRTWCMTRKPGA

SEQ ID NO: 15259 - protein, 345 aa, Artificial Sequence
  Synthetic Polypeptide
MALPVTALLLPLALLLHAARPQLQLQESGPGLVKPSETLSLTCTVSGDSISSGDYYWGWIRQPPGKGLEWIGHIYWGGPTNYADSVKDRFTISGDSAKHTMYLQMNSLKPEDTAVYYCGYNPGGWAVPSQYEYDSWGQGTQVTVSSLEGSGRADCGFTSESYQQGVLSATILYEILLGKATLYAVLVSALVLMAMVKRKDSRGRAKRSGSGATNFSLLKQAGDVEENPGPTSMDWIWRILFLVGAATGAHSGPEVAALEKEVAALEKEVAALEKEVAALEKTRGSIPEDTFFPSPESSCDVKLVEKSFETDTNLNFQNLSVIGFRILLLKVAGFNLLMTLRLWSS

SEQ ID NO: 15260 - protein, 587 aa, Artificial Sequence
  Synthetic Polypeptide
MALPVTALLLPLALLLHAARPQLQLQESGPGLVKPSETLSLTCTVSGDSISSGDYYWGWIRQPPGKGLEWIGHIYWGGPTNYADSVKDRFTISGDSAKHTMYLQMNSLKPEDTAVYYCGYNPGGWAVPSQYEYDSWGQGTQVTVSSLEDKTHTCPPCPAGRADCGFTSESYQQGVLSATILYEILLGKATLYAVLVSALVLMAMVKRKDSRGRAKRSGSGATNFSLLKQAGDVEENPGPTSMDWIWRILFLVGAATGAHSGPEVAALEKEVAALEKEVAALEKEVAALEKTRGSIPEDTFFPSPESSCDVKLVEKSFETDTNLNFQNLSVIGFRILLLKVAGFNLLMTLRLWSSRAKRSGSGVKQTLNFDLLKLAGDVESNPGPSRGHMTEYKPTVRLATRDDVPRAVRTLAAAFADYPATRHTVDPDRHIERVTELQELFLTRVGLDIGKVWVADDGAAVAVWTTPESVEAGAVFAEIGPRMAELSGSRLAAQQQMEGLLAPHRPKEPAWFLATVGVSPDHQGKGLGSAVVLPGVEAAERAGVPAFLETSAPRNLPFYERLGFTVTADVEVPEGPRTWCMTRKPGA

SEQ ID NO: 15261 - protein, 587 aa, Artificial Sequence
  Synthetic Polypeptide
MALPVTALLLPLALLLHAARPQLQLQESGPGLVKPSETLSLTCTVSGDSISSGDYYWGWIRQPPGKGLEWIGHIYWGGPTNYADSVKDRFTISGDSAKHTMYLQMNSLKPEDTAVYYCGYNPGGWAVPSQYEYDSWGQGTQVTVSSLEGSGRADCGFTSESYQQGVLSATILYEILLGKATLYAVLVSALVLMAMVKRKDSRGRAKRSGSGATNFSLLKQAGDVEENPGPTSMDWIWRILFLVGAATGAHSGPEVAALEKEVAALEKEVAALEKEVAALEKTRDKTHTCPPCPAIPEDTFFPSPESSCDVKLVEKSFETDTNLNFQNLSVIGFRILLLKVAGFNLLMTLRLWSSRAKRSGSGVKQTLNFDLLKLAGDVESNPGPSRGHMTEYKPTVRLATRDDVPRAVRTLAAAFADYPATRHTVDPDRHIERVTELQELFLTRVGLDIGKVWVADDGAAVAVWTTPESVEAGAVFAEIGPRMAELSGSRLAAQQQMEGLLAPHRPKEPAWFLATVGVSPDHQGKGLGSAVVLPGVEAAERAGVPAFLETSAPRNLPFYERLGFTVTADVEVPEGPRTWCMTRKPGA

SEQ ID NO: 15262 - protein, 596 aa, Artificial Sequence
  Synthetic Polypeptide
MALPVTALLLPLALLLHAARPQLQLQESGPGLVKPSETLSLTCTVSGDSISSGDYYWGWIRQPPGKGLEWIGHIYWGGPTNYADSVKDRFTISGDSAKHTMYLQMNSLKPEDTAVYYCGYNPGGWAVPSQYEYDSWGQGTQVTVSSLEDKTHTCPPCPAGRADCGFTSESYQQGVLSATILYEILLGKATLYAVLVSALVLMAMVKRKDSRGRAKRSGSGATNFSLLKQAGDVEENPGPTSMDWIWRILFLVGAATGAHSGPEVAALEKEVAALEKEVAALEKEVAALEKTRDKTHTCPPCPAIPEDTFFPSPESSCDVKLVEKSFETDTNLNFQNLSVIGFRILLLKVAGFNLLMTLRLWSSRAKRSGSGVKQTLNFDLLKLAGDVESNPGPSRGHMTEYKPTVRLATRDDVPRAVRTLAAAFADYPATRHTVDPDRHIERVTELQELFLTRVGLDIGKVWVADDGAAVAVWTTPESVEAGAVFAEIGPRMAELSGSRLAAQQQMEGLLAPHRPKEPAWFLATVGVSPDHQGKGLGSAVVLPGVEAAERAGVPAFLETSAPRNLPFYERLGFTVTADVEVPEGPRTWCMTRKPGA

SEQ ID NO: 15263 - protein, 363 aa, Artificial Sequence
  Synthetic Polypeptide
MALPVTALLLPLALLLHAARPQLQLQESGPGLVKPSETLSLTCTVSGDSISSGDYYWGWIRQPPGKGLEWIGHIYWGGPTNYADSVKDRFTISGDSAKHTMYLQMNSLKPEDTAVYYCGYNPGGWAVPSQYEYDSWGQGTQVTVSSLEDKTHTCPPCPAGRADCGFTSESYQQGVLSATILYEILLGKATLYAVLVSALVLMAMVKRKDSRGRAKRSGSGATNFSLLKQAGDVEENPGPTSMDWIWRILFLVGAATGAHSGPEVAALEKEVAALEKEVAALEKEVAALEKTRDKTHTCPPCPAIPEDTFFPSPESSCDVKLVEKSFETDTNLNFQNLSVIGFRILLLKVAGFNLLMTLRLWSS

SEQ ID NO: 15264 - protein, 354 aa, Artificial Sequence
  Synthetic Polypeptide
MALPVTALLLPLALLLHAARPQLQLQESGPGLVKPSETLSLTCTVSGDSISSGDYYWGWIRQPPGKGLEWIGHIYWGGPTNYADSVKDRFTISGDSAKHTMYLQMNSLKPEDTAVYYCGYNPGGWAVPSQYEYDSWGQGTQVTVSSLEGSGRADCGFTSESYQQGVLSATILYEILLGKATLYAVLVSALVLMAMVKRKDSRGRAKRSGSGATNFSLLKQAGDVEENPGPTSMDWIWRILFLVGAATGAHSGPEVAALEKEVAALEKEVAALEKEVAALEKTRDKTHTCPPCPAIPEDTFFPSPESSCDVKLVEKSFETDTNLNFQNLSVIGFRILLLKVAGFNLLMTLRLWSS

SEQ ID NO: 15265 - protein, 805 aa, Artificial Sequence
  Synthetic Polypeptide
MALPVTALLLPLALLLHAARPQLQLQESGPGLVKPSETLSLTCTVSGDSISSGDYYWGWIRQPPGKGLEWIGHIYWGGPTNYADSVKDRFTISGDSAKHTMYLQMNSLKPEDTAVYYCGYNPGGWAVPSQYEYDSWGQGTQVTVSSLEGQPKANPTVTLFPPSSEELQANKATLVCLISDFYPGAVTVAWKADGSPVKAGVETTKPSKQSNNKYAASSYLSLTPEQWKSHRSYSCQVTHEGSTVEKTVAPTECSPIKTDVITMDPKDNCSKDANDTLLLQLTNTSAYYMYLLLLLKSVVYFAIITCCLLRRTAFCCNGEKSRAKRSGSGATNFSLLKQAGDVEENPGPTSMDWIWRILFLVGAATGAHSGPEVAALEKEVAALEKEVAALEKEVAALEKTRASTKGPSVFPLAPSSKSTSGGTAALGCLVKDYFPEPVTVSWNSGALTSGVHTFPAVLQSSGLYSLSSVVTVPSSSLGTQTYICNVNHKPSNTKVDKRVEPKSCEVKTDSTDHVKPKETENTKQPSKSCHKPKAIVHTEKVNMMSLTVLGLRMLFAKTVAVNFLLTAKLFFLRAKRSGSGVKQTLNFDLLKLAGDVESNPGPSRGHMTEYKPTVRLATRDDVPRAVRTLAAAFADYPATRHTVDPDRHIERVTELQELFLTRVGLDIGKVWVADDGAAVAVWTTPESVEAGAVFAEIGPRMAELSGSRLAAQQQMEGLLAPHRPKEPAWFLATVGVSPDHQGKGLGSAVVLPGVEAAERAGVPAFLETSAPRNLPFYERLGFTVTADVEVPEGPRTWCMTRKPGA

SEQ ID NO: 15266 - protein, 572 aa, Artificial Sequence
  Synthetic Polypeptide
MALPVTALLLPLALLLHAARPQLQLQESGPGLVKPSETLSLTCTVSGDSISSGDYYWGWIRQPPGKGLEWIGHIYWGGPTNYADSVKDRFTISGDSAKHTMYLQMNSLKPEDTAVYYCGYNPGGWAVPSQYEYDSWGQGTQVTVSSLEGQPKANPTVTLFPPSSEELQANKATLVCLISDFYPGAVTVAWKADGSPVKAGVETTKPSKQSNNKYAASSYLSLTPEQWKSHRSYSCQVTHEGSTVEKTVAPTECSPIKTDVITMDPKDNCSKDANDTLLLQLTNTSAYYMYLLLLLKSVVYFAIITCCLLRRTAFCCNGEKSRAKRSGSGATNFSLLKQAGDVEENPGPTSMDWIWRILFLVGAATGAHSGPEVAALEKEVAALEKEVAALEKEVAALEKTRASTKGPSVFPLAPSSKSTSGGTAALGCLVKDYFPEPVTVSWNSGALTSGVHTFPAVLQSSGLYSLSSVVTVPSSSLGTQTYICNVNHKPSNTKVDKRVEPKSCEVKTDSTDHVKPKETENTKQPSKSCHKPKAIVHTEKVNMMSLTVLGLRMLFAKTVAVNFLLTAKLFFL

SEQ ID NO: 15267 - protein, 600 aa, Artificial Sequence
  Synthetic Polypeptide
MALPVTALLLPLALLLHAARPQLQLQESGPGLVKPSETLSLTCTVSGDSISSGDYYWGWIRQPPGKGLEWIGHIYWGGPTNYADSVKDRFTISGDSAKHTMYLQMNSLKPEDTAVYYCGYNPGGWAVPSQYEYDSWGQGTQVTVSSLEGSPIKTDVITMDPKDNCSKDANDTLLLQLTNTSAYYMYLLLLLKSVVYFAIITCCLLRRTAFCCNGEKSRAKRSGSGATNFSLLKQAGDVEENPGPTSMDWIWRILFLVGAATGAHSGPEVAALEKEVAALEKEVAALEKEVAALEKTRGSEVKTDSTDHVKPKETENTKQPSKSCHKPKAIVHTEKVNMMSLTVLGLRMLFAKTVAVNFLLTAKLFFLRAKRSGSGVKQTLNFDLLKLAGDVESNPGPSRGHMTEYKPTVRLATRDDVPRAVRTLAAAFADYPATRHTVDPDRHIERVTELQELFLTRVGLDIGKVWVADDGAAVAVWTTPESVEAGAVFAEIGPRMAELSGSRLAAQQQMEGLLAPHRPKEPAWFLATVGVSPDHQGKGLGSAVVLPGVEAAERAGVPAFLETSAPRNLPFYERLGFTVTADVEVPEGPRTWCMTRKPGA

SEQ ID NO: 15268 - protein, 367 aa, Artificial Sequence
  Synthetic Polypeptide
MALPVTALLLPLALLLHAARPQLQLQESGPGLVKPSETLSLTCTVSGDSISSGDYYWGWIRQPPGKGLEWIGHIYWGGPTNYADSVKDRFTISGDSAKHTMYLQMNSLKPEDTAVYYCGYNPGGWAVPSQYEYDSWGQGTQVTVSSLEGSPIKTDVITMDPKDNCSKDANDTLLLQLTNTSAYYMYLLLLLKSVVYFAIITCCLLRRTAFCCNGEKSRAKRSGSGATNFSLLKQAGDVEENPGPTSMDWIWRILFLVGAATGAHSGPEVAALEKEVAALEKEVAALEKEVAALEKTRGSEVKTDSTDHVKPKETENTKQPSKSCHKPKAIVHTEKVNMMSLTVLGLRMLFAKTVAVNFLLTAKLFFL

SEQ ID NO: 15269 - protein, 609 aa, Artificial Sequence
  Synthetic Polypeptide
MALPVTALLLPLALLLHAARPQLQLQESGPGLVKPSETLSLTCTVSGDSISSGDYYWGWIRQPPGKGLEWIGHIYWGGPTNYADSVKDRFTISGDSAKHTMYLQMNSLKPEDTAVYYCGYNPGGWAVPSQYEYDSWGQGTQVTVSSLEDKTHTCPPCPAPIKTDVITMDPKDNCSKDANDTLLLQLTNTSAYYMYLLLLLKSVVYFAIITCCLLRRTAFCCNGEKSRAKRSGSGATNFSLLKQAGDVEENPGPTSMDWIWRILFLVGAATGAHSGPEVAALEKEVAALEKEVAALEKEVAALEKTRGSEVKTDSTDHVKPKETENTKQPSKSCHKPKAIVHTEKVNMMSLTVLGLRMLFAKTVAVNFLLTAKLFFLRAKRSGSGVKQTLNFDLLKLAGDVESNPGPSRGHMTEYKPTVRLATRDDVPRAVRTLAAAFADYPATRHTVDPDRHIERVTELQELFLTRVGLDIGKVWVADDGAAVAVWTTPESVEAGAVFAEIGPRMAELSGSRLAAQQQMEGLLAPHRPKEPAWFLATVGVSPDHQGKGLGSAVVLPGVEAAERAGVPAFLETSAPRNLPFYERLGFTVTADVEVPEGPRTWCMTRKPGA

SEQ ID NO: 15270 - protein, 609 aa, Artificial Sequence
  Synthetic Polypeptide
MALPVTALLLPLALLLHAARPQLQLQESGPGLVKPSETLSLTCTVSGDSISSGDYYWGWIRQPPGKGLEWIGHIYWGGPTNYADSVKDRFTISGDSAKHTMYLQMNSLKPEDTAVYYCGYNPGGWAVPSQYEYDSWGQGTQVTVSSLEGSPIKTDVITMDPKDNCSKDANDTLLLQLTNTSAYYMYLLLLLKSVVYFAIITCCLLRRTAFCCNGEKSRAKRSGSGATNFSLLKQAGDVEENPGPTSMDWIWRILFLVGAATGAHSGPEVAALEKEVAALEKEVAALEKEVAALEKTRDKTHTCPPCPAEVKTDSTDHVKPKETENTKQPSKSCHKPKAIVHTEKVNMMSLTVLGLRMLFAKTVAVNFLLTAKLFFLRAKRSGSGVKQTLNFDLLKLAGDVESNPGPSRGHMTEYKPTVRLATRDDVPRAVRTLAAAFADYPATRHTVDPDRHIERVTELQELFLTRVGLDIGKVWVADDGAAVAVWTTPESVEAGAVFAEIGPRMAELSGSRLAAQQQMEGLLAPHRPKEPAWFLATVGVSPDHQGKGLGSAVVLPGVEAAERAGVPAFLETSAPRNLPFYERLGFTVTADVEVPEGPRTWCMTRKPGA

SEQ ID NO: 15271 - protein, 618 aa, Artificial Sequence
  Synthetic Polypeptide
MALPVTALLLPLALLLHAARPQLQLQESGPGLVKPSETLSLTCTVSGDSISSGDYYWGWIRQPPGKGLEWIGHIYWGGPTNYADSVKDRFTISGDSAKHTMYLQMNSLKPEDTAVYYCGYNPGGWAVPSQYEYDSWGQGTQVTVSSLEDKTHTCPPCPAPIKTDVITMDPKDNCSKDANDTLLLQLTNTSAYYMYLLLLLKSVVYFAIITCCLLRRTAFCCNGEKSRAKRSGSGATNFSLLKQAGDVEENPGPTSMDWIWRILFLVGAATGAHSGPEVAALEKEVAALEKEVAALEKEVAALEKTRDKTHTCPPCPAEVKTDSTDHVKPKETENTKQPSKSCHKPKAIVHTEKVNMMSLTVLGLRMLFAKTVAVNFLLTAKLFFLRAKRSGSGVKQTLNFDLLKLAGDVESNPGPSRGHMTEYKPTVRLATRDDVPRAVRTLAAAFADYPATRHTVDPDRHIERVTELQELFLTRVGLDIGKVWVADDGAAVAVWTTPESVEAGAVFAEIGPRMAELSGSRLAAQQQMEGLLAPHRPKEPAWFLATVGVSPDHQGKGLGSAVVLPGVEAAERAGVPAFLETSAPRNLPFYERLGFTVTADVEVPEGPRTWCMTRKPGA

SEQ ID NO: 15272 - protein, 385 aa, Artificial Sequence
  Synthetic Polypeptide
MALPVTALLLPLALLLHAARPQLQLQESGPGLVKPSETLSLTCTVSGDSISSGDYYWGWIRQPPGKGLEWIGHIYWGGPTNYADSVKDRFTISGDSAKHTMYLQMNSLKPEDTAVYYCGYNPGGWAVPSQYEYDSWGQGTQVTVSSLEDKTHTCPPCPAPIKTDVITMDPKDNCSKDANDTLLLQLTNTSAYYMYLLLLLKSVVYFAIITCCLLRRTAFCCNGEKSRAKRSGSGATNFSLLKQAGDVEENPGPTSMDWIWRILFLVGAATGAHSGPEVAALEKEVAALEKEVAALEKEVAALEKTRDKTHTCPPCPAEVKTDSTDHVKPKETENTKQPSKSCHKPKAIVHTEKVNMMSLTVLGLRMLFAKTVAVNFLLTAKLFFL

SEQ ID NO: 15273 - protein, 376 aa, Artificial Sequence
  Synthetic Polypeptide
MALPVTALLLPLALLLHAARPQLQLQESGPGLVKPSETLSLTCTVSGDSISSGDYYWGWIRQPPGKGLEWIGHIYWGGPTNYADSVKDRFTISGDSAKHTMYLQMNSLKPEDTAVYYCGYNPGGWAVPSQYEYDSWGQGTQVTVSSLEGSPIKTDVITMDPKDNCSKDANDTLLLQLTNTSAYYMYLLLLLKSVVYFAIITCCLLRRTAFCCNGEKSRAKRSGSGATNFSLLKQAGDVEENPGPTSMDWIWRILFLVGAATGAHSGPEVAALEKEVAALEKEVAALEKEVAALEKTRDKTHTCPPCPAEVKTDSTDHVKPKETENTKQPSKSCHKPKAIVHTEKVNMMSLTVLGLRMLFAKTVAVNFLLTAKLFFL

SEQ ID NO: 15274 - protein, 592 aa, Artificial Sequence
  Synthetic Polypeptide
MALPVTALLLPLALLLHAARPQLQLQESGPGLVKPSETLSLTCTVSGDSISSGDYYWGWIRQPPGKGLEWIGHIYWGGPTNYADSVKDRFTISGDSAKHTMYLQMNSLKPEDTAVYYCGYNPGGWAVPSQYEYDSWGQGTQVTVSSLEGSMDPKDNCSKDANDTLLLQLTNTSAYYMYLLLLLKSVVYFAIITCCLLRRTAFCCNGEKSRAKRSGSGATNFSLLKQAGDVEENPGPTSMDWIWRILFLVGAATGAHSGPEVAALEKEVAALEKEVAALEKEVAALEKTRGSEVKTDSTDHVKPKETENTKQPSKSCHKPKAIVHTEKVNMMSLTVLGLRMLFAKTVAVNFLLTAKLFFLRAKRSGSGVKQTLNFDLLKLAGDVESNPGPSRGHMTEYKPTVRLATRDDVPRAVRTLAAAFADYPATRHTVDPDRHIERVTELQELFLTRVGLDIGKVWVADDGAAVAVWTTPESVEAGAVFAEIGPRMAELSGSRLAAQQQMEGLLAPHRPKEPAWFLATVGVSPDHQGKGLGSAVVLPGVEAAERAGVPAFLETSAPRNLPFYERLGFTVTADVEVPEGPRTWCMTRKPGA

SEQ ID NO: 15275 - protein, 593 aa, Artificial Sequence
  Synthetic Polypeptide
MALPVTALLLPLALLLHAARPQLQLQESGPGLVKPSETLSLTCTVSGDSISSGDYYWGWIRQPPGKGLEWIGHIYWGGPTNYADSVKDRFTISGDSAKHTMYLQMNSLKPEDTAVYYCGYNPGGWAVPSQYEYDSWGQGTQVTVSSLEGSPIKTDVITMDPKDNCSKDANDTLLLQLTNTSAYYMYLLLLLKSVVYFAIITCCLLRRTAFCCNGEKSRAKRSGSGATNFSLLKQAGDVEENPGPTSMDWIWRILFLVGAATGAHSGPEVAALEKEVAALEKEVAALEKEVAALEKTRGSDHVKPKETENTKQPSKSCHKPKAIVHTEKVNMMSLTVLGLRMLFAKTVAVNFLLTAKLFFLRAKRSGSGVKQTLNFDLLKLAGDVESNPGPSRGHMTEYKPTVRLATRDDVPRAVRTLAAAFADYPATRHTVDPDRHIERVTELQELFLTRVGLDIGKVWVADDGAAVAVWTTPESVEAGAVFAEIGPRMAELSGSRLAAQQQMEGLLAPHRPKEPAWFLATVGVSPDHQGKGLGSAVVLPGVEAAERAGVPAFLETSAPRNLPFYERLGFTVTADVEVPEGPRTWCMTRKPGA

SEQ ID NO: 15276 - protein, 585 aa, Artificial Sequence
  Synthetic Polypeptide
MALPVTALLLPLALLLHAARPQLQLQESGPGLVKPSETLSLTCTVSGDSISSGDYYWGWIRQPPGKGLEWIGHIYWGGPTNYADSVKDRFTISGDSAKHTMYLQMNSLKPEDTAVYYCGYNPGGWAVPSQYEYDSWGQGTQVTVSSLEGSMDPKDNCSKDANDTLLLQLTNTSAYYMYLLLLLKSVVYFAIITCCLLRRTAFCCNGEKSRAKRSGSGATNFSLLKQAGDVEENPGPTSMDWIWRILFLVGAATGAHSGPEVAALEKEVAALEKEVAALEKEVAALEKTRGSDHVKPKETENTKQPSKSCHKPKAIVHTEKVNMMSLTVLGLRMLFAKTVAVNFLLTAKLFFLRAKRSGSGVKQTLNFDLLKLAGDVESNPGPSRGHMTEYKPTVRLATRDDVPRAVRTLAAAFADYPATRHTVDPDRHIERVTELQELFLTRVGLDIGKVWVADDGAAVAVWTTPESVEAGAVFAEIGPRMAELSGSRLAAQQQMEGLLAPHRPKEPAWFLATVGVSPDHQGKGLGSAVVLPGVEAAERAGVPAFLETSAPRNLPFYERLGFTVTADVEVPEGPRTWCMTRKPGA

SEQ ID NO: 15277 - protein, 352 aa, Artificial Sequence
  Synthetic Polypeptide
MALPVTALLLPLALLLHAARPQLQLQESGPGLVKPSETLSLTCTVSGDSISSGDYYWGWIRQPPGKGLEWIGHIYWGGPTNYADSVKDRFTISGDSAKHTMYLQMNSLKPEDTAVYYCGYNPGGWAVPSQYEYDSWGQGTQVTVSSLEGSMDPKDNCSKDANDTLLLQLTNTSAYYMYLLLLLKSVVYFAIITCCLLRRTAFCCNGEKSRAKRSGSGATNFSLLKQAGDVEENPGPTSMDWIWRILFLVGAATGAHSGPEVAALEKEVAALEKEVAALEKEVAALEKTRGSDHVKPKETENTKQPSKSCHKPKAIVHTEKVNMMSLTVLGLRMLFAKTVAVNFLLTAKLFFL

SEQ ID NO: 15278 - protein, 594 aa, Artificial Sequence
  Synthetic Polypeptide
MALPVTALLLPLALLLHAARPQLQLQESGPGLVKPSETLSLTCTVSGDSISSGDYYWGWIRQPPGKGLEWIGHIYWGGPTNYADSVKDRFTISGDSAKHTMYLQMNSLKPEDTAVYYCGYNPGGWAVPSQYEYDSWGQGTQVTVSSLEDKTHTCPPCPAMDPKDNCSKDANDTLLLQLTNTSAYYMYLLLLLKSVVYFAIITCCLLRRTAFCCNGEKSRAKRSGSGATNFSLLKQAGDVEENPGPTSMDWIWRILFLVGAATGAHSGPEVAALEKEVAALEKEVAALEKEVAALEKTRGSDHVKPKETENTKQPSKSCHKPKAIVHTEKVNMMSLTVLGLRMLFAKTVAVNFLLTAKLFFLRAKRSGSGVKQTLNFDLLKLAGDVESNPGPSRGHMTEYKPTVRLATRDDVPRAVRTLAAAFADYPATRHTVDPDRHIERVTELQELFLTRVGLDIGKVWVADDGAAVAVWTTPESVEAGAVFAEIGPRMAELSGSRLAAQQQMEGLLAPHRPKEPAWFLATVGVSPDHQGKGLGSAVVLPGVEAAERAGVPAFLETSAPRNLPFYERLGFTVTADVEVPEGPRTWCMTRKPGA

SEQ ID NO: 15279 - protein, 603 aa, Artificial Sequence
  Synthetic Polypeptide
MALPVTALLLPLALLLHAARPQLQLQESGPGLVKPSETLSLTCTVSGDSISSGDYYWGWIRQPPGKGLEWIGHIYWGGPTNYADSVKDRFTISGDSAKHTMYLQMNSLKPEDTAVYYCGYNPGGWAVPSQYEYDSWGQGTQVTVSSLEDKTHTCPPCPAMDPKDNCSKDANDTLLLQLTNTSAYYMYLLLLLKSVVYFAIITCCLLRRTAFCCNGEKSRAKRSGSGATNFSLLKQAGDVEENPGPTSMDWIWRILFLVGAATGAHSGPEVAALEKEVAALEKEVAALEKEVAALEKTRDKTHTCPPCPADHVKPKETENTKQPSKSCHKPKAIVHTEKVNMMSLTVLGLRMLFAKTVAVNFLLTAKLFFLRAKRSGSGVKQTLNFDLLKLAGDVESNPGPSRGHMTEYKPTVRLATRDDVPRAVRTLAAAFADYPATRHTVDPDRHIERVTELQELFLTRVGLDIGKVWVADDGAAVAVWTTPESVEAGAVFAEIGPRMAELSGSRLAAQQQMEGLLAPHRPKEPAWFLATVGVSPDHQGKGLGSAVVLPGVEAAERAGVPAFLETSAPRNLPFYERLGFTVTADVEVPEGPRTWCMTRKPGA

SEQ ID NO: 15280 - protein, 370 aa, Artificial Sequence
  Synthetic Polypeptide
MALPVTALLLPLALLLHAARPQLQLQESGPGLVKPSETLSLTCTVSGDSISSGDYYWGWIRQPPGKGLEWIGHIYWGGPTNYADSVKDRFTISGDSAKHTMYLQMNSLKPEDTAVYYCGYNPGGWAVPSQYEYDSWGQGTQVTVSSLEDKTHTCPPCPAMDPKDNCSKDANDTLLLQLTNTSAYYMYLLLLLKSVVYFAIITCCLLRRTAFCCNGEKSRAKRSGSGATNFSLLKQAGDVEENPGPTSMDWIWRILFLVGAATGAHSGPEVAALEKEVAALEKEVAALEKEVAALEKTRDKTHTCPPCPADHVKPKETENTKQPSKSCHKPKAIVHTEKVNMMSLTVLGLRMLFAKTVAVNFLLTAKLFFL

SEQ ID NO: 15281 - protein, 307 aa, Artificial Sequence
  Synthetic Polypeptide
MALPVTALLLPLALLLHAARPQLQLQESGPGLVKPSETLSLTCTVSGDSISSGDYYWGWIRQPPGKGLEWIGHIYWGGPTNYADSVKDRFTISGDSAKHTMYLQMNSLKPEDTAVYYCGYNPGGWAVPSQYEYDSWGQGTQVTVSSLEGQPKANPTVTLFPPSSEELQANKATLVCLISDFYPGAVTVAWKADGSPVKAGVETTKPSKQSNNKYAASSYLSLTPEQWKSHRSYSCQVTHEGSTVEKTVAPTECSGRADCGFTSESYQQGVLSATILYEILLGKATLYAVLVSALVLMAMVKRKDSRG

SEQ ID NO: 15282 - protein, 214 aa, Artificial Sequence
  Synthetic Polypeptide
MDWIWRILFLVGAATGAHSGPEVAALEKEVAALEKEVAALEKEVAALEKTRASTKGPSVFPLAPSSKSTSGGTAALGCLVKDYFPEPVTVSWNSGALTSGVHTFPAVLQSSGLYSLSSVVTVPSSSLGTQTYICNVNHKPSNTKVDKRVEPKSCIPEDTFFPSPESSCDVKLVEKSFETDTNLNFQNLSVIGFRILLLKVAGFNLLMTLRLWSS

SEQ ID NO: 15283 - protein, 321 aa, Artificial Sequence
  Synthetic Polypeptide
MALPVTALLLPLALLLHAARPQLQLQESGPGLVKPSETLSLTCTVSGDSISSGDYYWGWIRQPPGKGLEWIGHIYWGGPTNYADSVKDRFTISGDSAKHTMYLQMNSLKPEDTAVYYCGYNPGGWAVPSQYEYDSWGQGTQVTVSSLEGQPKANPTVTLFPPSSEELQANKATLVCLISDFYPGAVTVAWKADGSPVKAGVETTKPSKQSNNKYAASSYLSLTPEQWKSHRSYSCQVTHEGSTVEKTVAPTECSPIKTDVITMDPKDNCSKDANDTLLLQLTNTSAYYMYLLLLLKSVVYFAIITCCLLRRTAFCCNGEKS

SEQ ID NO: 15284 - protein, 222 aa, Artificial Sequence
  Synthetic Polypeptide
MDWIWRILFLVGAATGAHSGPEVAALEKEVAALEKEVAALEKEVAALEKTRASTKGPSVFPLAPSSKSTSGGTAALGCLVKDYFPEPVTVSWNSGALTSGVHTFPAVLQSSGLYSLSSVVTVPSSSLGTQTYICNVNHKPSNTKVDKRVEPKSCEVKTDSTDHVKPKETENTKQPSKSCHKPKAIVHTEKVNMMSLTVLGLRMLFAKTVAVNFLLTAKLFFL

SEQ ID NO: 15285 - protein, 550 aa, Artificial Sequence; identical to SEQ ID NO: 15158
  Synthetic Polypeptide

SEQ ID NO: 15286 - protein, 903 aa, Artificial Sequence; identical to SEQ ID NO: 15159
  Synthetic Polypeptide

SEQ ID NO: 15287 - protein, 902 aa, Artificial Sequence; identical to SEQ ID NO: 15160
  Synthetic Polypeptide

SEQ ID NO: 15288 - protein, 902 aa, Artificial Sequence; identical to SEQ ID NO: 15161
  Synthetic Polypeptide

SEQ ID NO: 15289 - protein, 669 aa, Artificial Sequence; identical to SEQ ID NO: 15162
  Synthetic Polypeptide

SEQ ID NO: 15290 - protein, 894 aa, Artificial Sequence; identical to SEQ ID NO: 15163
  Synthetic Polypeptide

SEQ ID NO: 15291 - protein, 673 aa, Artificial Sequence; identical to SEQ ID NO: 15164
  Synthetic Polypeptide

SEQ ID NO: 15292 - protein, 895 aa, Artificial Sequence; identical to SEQ ID NO: 15165
  Synthetic Polypeptide

SEQ ID NO: 15293 - protein, 902 aa, Artificial Sequence; identical to SEQ ID NO: 15166
  Synthetic Polypeptide

SEQ ID NO: 15294 - protein, 984 aa, Artificial Sequence; identical to SEQ ID NO: 15167
  Synthetic Polypeptide

SEQ ID NO: 15295 - protein, 939 aa, Artificial Sequence; identical to SEQ ID NO: 15168
  Synthetic Polypeptide

SEQ ID NO: 15296 - protein, 677 aa, Artificial Sequence; identical to SEQ ID NO: 15169
  Synthetic Polypeptide

SEQ ID NO: 15297 - protein, 1079 aa, Artificial Sequence; identical to SEQ ID NO: 15170
  Synthetic Polypeptide

SEQ ID NO: 15298 - protein, 865 aa, Artificial Sequence; identical to SEQ ID NO: 15171
  Synthetic Polypeptide

SEQ ID NO: 15299 - protein, 865 aa, Artificial Sequence; identical to SEQ ID NO: 15172
  Synthetic Polypeptide

SEQ ID NO: 15300 - protein, 936 aa, Artificial Sequence; identical to SEQ ID NO: 15173
  Synthetic Polypeptide

SEQ ID NO: 15301 - protein, 977 aa, Artificial Sequence; identical to SEQ ID NO: 15174
  Synthetic Polypeptide

SEQ ID NO: 15302 - protein, 938 aa, Artificial Sequence; identical to SEQ ID NO: 15175
  Synthetic Polypeptide

SEQ ID NO: 15303 - protein, 980 aa, Artificial Sequence; identical to SEQ ID NO: 15176
  Synthetic Polypeptide

SEQ ID NO: 15304 - protein, 870 aa, Artificial Sequence; identical to SEQ ID NO: 15177
  Synthetic Polypeptide

SEQ ID NO: 15305 - protein, 695 aa, Artificial Sequence; identical to SEQ ID NO: 15178
  Synthetic Polypeptide

SEQ ID NO: 15306 - protein, 673 aa, Artificial Sequence; identical to SEQ ID NO: 15179
  Synthetic Polypeptide

SEQ ID NO: 15307 - protein, 673 aa, Artificial Sequence; identical to SEQ ID NO: 15180
  Synthetic Polypeptide

SEQ ID NO: 15308 - protein, 503 aa, Artificial Sequence; identical to SEQ ID NO: 15181
  Synthetic Polypeptide

SEQ ID NO: 15309 - protein, 468 aa, Artificial Sequence; identical to SEQ ID NO: 15182
  Synthetic Polypeptide

SEQ ID NO: 15310 - protein, 478 aa, Artificial Sequence; identical to SEQ ID NO: 15183
  Synthetic Polypeptide

SEQ ID NO: 15311 - protein, 461 aa, Artificial Sequence; identical to SEQ ID NO: 15184
  Synthetic Polypeptide

SEQ ID NO: 15312 - protein, 497 aa, Artificial Sequence; identical to SEQ ID NO: 15185
  Synthetic Polypeptide

SEQ ID NO: 15313 - protein, 331 aa, Artificial Sequence; identical to SEQ ID NO: 15186
  Synthetic Polypeptide

SEQ ID NO: 15314 - protein, 509 aa, Artificial Sequence; identical to SEQ ID NO: 15187
  Synthetic Polypeptide

SEQ ID NO: 15315 - protein, 343 aa, Artificial Sequence; identical to SEQ ID NO: 15188
  Synthetic Polypeptide

SEQ ID NO: 15316 - protein, 634 aa, Artificial Sequence; identical to SEQ ID NO: 14808
  Synthetic Polypeptide

SEQ ID NO: 15317 - protein, 640 aa, Artificial Sequence; identical to SEQ ID NO: 14809
  Synthetic Polypeptide

SEQ ID NO: 15318 - protein, 1053 aa, Artificial Sequence; identical to SEQ ID NO: 14810
  Synthetic Polypeptide

SEQ ID NO: 15319 - protein, 993 aa, Artificial Sequence; identical to SEQ ID NO: 14811
  Synthetic Polypeptide

SEQ ID NO: 15320 - protein, 992 aa, Artificial Sequence; identical to SEQ ID NO: 14812
  Synthetic Polypeptide

SEQ ID NO: 15321 - protein, 759 aa, Artificial Sequence; identical to SEQ ID NO: 14813
  Synthetic Polypeptide

SEQ ID NO: 15322 - protein, 984 aa, Artificial Sequence; identical to SEQ ID NO: 14814
  Synthetic Polypeptide

SEQ ID NO: 15323 - protein, 763 aa, Artificial Sequence; identical to SEQ ID NO: 14815
  Synthetic Polypeptide

SEQ ID NO: 15324 - protein, 985 aa, Artificial Sequence; identical to SEQ ID NO: 14816
  Synthetic Polypeptide

SEQ ID NO: 15325 - protein, 1037 aa, Artificial Sequence; identical to SEQ ID NO: 14817
  Synthetic Polypeptide

SEQ ID NO: 15326 - protein, 1038 aa, Artificial Sequence; identical to SEQ ID NO: 14818
  Synthetic Polypeptide

SEQ ID NO: 15327 - protein, 992 aa, Artificial Sequence; identical to SEQ ID NO: 14819
  Synthetic Polypeptide

SEQ ID NO: 15328 - protein, 1074 aa, Artificial Sequence; identical to SEQ ID NO: 14820
  Synthetic Polypeptide

SEQ ID NO: 15329 - protein, 1092 aa, Artificial Sequence; identical to SEQ ID NO: 14821
  Synthetic Polypeptide

SEQ ID NO: 15330 - protein, 1029 aa, Artificial Sequence; identical to SEQ ID NO: 14822
  Synthetic Polypeptide

SEQ ID NO: 15331 - protein, 767 aa, Artificial Sequence; identical to SEQ ID NO: 14823
  Synthetic Polypeptide

SEQ ID NO: 15332 - protein, 1044 aa, Artificial Sequence; identical to SEQ ID NO: 14824
  Synthetic Polypeptide

SEQ ID NO: 15333 - protein, 1169 aa, Artificial Sequence; identical to SEQ ID NO: 14825
  Synthetic Polypeptide

SEQ ID NO: 15334 - protein, 955 aa, Artificial Sequence; identical to SEQ ID NO: 14826
  Synthetic Polypeptide

SEQ ID NO: 15335 - protein, 955 aa, Artificial Sequence; identical to SEQ ID NO: 14827
  Synthetic Polypeptide

SEQ ID NO: 15336 - protein, 1026 aa, Artificial Sequence; identical to SEQ ID NO: 14828
  Synthetic Polypeptide

SEQ ID NO: 15337 - protein, 1067 aa, Artificial Sequence; identical to SEQ ID NO: 14829
  Synthetic Polypeptide

SEQ ID NO: 15338 - protein, 1028 aa, Artificial Sequence; identical to SEQ ID NO: 14830
  Synthetic Polypeptide

SEQ ID NO: 15339 - protein, 1070 aa, Artificial Sequence; identical to SEQ ID NO: 14831
  Synthetic Polypeptide

SEQ ID NO: 15340 - protein, 960 aa, Artificial Sequence; identical to SEQ ID NO: 14832
  Synthetic Polypeptide

SEQ ID NO: 15341 - protein, 785 aa, Artificial Sequence; identical to SEQ ID NO: 14833
  Synthetic Polypeptide

SEQ ID NO: 15342 - protein, 763 aa, Artificial Sequence; identical to SEQ ID NO: 14834
  Synthetic Polypeptide

SEQ ID NO: 15343 - protein, 763 aa, Artificial Sequence; identical to SEQ ID NO: 14835
  Synthetic Polypeptide

SEQ ID NO: 15344 - protein, 589 aa, Artificial Sequence; identical to SEQ ID NO: 14836
  Synthetic Polypeptide

SEQ ID NO: 15345 - protein, 554 aa, Artificial Sequence; identical to SEQ ID NO: 14837
  Synthetic Polypeptide

SEQ ID NO: 15346 - protein, 564 aa, Artificial Sequence; identical to SEQ ID NO: 14838
  Synthetic Polypeptide

SEQ ID NO: 15347 - protein, 547 aa, Artificial Sequence; identical to SEQ ID NO: 14839
  Synthetic Polypeptide

SEQ ID NO: 15348 - protein, 780 aa, Artificial Sequence; identical to SEQ ID NO: 14840
  Synthetic Polypeptide

SEQ ID NO: 15349 - protein, 812 aa, Artificial Sequence; identical to SEQ ID NO: 14841
  Synthetic Polypeptide

SEQ ID NO: 15350 - protein, 862 aa, Artificial Sequence; identical to SEQ ID NO: 14842
  Synthetic Polypeptide

SEQ ID NO: 15351 - protein, 676 aa, Artificial Sequence; identical to SEQ ID NO: 14843
  Synthetic Polypeptide

SEQ ID NO: 15352 - protein, 446 aa, Artificial Sequence; identical to SEQ ID NO: 14844
  Synthetic Polypeptide

SEQ ID NO: 15353 - protein, 450 aa, Artificial Sequence; identical to SEQ ID NO: 14845
  Synthetic Polypeptide

SEQ ID NO: 15354 - protein, 284 aa, Artificial Sequence; identical to SEQ ID NO: 14846
  Synthetic Polypeptide

SEQ ID NO: 15355 - protein, 694 aa, Artificial Sequence; identical to SEQ ID NO: 14847
  Synthetic Polypeptide

SEQ ID NO: 15356 - protein, 464 aa, Artificial Sequence; identical to SEQ ID NO: 14848
  Synthetic Polypeptide

SEQ ID NO: 15357 - protein, 462 aa, Artificial Sequence; identical to SEQ ID NO: 14849
  Synthetic Polypeptide

SEQ ID NO: 15358 - protein, 296 aa, Artificial Sequence; identical to SEQ ID NO: 14850
  Synthetic Polypeptide

SEQ ID NO: 15359 - protein, 780 aa, Artificial Sequence; identical to SEQ ID NO: 14851
  Synthetic Polypeptide

SEQ ID NO: 15360 - protein, 812 aa, Artificial Sequence; identical to SEQ ID NO: 14852
  Synthetic Polypeptide

SEQ ID NO: 15361 - protein, 1040 aa, Artificial Sequence
  Synthetic Polypeptide
MALPVTALLLPLALLLHAARPQLQLQESGPGLVKPSETLSLTCTVSGDSISSGDYYWGWIRQPPGKGLEWIGHIYYSGVTYYNPSLKSRVTISVDTSRNQFSLKLSSVTAADTAVYYCTREDSSNWRSRGQGTLVTVSSGTGGGGSGGGGSGGGGSEFDIQMTQSPSSLSASVGDRVTITCKASDHINNWLAWYQQKPGQAPKLLIYGATTLETGVPSRFSGSGSGTDYTLTISSLQPEDFATYYCQQSWNTPWTFGQGTKLEIKRLEIQNPDPAVYQLRDSKSSDKSVCLFTDFDSQTNVSQSKDSDVYITDKCVLDMRSMDFKSNSAVAWSNKSDFACANAFNNSIIPEDTFFPSSDVPCDVKLVEKSFETDTNLNFQNLSVIGFRILLLKVAGFNLLMTLRLWSSRAKRSGSGVKQTLNFDLLKLAGDVESNPGPTSMDWIWRILFLVGAATGAHSGPEVAALEKEVAALEKEVAALEKEVAALEKGSGGGGSGGGGSGGGGSFEQVQLQQPGAELVKPGASVKMSCKASGYAFSSYWINWMKQKPGQGLEWIGQIYPGDGDTNYNGKFKGRATLTADTSSSTAYMQLSSLTSEDSAVYFCARSITTVVGCAMDYWGQGTSVTVSSTREDLKNVFPPEVAVFEPSKAEIAHTQKATLVCLATGFYPDHVELSWWVNGKEVHSGVCTDPQPLKEQPALNDSRYCLSSRLRVSATFWQNPRNHFRCQVQFYGLSENDEWTQDRAKPVTQIVSAEAWGRADCGITSASYHQGVLSATILYEILLGKATLYAVLVSALVLMAMVKRKDSRGRAKRSGSGATNFSLLKQAGDVEENPGPSRGHMTEYKPTVRLATRDDVPRAVRTLAAAFADYPATRHTVDPDRHIERVTELQELFLTRVGLDIGKVWVADDGAAVAVWTTPESVEAGAVFAEIGPRMAELSGSRLAAQQQMEGLLAPHRPKEPAWFLATVGVSPDHQGKGLGSAVVLPGVEAAERAGVPAFLETSAPRNLPFYERLGFTVTADVEVPEGPRTWCMTRKPGA

SEQ ID NO: 15362 - protein, 1039 aa, Artificial Sequence
  Synthetic Polypeptide
MALPVTALLLPLALLLHAARPQLQLQESGPGLVKPSETLSLTCTVSGDSISSGDYYWGWIRQPPGKGLEWIGHIYYSGVTYYNPSLKSRVTISVDTSRNQFSLKLSSVTAADTAVYYCTREDSSNWRSRGQGTLVTVSSGTGGGGSGGGGSGGGGSEFDIQMTQSPSSLSASVGDRVTITCKASDHINNWLAWYQQKPGQAPKLLIYGATTLETGVPSRFSGSGSGTDYTLTISSLQPEDFATYYCQQSWNTPWTFGQGTKLEIKRLEDLKNVFPPEVAVFEPSKAEIAHTQKATLVCLATGFYPDHVELSWWVNGKEVHSGVCTDPQPLKEQPALNDSRYCLSSRLRVSATFWQNPRNHFRCQVQFYGLSENDEWTQDRAKPVTQIVSAEAWGRADCGITSASYHQGVLSATILYEILLGKATLYAVLVSALVLMAMVKRKDSRGRAKRSGSGATNFSLLKQAGDVEENPGPTSMDWIWRILFLVGAATGAHSGPEVAALEKEVAALEKEVAALEKEVAALEKGSGGGGSGGGGSGGGGSFEQVQLQQPGAELVKPGASVKMSCKASGYAFSSYWINWMKQKPGQGLEWIGQIYPGDGDTNYNGKFKGRATLTADTSSSTAYMQLSSLTSEDSAVYFCARSITTVVGCAMDYWGQGTSVTVSSTRIQNPDPAVYQLRDSKSSDKSVCLFTDFDSQTNVSQSKDSDVYITDKCVLDMRSMDFKSNSAVAWSNKSDFACANAFNNSIIPEDTFFPSSDVPCDVKLVEKSFETDTNLNFQNLSVIGFRILLLKVAGFNLLMTLRLWSSRAKRSGSGVKQTLNFDLLKLAGDVESNPGPSRGHMTEYKPTVRLATRDDVPRAVRTLAAAFADYPATRHTVDPDRHIERVTELQELFLTRVGLDIGKVWVADDGAAVAVWTTPESVEAGAVFAEIGPRMAELSGSRLAAQQQMEGLLAPHRPKEPAWFLATVGVSPDHQGKGLGSAVVLPGVEAAERAGVPAFLETSAPRNLPFYERLGFTVTADVEVPEGPRTWCMTRKPGA

SEQ ID NO: 15363 - protein, 1039 aa, Artificial Sequence
  Synthetic Polypeptide
MALPVTALLLPLALLLHAARPQLQLQESGPGLVKPSETLSLTCTVSGDSISSGDYYWGWIRQPPGKGLEWIGHIYYSGVTYYNPSLKSRVTISVDTSRNQFSLKLSSVTAADTAVYYCTREDSSNWRSRGQGTLVTVSSGTGGGGSGGGGSGGGGSEFDIQMTQSPSSLSASVGDRVTITCKASDHINNWLAWYQQKPGQAPKLLIYGATTLETGVPSRFSGSGSGTDYTLTISSLQPEDFATYYCQQSWNTPWTFGQGTKLEIKRLEDLKNVFPPEVAVFEPSEAEISHTQKATLVCLATGFYPDHVELSWWVNGKEVHSGVCTDPQPLKEQPALNDSRYCLSSRLRVSATFWQNPRNHFRCQVQFYGLSENDEWTQDRAKPVTQIVSAEAWGRADCGFTSESYQQGVLSATILYEILLGKATLYAVLVSALVLMAMVKRKDSRGRAKRSGSGATNFSLLKQAGDVEENPGPTSMDWIWRILFLVGAATGAHSGPEVAALEKEVAALEKEVAALEKEVAALEKGSGGGGSGGGGSGGGGSFEQVQLQQPGAELVKPGASVKMSCKASGYAFSSYWINWMKQKPGQGLEWIGQIYPGDGDTNYNGKFKGRATLTADTSSSTAYMQLSSLTSEDSAVYFCARSITTVVGCAMDYWGQGTSVTVSSTRIQNPDPAVYQLRDSKSSDKSVCLFTDFDSQTNVSQSKDSDVYITDKCVLDMRSMDFKSNSAVAWSNKSDFACANAFNNSIIPEDTFFPSPESSCDVKLVEKSFETDTNLNFQNLSVIGFRILLLKVAGFNLLMTLRLWSSRAKRSGSGVKQTLNFDLLKLAGDVESNPGPSRGHMTEYKPTVRLATRDDVPRAVRTLAAAFADYPATRHTVDPDRHIERVTELQELFLTRVGLDIGKVWVADDGAAVAVWTTPESVEAGAVFAEIGPRMAELSGSRLAAQQQMEGLLAPHRPKEPAWFLATVGVSPDHQGKGLGSAVVLPGVEAAERAGVPAFLETSAPRNLPFYERLGFTVTADVEVPEGPRTWCMTRKPGA

SEQ ID NO: 15364 - protein, 806 aa, Artificial Sequence
  Synthetic Polypeptide
MALPVTALLLPLALLLHAARPQLQLQESGPGLVKPSETLSLTCTVSGDSISSGDYYWGWIRQPPGKGLEWIGHIYYSGVTYYNPSLKSRVTISVDTSRNQFSLKLSSVTAADTAVYYCTREDSSNWRSRGQGTLVTVSSGTGGGGSGGGGSGGGGSEFDIQMTQSPSSLSASVGDRVTITCKASDHINNWLAWYQQKPGQAPKLLIYGATTLETGVPSRFSGSGSGTDYTLTISSLQPEDFATYYCQQSWNTPWTFGQGTKLEIKRLEDLKNVFPPEVAVFEPSEAEISHTQKATLVCLATGFYPDHVELSWWVNGKEVHSGVCTDPQPLKEQPALNDSRYCLSSRLRVSATFWQNPRNHFRCQVQFYGLSENDEWTQDRAKPVTQIVSAEAWGRADCGFTSESYQQGVLSATILYEILLGKATLYAVLVSALVLMAMVKRKDSRGRAKRSGSGATNFSLLKQAGDVEENPGPTSMDWIWRILFLVGAATGAHSGPEVAALEKEVAALEKEVAALEKEVAALEKGSGGGGSGGGGSGGGGSFEQVQLQQPGAELVKPGASVKMSCKASGYAFSSYWINWMKQKPGQGLEWIGQIYPGDGDTNYNGKFKGRATLTADTSSSTAYMQLSSLTSEDSAVYFCARSITTVVGCAMDYWGQGTSVTVSSTRIQNPDPAVYQLRDSKSSDKSVCLFTDFDSQTNVSQSKDSDVYITDKCVLDMRSMDFKSNSAVAWSNKSDFACANAFNNSIIPEDTFFPSPESSCDVKLVEKSFETDTNLNFQNLSVIGFRILLLKVAGFNLLMTLRLWSS

SEQ ID NO: 15365 - protein, 1031 aa, Artificial Sequence
  Synthetic Polypeptide
MALPVTALLLPLALLLHAARPQLQLQESGPGLVKPSETLSLTCTVSGDSISSGDYYWGWIRQPPGKGLEWIGHIYYSGVTYYNPSLKSRVTISVDTSRNQFSLKLSSVTAADTAVYYCTREDSSNWRSRGQGTLVTVSSGTGGGGSGGGGSGGGGSEFDIQMTQSPSSLSASVGDRVTITCKASDHINNWLAWYQQKPGQAPKLLIYGATTLETGVPSRFSGSGSGTDYTLTISSLQPEDFATYYCQQSWNTPWTFGQGTKLEIKRLEDLKNVFPPEVAVFEPSEAEISHTQKATLVCLATGFYPDHVELSWWVNGKEVHSGVCTDPQPLKEQPALNDSRYCLSSRLRVSATFWQNPRNHFRCQVQFYGLSENDEWTQDRAKPVTQIVSAEAWGRADCGFTSESYQQGVLSATILYEILLGKATLYAVLVSALVLMAMVKRKDSRGRAKRSGSGATNFSLLKQAGDVEENPGPTSMDWIWRILFLVGAATGAHSGPEVAALEKEVAALEKEVAALEKEVAALEKGSGGGGSGGGGSGGGGSFEQVQLQQPGAELVKPGASVKMSCKASGYAFSSYWINWMKQKPGQGLEWIGQIYPGDGDTNYNGKFKGRATLTADTSSSTAYMQLSSLTSEDSAVYFCARSITTVVGCAMDYWGQGTSVTVSSTRIQNPDPAVYQLRDSKSSDKSVCLFTDFDSQTNVSQSKDSDVYITDKCVLDMRSMDFKSNSAVAWSNKSDFACANAFNNSIIPEDTFFPSPESSCDVKLVEKSFETDTNLNFQNLSVIGFRILLLKVAGFNLLMTLRLWSSRAKRSGSGVKQTLNFDLLKLAGDVESNPGPSRGGIHTMATYEVLCEVARKLGTDDREVVLFLLNVFIPQPTLAQLIGALRALKEEGRLTFPLLAECLFRAGRRDLLRDLLHLDPRFLERHLAGTMSYFSPYQLTVLHVDGELCARDIRSLIFLSKDTIGSRSTPQTFLHWVYCMENLDLLGPTDVDALMSMLRSLSRVDLQRQVQTLMGLHLSGPSHSQHYRHTP

SEQ ID NO: 15366 - protein, 810 aa, Artificial Sequence
  Synthetic Polypeptide
MALPVTALLLPLALLLHAARPQLQLQESGPGLVKPSETLSLTCTVSGDSISSGDYYWGWIRQPPGKGLEWIGHIYYSGVTYYNPSLKSRVTISVDTSRNQFSLKLSSVTAADTAVYYCTREDSSNWRSRGQGTLVTVSSGTGGGGSGGGGSGGGGSEFDIQMTQSPSSLSASVGDRVTITCKASDHINNWLAWYQQKPGQAPKLLIYGATTLETGVPSRFSGSGSGTDYTLTISSLQPEDFATYYCQQSWNTPWTFGQGTKLEIKRLEIQNPDPAVYQLRDSKSSDKSVCLFTDFDSQTNVSQSKDSDVYITDKCVLDMRSMDFKSNSAVAWSNKSDFACANAFNNSIIPEDTFFPSPESSCDVKLVEKSFETDTNLNFQNLSVIGFRILLLKVAGFNLLMTLRLWSSRAKRSGSGVKQTLNFDLLKLAGDVESNPGPTSMDWIWRILFLVGAATGAHSGPEVAALEKEVAALEKEVAALEKEVAALEKGSGGGGSGGGGSGGGGSFEQVQLQQPGAELVKPGASVKMSCKASGYAFSSYWINWMKQKPGQGLEWIGQIYPGDGDTNYNGKFKGRATLTADTSSSTAYMQLSSLTSEDSAVYFCARSITTVVGCAMDYWGQGTSVTVSSTREDLKNVFPPEVAVFEPSEAEISHTQKATLVCLATGFYPDHVELSWWVNGKEVHSGVCTDPQPLKEQPALNDSRYCLSSRLRVSATFWQNPRNHFRCQVQFYGLSENDEWTQDRAKPVTQIVSAEAWGRADCGFTSESYQQGVLSATILYEILLGKATLYAVLVSALVLMAMVKRKDSRG

SEQ ID NO: 15367 - protein, 1032 aa, Artificial Sequence
  Synthetic Polypeptide
MALPVTALLLPLALLLHAARPQLQLQESGPGLVKPSETLSLTCTVSGDSISSGDYYWGWIRQPPGKGLEWIGHIYYSGVTYYNPSLKSRVTISVDTSRNQFSLKLSSVTAADTAVYYCTREDSSNWRSRGQGTLVTVSSGTGGGGSGGGGSGGGGSEFDIQMTQSPSSLSASVGDRVTITCKASDHINNWLAWYQQKPGQAPKLLIYGATTLETGVPSRFSGSGSGTDYTLTISSLQPEDFATYYCQQSWNTPWTFGQGTKLEIKRLEIQNPDPAVYQLRDSKSSDKSVCLFTDFDSQTNVSQSKDSDVYITDKCVLDMRSMDFKSNSAVAWSNKSDFACANAFNNSIIPEDTFFPSPESSCDVKLVEKSFETDTNLNFQNLSVIGFRILLLKVAGFNLLMTLRLWSSRAKRSGSGVKQTLNFDLLKLAGDVESNPGPTSMDWIWRILFLVGAATGAHSGPEVAALEKEVAALEKEVAALEKEVAALEKGSGGGGSGGGGSGGGGSFEQVQLQQPGAELVKPGASVKMSCKASGYAFSSYWINWMKQKPGQGLEWIGQIYPGDGDTNYNGKFKGRATLTADTSSSTAYMQLSSLTSEDSAVYFCARSITTVVGCAMDYWGQGTSVTVSSTREDLKNVFPPEVAVFEPSEAEISHTQKATLVCLATGFYPDHVELSWWVNGKEVHSGVCTDPQPLKEQPALNDSRYCLSSRLRVSATFWQNPRNHFRCQVQFYGLSENDEWTQDRAKPVTQIVSAEAWGRADCGFTSESYQQGVLSATILYEILLGKATLYAVLVSALVLMAMVKRKDSRGRAKRSGSGATNFSLLKQAGDVEENPGPSRGGIHTMATYEVLCEVARKLGTDDREVVLFLLNVFIPQPTLAQLIGALRALKEEGRLTFPLLAECLFRAGRRDLLRDLLHLDPRFLERHLAGTMSYFSPYQLTVLHVDGELCARDIRSLIFLSKDTIGSRSTPQTFLHWVYCMENLDLLGPTDVDALMSMLRSLSRVDLQRQVQTLMGLHLSGPSHSQHYRHTP

SEQ ID NO: 15368 - protein, 1039 aa, Artificial Sequence
  Synthetic Polypeptide
MALPVTALLLPLALLLHAARPQLQLQESGPGLVKPSETLSLTCTVSGDSISSGDYYWGWIRQPPGKGLEWIGHIYYSGVTYYNPSLKSRVTISVDTSRNQFSLKLSSVTAADTAVYYCTREDSSNWRSRGQGTLVTVSSGTGGGGSGGGGSGGGGSEFDIQMTQSPSSLSASVGDRVTITCKASDHINNWLAWYQQKPGQAPKLLIYGATTLETGVPSRFSGSGSGTDYTLTISSLQPEDFATYYCQQSWNTPWTFGQGTKLEIKRLEDLKNVFPPEVAVFEPSEAEISHTQKATLVCLATGFYPDHVELSWWVNGKEVHSGVSTDPQPLKEQPALNDSRYCLSSRLRVSATFWQNPRNHFRCQVQFYGLSENDEWTQDRAKPVTQIVSAEAWGRADCGFTSESYQQGVLSATILYEILLGKATLYAVLVSALVLMAMVKRKDSRGRAKRSGSGATNFSLLKQAGDVEENPGPTSMDWIWRILFLVGAATGAHSGPEVAALEKEVAALEKEVAALEKEVAALEKGSGGGGSGGGGSGGGGSFEQVQLQQPGAELVKPGASVKMSCKASGYAFSSYWINWMKQKPGQGLEWIGQIYPGDGDTNYNGKFKGRATLTADTSSSTAYMQLSSLTSEDSAVYFCARSITTVVGCAMDYWGQGTSVTVSSTRIQNPDPAVYQLRDSKSSDKSVCLFTDFDSQTNVSQSKDSDVYITDKTVLDMRSMDFKSNSAVAWSNKSDFACANAFNNSIIPEDTFFPSPESSCDVKLVEKSFETDTNLNFQNLSVIGFRILLLKVAGFNLLMTLRLWSSRAKRSGSGVKQTLNFDLLKLAGDVESNPGPSRGHMTEYKPTVRLATRDDVPRAVRTLAAAFADYPATRHTVDPDRHIERVTELQELFLTRVGLDIGKVWVADDGAAVAVWTTPESVEAGAVFAEIGPRMAELSGSRLAAQQQMEGLLAPHRPKEPAWFLATVGVSPDHQGKGLGSAVVLPGVEAAERAGVPAFLETSAPRNLPFYERLGFTVTADVEVPEGPRTWCMTRKPGA

SEQ ID NO: 15369 - protein, 1121 aa, Artificial Sequence
  Synthetic Polypeptide
MALPVTALLLPLALLLHAARPQLQLQESGPGLVKPSETLSLTCTVSGDSISSGDYYWGWIRQPPGKGLEWIGHIYYSGVTYYNPSLKSRVTISVDTSRNQFSLKLSSVTAADTAVYYCTREDSSNWRSRGQGTLVTVSSGTGGGGSGGGGSGGGGSEFDIQMTQSPSSLSASVGDRVTITCKASDHINNWLAWYQQKPGQAPKLLIYGATTLETGVPSRFSGSGSGTDYTLTISSLQPEDFATYYCQQSWNTPWTFGQGTKLEIKRLEDLKNVFPPEVAVFEPSEAEISHTQKATLVCLATGFYPDHVELSWWVNGKEVHSGVSTDPQPLKEQPALNDSRYCLSSRLRVSATFWQNPRNHFRCQVQFYGLSENDEWTQDRAKPVTQIVSAEAWGRADCGFTSESYQQGVLSATILYEILLGKATLYAVLVSALVLMAMVKRKDSRGRAKRSGSGATNFSLLKQAGDVEENPGPTSMDWIWRILFLVGAATGAHSGPEVAALEKEVAALEKEVAALEKEVAALEKGSGGGGSGGGGSGGGGSFEQVQLQQPGAELVKPGASVKMSCKASGYAFSSYWINWMKQKPGQGLEWIGQIYPGDGDTNYNGKFKGRATLTADTSSSTAYMQLSSLTSEDSAVYFCARSITTVVGCAMDYWGQGTSVTVSSTREQKLISEEDGSGTPFPSLAPPIMLLVDGKQQMVVVCLVLDVAPPGLDSPIWFSAGNGSALDAFTYGPSPATDGTWTNLAHLSLPSEELASWEPLVCHTGPGAEGHSRSTQPMHLSGEASTARTCPQEPLRGTPGGALWLGVLRLLLFKLLLFDLLLTCSCLCDPAGPLPSPATTTRLRALGSHRLHPATETGGREATSSPRPQPRDRRWGDTPPGRKPGSPVRAKRSGSGVKQTLNFDLLKLAGDVESNPGPSRGHMTEYKPTVRLATRDDVPRAVRTLAAAFADYPATRHTVDPDRHIERVTELQELFLTRVGLDIGKVWVADDGAAVAVWTTPESVEAGAVFAEIGPRMAELSGSRLAAQQQMEGLLAPHRPKEPAWFLATVGVSPDHQGKGLGSAVVLPGVEAAERAGVPAFLETSAPRNLPFYERLGFTVTADVEVPEGPRTWCMTRKPGA

SEQ ID NO: 15370 - protein, 1076 aa, Artificial Sequence
  Synthetic Polypeptide
MALPVTALLLPLALLLHAARPQLQLQESGPGLVKPSETLSLTCTVSGDSISSGDYYWGWIRQPPGKGLEWIGHIYYSGVTYYNPSLKSRVTISVDTSRNQFSLKLSSVTAADTAVYYCTREDSSNWRSRGQGTLVTVSSGTGGGGSGGGGSGGGGSEFDIQMTQSPSSLSASVGDRVTITCKASDHINNWLAWYQQKPGQAPKLLIYGATTLETGVPSRFSGSGSGTDYTLTISSLQPEDFATYYCQQSWNTPWTFGQGTKLEIKRLEGKPIPNPLLGLDSTGSGDKQLDADVSPKPTIFLPSIAETKLQKAGTYLCLLEKFFPDVIKIHWQEKKSNTILGSQEGNTMKTNDTYMKFSWLTVPEKSLDKEHRCIVRHENNKNGVDQEIIFPPIKTDVITMDPKDNCSKDANDTLLLQLTNTSAYYMYLLLLLKSVVYFAIITCCLLRRTAFCCNGEKSRAKRSGSGATNFSLLKQAGDVEENPGPTSMDWIWRILFLVGAATGAHSGPEVAALEKEVAALEKEVAALEKEVAALEKGSGGGGSGGGGSGGGGSFEQVQLQQPGAELVKPGASVKMSCKASGYAFSSYWINWMKQKPGQGLEWIGQIYPGDGDTNYNGKFKGRATLTADTSSSTAYMQLSSLTSEDSAVYFCARSITTVVGCAMDYWGQGTSVTVSSTREQKLISEEDGSGSQPHTKPSVFVMKNGTNVACLVKEFYPKDIRINLVSSKKITEFDPAIVISPSGKYNAVKLGKYEDSNSVTCSVQHDNKTVHSTDFEVKTDSTDHVKPKETENTKQPSKSCHKPKAIVHTEKVNMMSLTVLGLRMLFAKTVAVNFLLTAKLFFLRAKRSGSGVKQTLNFDLLKLAGDVESNPGPSRGHMTEYKPTVRLATRDDVPRAVRTLAAAFADYPATRHTVDPDRHIERVTELQELFLTRVGLDIGKVWVADDGAAVAVWTTPESVEAGAVFAEIGPRMAELSGSRLAAQQQMEGLLAPHRPKEPAWFLATVGVSPDHQGKGLGSAVVLPGVEAAERAGVPAFLETSAPRNLPFYERLGFTVTADVEVPEGPRTWCMTRKPGA

SEQ ID NO: 15371 - protein, 814 aa, Artificial Sequence
  Synthetic Polypeptide
MALPVTALLLPLALLLHAARPQLQLQESGPGLVKPSETLSLTCTVSGDSISSGDYYWGWIRQPPGKGLEWIGHIYYSGVTYYNPSLKSRVTISVDTSRNQFSLKLSSVTAADTAVYYCTREDSSNWRSRGQGTLVTVSSGTGGGGSGGGGSGGGGSEFDIQMTQSPSSLSASVGDRVTITCKASDHINNWLAWYQQKPGQAPKLLIYGATTLETGVPSRFSGSGSGTDYTLTISSLQPEDFATYYCQQSWNTPWTFGQGTKLEIKRLESQPHTKPSVFVMKNGTNVACLVKEFYPKDIRINLVSSKKITEFDPAIVISPSGKYNAVKLGKYEDSNSVTCSVQHDNKTVHSTDFEVKTDSTDHVKPKETENTKQPSKSCHKPKAIVHTEKVNMMSLTVLGLRMLFAKTVAVNFLLTAKLFFLRAKRSGSGATNFSLLKQAGDVEENPGPTSMDWIWRILFLVGAATGAHSGPEVAALEKEVAALEKEVAALEKEVAALEKGSGGGGSGGGGSGGGGSFEQVQLQQPGAELVKPGASVKMSCKASGYAFSSYWINWMKQKPGQGLEWIGQIYPGDGDTNYNGKFKGRATLTADTSSSTAYMQLSSLTSEDSAVYFCARSITTVVGCAMDYWGQGTSVTVSSTRDKQLDADVSPKPTIFLPSIAETKLQKAGTYLCLLEKFFPDVIKIHWQEKKSNTILGSQEGNTMKTNDTYMKFSWLTVPEKSLDKEHRCIVRHENNKNGVDQEIIFPPIKTDVITMDPKDNCSKDANDTLLLQLTNTSAYYMYLLLLLKSVVYFAIITCCLLRRTAFCCNGEKS

SEQ ID NO: 15372 - protein, 1216 aa, Artificial Sequence
  Synthetic Polypeptide
MALPVTALLLPLALLLHAARPQLQLQESGPGLVKPSETLSLTCTVSGDSISSGDYYWGWIRQPPGKGLEWIGHIYYSGVTYYNPSLKSRVTISVDTSRNQFSLKLSSVTAADTAVYYCTREDSSNWRSRGQGTLVTVSSGTGGGGSGGGGSGGGGSEFDIQMTQSPSSLSASVGDRVTITCKASDHINNWLAWYQQKPGQAPKLLIYGATTLETGVPSRFSGSGSGTDYTLTISSLQPEDFATYYCQQSWNTPWTFGQGTKLEIKRGQPKANPTVTLFPPSSEELQANKATLVCLISDFYPGAVTVAWKADGSPVKAGVETTKPSKQSNNKYAASSYLSLTPEQWKSHRSYSCQVTHEGSTVEKTVAPTECSGSQSFGLLDPKLCYLLDGILFIYGVILTALFLRVKFSRSADAPAYQQGQNQLYNELNLGRREEYDVLDKRRGRDPEMGGKPQRRKNPQEGLYNELQKDKMAEAYSEIGMKGERRRGKGHDGLYQGLSTATKDTYDALHMQALPPRRAKRSGSGATNFSLLKQAGDVEENPGPTSMDWIWRILFLVGAATGAHSGPEVAALEKEVAALEKEVAALEKEVAALEKGSGGGGSGGGGSGGGGSFEQVQLQQPGAELVKPGASVKMSCKASGYAFSSYWINWMKQKPGQGLEWIGQIYPGDGDTNYNGKFKGRATLTADTSSSTAYMQLSSLTSEDSAVYFCARSITTVVGCAMDYWGQGTSVTVSSASTKGPSVFPLAPSSKSTSGGTAALGCLVKDYFPEPVTVSWNSGALTSGVHTFPAVLQSSGLYSLSSVVTVPSSSLGTQTYICNVNHKPSNTKVDKRVEPKSCGTQSFGLLDPKLCYLLDGILFIYGVILTALFLRVKFSRSADAPAYQQGQNQLYNELNLGRREEYDVLDKRRGRDPEMGGKPQRRKNPQEGLYNELQKDKMAEAYSEIGMKGERRRGKGHDGLYQGLSTATKDTYDALHMQALPPRRAKRSGSGVKQTLNFDLLKLAGDVESNPGPSRGHMTEYKPTVRLATRDDVPRAVRTLAAAFADYPATRHTVDPDRHIERVTELQELFLTRVGLDIGKVWVADDGAAVAVWTTPESVEAGAVFAEIGPRMAELSGSRLAAQQQMEGLLAPHRPKEPAWFLATVGVSPDHQGKGLGSAVVLPGVEAAERAGVPAFLETSAPRNLPFYERLGFTVTADVEVPEGPRTWCMTRKPGA

SEQ ID NO: 15373 - protein, 1002 aa, Artificial Sequence
  Synthetic Polypeptide
MALPVTALLLPLALLLHAARPQLQLQESGPGLVKPSETLSLTCTVSGDSISSGDYYWGWIRQPPGKGLEWIGHIYYSGVTYYNPSLKSRVTISVDTSRNQFSLKLSSVTAADTAVYYCTREDSSNWRSRGQGTLVTVSSGTGGGGSGGGGSGGGGSEFDIQMTQSPSSLSASVGDRVTITCKASDHINNWLAWYQQKPGQAPKLLIYGATTLETGVPSRFSGSGSGTDYTLTISSLQPEDFATYYCQQSWNTPWTFGQGTKLEIKRLEDLKNVFPPEVAVFEPSEAEISHTQKATLVCLATGFYPDHVELSWWVNGKEVHSGVSTDPQPLKEQPALNDSRYCLSSRLRVSATFWQNPRNHFRCQVQFYGLSENDEWTQDRAKPVTQIVSAEAWGRADCGSQSFGLLDPKLCYLLDGILFIYGVILTALFLRVKFSRSADAPAYQQGQNQLYNELNLGRREEYDVLDKRRGRDPEMGGKPQRRKNPQEGLYNELQKDKMAEAYSEIGMKGERRRGKGHDGLYQGLSTATKDTYDALHMQALPPRRAKRSGSGATNFSLLKQAGDVEENPGPTSMDWIWRILFLVGAATGAHSGPEVAALEKEVAALEKEVAALEKEVAALEKGSGGGGSGGGGSGGGGSFEQVQLQQPGAELVKPGASVKMSCKASGYAFSSYWINWMKQKPGQGLEWIGQIYPGDGDTNYNGKFKGRATLTADTSSSTAYMQLSSLTSEDSAVYFCARSITTVVGCAMDYWGQGTSVTVSSTRIQNPDPAVYQLRDSKSSDKSVCLFTDFDSQTNVSQSKDSDVYITDKTVLDMRSMDFKSNSAVAWSNKSDFACANAFNNSIIPEDTFFPSPESSCGTQSFGLLDPKLCYLLDGILFIYGVILTALFLRVKFSRSADAPAYQQGQNQLYNELNLGRREEYDVLDKRRGRDPEMGGKPQRRKNPQEGLYNELQKDKMAEAYSEIGMKGERRRGKGHDGLYQGLSTATKDTYDALHMQALPPR

SEQ ID NO: 15374 - protein, 1002 aa, Artificial Sequence
  Synthetic Polypeptide
MALPVTALLLPLALLLHAARPQLQLQESGPGLVKPSETLSLTCTVSGDSISSGDYYWGWIRQPPGKGLEWIGHIYYSGVTYYNPSLKSRVTISVDTSRNQFSLKLSSVTAADTAVYYCTREDSSNWRSRGQGTLVTVSSGTGGGGSGGGGSGGGGSEFDIQMTQSPSSLSASVGDRVTITCKASDHINNWLAWYQQKPGQAPKLLIYGATTLETGVPSRFSGSGSGTDYTLTISSLQPEDFATYYCQQSWNTPWTFGQGTKLEIKRLEDLKNVFPPEVAVFEPSKAEIAHTQKATLVCLATGFYPDHVELSWWVNGKEVHSGVCTDPQPLKEQPALNDSRYCLSSRLRVSATFWQNPRNHFRCQVQFYGLSENDEWTQDRAKPVTQIVSAEAWGRADCGSQSFGLLDPKLCYLLDGILFIYGVILTALFLRVKFSRSADAPAYQQGQNQLYNELNLGRREEYDVLDKRRGRDPEMGGKPQRRKNPQEGLYNELQKDKMAEAYSEIGMKGERRRGKGHDGLYQGLSTATKDTYDALHMQALPPRRAKRSGSGATNFSLLKQAGDVEENPGPTSMDWIWRILFLVGAATGAHSGPEVAALEKEVAALEKEVAALEKEVAALEKGSGGGGSGGGGSGGGGSFEQVQLQQPGAELVKPGASVKMSCKASGYAFSSYWINWMKQKPGQGLEWIGQIYPGDGDTNYNGKFKGRATLTADTSSSTAYMQLSSLTSEDSAVYFCARSITTVVGCAMDYWGQGTSVTVSSTRIQNPDPAVYQLRDSKSSDKSVCLFTDFDSQTNVSQSKDSDVYITDKCVLDMRSMDFKSNSAVAWSNKSDFACANAFNNSIIPEDTFFPSSDVPCGTQSFGLLDPKLCYLLDGILFIYGVILTALFLRVKFSRSADAPAYQQGQNQLYNELNLGRREEYDVLDKRRGRDPEMGGKPQRRKNPQEGLYNELQKDKMAEAYSEIGMKGERRRGKGHDGLYQGLSTATKDTYDALHMQALPPR

SEQ ID NO: 15375 - protein, 1073 aa, Artificial Sequence
  Synthetic Polypeptide
MALPVTALLLPLALLLHAARPQLQLQESGPGLVKPSETLSLTCTVSGDSISSGDYYWGWIRQPPGKGLEWIGHIYYSGVTYYNPSLKSRVTISVDTSRNQFSLKLSSVTAADTAVYYCTREDSSNWRSRGQGTLVTVSSGTGGGGSGGGGSGGGGSEFDIQMTQSPSSLSASVGDRVTITCKASDHINNWLAWYQQKPGQAPKLLIYGATTLETGVPSRFSGSGSGTDYTLTISSLQPEDFATYYCQQSWNTPWTFGQGTKLEIKRLEGKPIPNPLLGLDSTGSGEDLKNVFPPEVAVFEPSEAEISHTQKATLVCLATGFYPDHVELSWWVNGKEVHSGVSTDPQPLKEQPALNDSRYCLSSRLRVSATFWQNPRNHFRCQVQFYGLSENDEWTQDRAKPVTQIVSAEAWGRADCGSQSFGLLDPKLCYLLDGILFIYGVILTALFLRVKFSRSADAPAYQQGQNQLYNELNLGRREEYDVLDKRRGRDPEMGGKPQRRKNPQEGLYNELQKDKMAEAYSEIGMKGERRRGKGHDGLYQGLSTATKDTYDALHMQALPPRRAKRSGSGATNFSLLKQAGDVEENPGPTSMDWIWRILFLVGAATGAHSGPEVAALEKEVAALEKEVAALEKEVAALEKGSGGGGSGGGGSGGGGSFEQVQLQQPGAELVKPGASVKMSCKASGYAFSSYWINWMKQKPGQGLEWIGQIYPGDGDTNYNGKFKGRATLTADTSSSTAYMQLSSLTSEDSAVYFCARSITTVVGCAMDYWGQGTSVTVSSTREQKLISEEDGSGIQNPDPAVYQLRDSKSSDKSVCLFTDFDSQTNVSQSKDSDVYITDKTVLDMRSMDFKSNSAVAWSNKSDFACANAFNNSIIPEDTFFPSPESSCGTQSFGLLDPKLCYLLDGILFIYGVILTALFLRSKRSRLLHSDYMNMTPRRPGPTRKHYQPYAPPRDFAAYRSRVKFSRSADAPAYQQGQNQLYNELNLGRREEYDVLDKRRGRDPEMGGKPQRRKNPQEGLYNELQKDKMAEAYSEIGMKGERRRGKGHDGLYQGLSTATKDTYDALHMQALPPR

SEQ ID NO: 15376 - protein, 1114 aa, Artificial Sequence
  Synthetic Polypeptide
MALPVTALLLPLALLLHAARPQLQLQESGPGLVKPSETLSLTCTVSGDSISSGDYYWGWIRQPPGKGLEWIGHIYYSGVTYYNPSLKSRVTISVDTSRNQFSLKLSSVTAADTAVYYCTREDSSNWRSRGQGTLVTVSSGTGGGGSGGGGSGGGGSEFDIQMTQSPSSLSASVGDRVTITCKASDHINNWLAWYQQKPGQAPKLLIYGATTLETGVPSRFSGSGSGTDYTLTISSLQPEDFATYYCQQSWNTPWTFGQGTKLEIKRLEGKPIPNPLLGLDSTGSGEDLKNVFPPEVAVFEPSEAEISHTQKATLVCLATGFYPDHVELSWWVNGKEVHSGVSTDPQPLKEQPALNDSRYCLSSRLRVSATFWQNPRNHFRCQVQFYGLSENDEWTQDRAKPVTQIVSAEAWGRADCGSQSFGLLDPKLCYLLDGILFIYGVILTALFLRSKRSRLLHSDYMNMTPRRPGPTRKHYQPYAPPRDFAAYRSRVKFSRSADAPAYQQGQNQLYNELNLGRREEYDVLDKRRGRDPEMGGKPQRRKNPQEGLYNELQKDKMAEAYSEIGMKGERRRGKGHDGLYQGLSTATKDTYDALHMQALPPRRAKRSGSGATNFSLLKQAGDVEENPGPTSMDWIWRILFLVGAATGAHSGPEVAALEKEVAALEKEVAALEKEVAALEKGSGGGGSGGGGSGGGGSFEQVQLQQPGAELVKPGASVKMSCKASGYAFSSYWINWMKQKPGQGLEWIGQIYPGDGDTNYNGKFKGRATLTADTSSSTAYMQLSSLTSEDSAVYFCARSITTVVGCAMDYWGQGTSVTVSSTREQKLISEEDGSGIQNPDPAVYQLRDSKSSDKSVCLFTDFDSQTNVSQSKDSDVYITDKTVLDMRSMDFKSNSAVAWSNKSDFACANAFNNSIIPEDTFFPSPESSCGTQSFGLLDPKLCYLLDGILFIYGVILTALFLRSKRSRLLHSDYMNMTPRRPGPTRKHYQPYAPPRDFAAYRSRVKFSRSADAPAYQQGQNQLYNELNLGRREEYDVLDKRRGRDPEMGGKPQRRKNPQEGLYNELQKDKMAEAYSEIGMKGERRRGKGHDGLYQGLSTATKDTYDALHMQALPPR

SEQ ID NO: 15377 - protein, 1075 aa, Artificial Sequence
  Synthetic Polypeptide
MALPVTALLLPLALLLHAARPQLQLQESGPGLVKPSETLSLTCTVSGDSISSGDYYWGWIRQPPGKGLEWIGHIYYSGVTYYNPSLKSRVTISVDTSRNQFSLKLSSVTAADTAVYYCTREDSSNWRSRGQGTLVTVSSGTGGGGSGGGGSGGGGSEFDIQMTQSPSSLSASVGDRVTITCKASDHINNWLAWYQQKPGQAPKLLIYGATTLETGVPSRFSGSGSGTDYTLTISSLQPEDFATYYCQQSWNTPWTFGQGTKLEIKRLEGKPIPNPLLGLDSTGSGEDLKNVFPPEVAVFEPSEAEISHTQKATLVCLATGFYPDHVELSWWVNGKEVHSGVSTDPQPLKEQPALNDSRYCLSSRLRVSATFWQNPRNHFRCQVQFYGLSENDEWTQDRAKPVTQIVSAEAWGRADCGSQSFGLLDPKLCYLLDGILFIYGVILTALFLRVKFSRSADAPAYQQGQNQLYNELNLGRREEYDVLDKRRGRDPEMGGKPQRRKNPQEGLYNELQKDKMAEAYSEIGMKGERRRGKGHDGLYQGLSTATKDTYDALHMQALPPRRAKRSGSGATNFSLLKQAGDVEENPGPTSMDWIWRILFLVGAATGAHSGPEVAALEKEVAALEKEVAALEKEVAALEKGSGGGGSGGGGSGGGGSFEQVQLQQPGAELVKPGASVKMSCKASGYAFSSYWINWMKQKPGQGLEWIGQIYPGDGDTNYNGKFKGRATLTADTSSSTAYMQLSSLTSEDSAVYFCARSITTVVGCAMDYWGQGTSVTVSSTREQKLISEEDLGSGIQNPDPAVYQLRDSKSSDKSVCLFTDFDSQTNVSQSKDSDVYITDKTVLDMRSMDFKSNSAVAWSNKSDFACANAFNNSIIPEDTFFPSPESSCGTQSFGLLDPKLCYLLDGILFIYGVILTALFLKRGRKKLLYIFKQPFMRPVQTTQEEDGCSCRFPEEEEGGCELRVKFSRSADAPAYQQGQNQLYNELNLGRREEYDVLDKRRGRDPEMGGKPQRRKNPQEGLYNELQKDKMAEAYSEIGMKGERRRGKGHDGLYQGLSTATKDTYDALHMQALPPR

SEQ ID NO: 15378 - protein, 1117 aa, Artificial Sequence
  Synthetic Polypeptide
MALPVTALLLPLALLLHAARPQLQLQESGPGLVKPSETLSLTCTVSGDSISSGDYYWGWIRQPPGKGLEWIGHIYYSGVTYYNPSLKSRVTISVDTSRNQFSLKLSSVTAADTAVYYCTREDSSNWRSRGQGTLVTVSSGTGGGGSGGGGSGGGGSEFDIQMTQSPSSLSASVGDRVTITCKASDHINNWLAWYQQKPGQAPKLLIYGATTLETGVPSRFSGSGSGTDYTLTISSLQPEDFATYYCQQSWNTPWTFGQGTKLEIKRLEGKPIPNPLLGLDSTGSGEDLKNVFPPEVAVFEPSEAEISHTQKATLVCLATGFYPDHVELSWWVNGKEVHSGVSTDPQPLKEQPALNDSRYCLSSRLRVSATFWQNPRNHFRCQVQFYGLSENDEWTQDRAKPVTQIVSAEAWGRADCGSQSFGLLDPKLCYLLDGILFIYGVILTALFLKRGRKKLLYIFKQPFMRPVQTTQEEDGCSCRFPEEEEGGCELRVKFSRSADAPAYQQGQNQLYNELNLGRREEYDVLDKRRGRDPEMGGKPQRRKNPQEGLYNELQKDKMAEAYSEIGMKGERRRGKGHDGLYQGLSTATKDTYDALHMQALPPRRAKRSGSGATNFSLLKQAGDVEENPGPTSMDWIWRILFLVGAATGAHSGPEVAALEKEVAALEKEVAALEKEVAALEKGSGGGGSGGGGSGGGGSFEQVQLQQPGAELVKPGASVKMSCKASGYAFSSYWINWMKQKPGQGLEWIGQIYPGDGDTNYNGKFKGRATLTADTSSSTAYMQLSSLTSEDSAVYFCARSITTVVGCAMDYWGQGTSVTVSSTREQKLISEEDLGSGIQNPDPAVYQLRDSKSSDKSVCLFTDFDSQTNVSQSKDSDVYITDKTVLDMRSMDFKSNSAVAWSNKSDFACANAFNNSIIPEDTFFPSPESSCGTQSFGLLDPKLCYLLDGILFIYGVILTALFLKRGRKKLLYIFKQPFMRPVQTTQEEDGCSCRFPEEEEGGCELRVKFSRSADAPAYQQGQNQLYNELNLGRREEYDVLDKRRGRDPEMGGKPQRRKNPQEGLYNELQKDKMAEAYSEIGMKGERRRGKGHDGLYQGLSTATKDTYDALHMQALPPR

SEQ ID NO: 15379 - protein, 1007 aa, Artificial Sequence
  Synthetic Polypeptide
MALPVTALLLPLALLLHAARPQLQLQESGPGLVKPSETLSLTCTVSGDSISSGDYYWGWIRQPPGKGLEWIGHIYYSGVTYYNPSLKSRVTISVDTSRNQFSLKLSSVTAADTAVYYCTREDSSNWRSRGQGTLVTVSSGTGGGGSGGGGSGGGGSEFDIQMTQSPSSLSASVGDRVTITCKASDHINNWLAWYQQKPGQAPKLLIYGATTLETGVPSRFSGSGSGTDYTLTISSLQPEDFATYYCQQSWNTPWTFGQGTKLEIKRLEQSFGLLDPKLCYLLDGILFIYGVILTALFLRVKFSRSADAPAYQQGQNQLYNELNLGRREEYDVLDKRRGRDPEMGGKPQRRKNPQEGLYNELQKDKMAEAYSEIGMKGERRRGKGHDGLYQGLSTATKDTYDALHMQALPPRRAKRSGSGATNFSLLKQAGDVEENPGPTSMDWIWRILFLVGAATGAHSGPEVAALEKEVAALEKEVAALEKEVAALEKGSGGGGSGGGGSGGGGSFEQVQLQQPGAELVKPGASVKMSCKASGYAFSSYWINWMKQKPGQGLEWIGQIYPGDGDTNYNGKFKGRATLTADTSSSTAYMQLSSLTSEDSAVYFCARSITTVVGCAMDYWGQGTSVTVSSTRQSFGLLDPKLCYLLDGILFIYGVILTALFLRVKFSRSADAPAYQQGQNQLYNELNLGRREEYDVLDKRRGRDPEMGGKPQRRKNPQEGLYNELQKDKMAEAYSEIGMKGERRRGKGHDGLYQGLSTATKDTYDALHMQALPPRRAKRSGSGVKQTLNFDLLKLAGDVESNPGPSRGHMTEYKPTVRLATRDDVPRAVRTLAAAFADYPATRHTVDPDRHIERVTELQELFLTRVGLDIGKVWVADDGAAVAVWTTPESVEAGAVFAEIGPRMAELSGSRLAAQQQMEGLLAPHRPKEPAWFLATVGVSPDHQGKGLGSAVVLPGVEAAERAGVPAFLETSAPRNLPFYERLGFTVTADVEVPEGPRTWCMTRKPGA

SEQ ID NO: 15380 - protein, 832 aa, Artificial Sequence
  Synthetic Polypeptide
MALPVTALLLPLALLLHAARPQLQLQESGPGLVKPSETLSLTCTVSGDSISSGDYYWGWIRQPPGKGLEWIGHIYYSGVTYYNPSLKSRVTISVDTSRNQFSLKLSSVTAADTAVYYCTREDSSNWRSRGQGTLVTVSSGTGGGGSGGGGSGGGGSEFDIQMTQSPSSLSASVGDRVTITCKASDHINNWLAWYQQKPGQAPKLLIYGATTLETGVPSRFSGSGSGTDYTLTISSLQPEDFATYYCQQSWNTPWTFGQGTKLEIKRLEGQPKANPTVTLFPPSSEELQANKATLVCLISDFYPGAVTVAWKADGSPVKAGVETTKPSKQSNNKYAASSYLSLTPEQWKSHRSYSCQVTHEGSTVEKTVAPTECSPIKTDVITMDPKDNCSKDANDTLLLQLTNTSAYYMYLLLLLKSVVYFAIITCCLLRRTAFCCNGEKSRAKRSGSGATNFSLLKQAGDVEENPGPTSMDWIWRILFLVGAATGAHSGPEVAALEKEVAALEKEVAALEKEVAALEKGSGGGGSGGGGSGGGGSFEQVQLQQPGAELVKPGASVKMSCKASGYAFSSYWINWMKQKPGQGLEWIGQIYPGDGDTNYNGKFKGRATLTADTSSSTAYMQLSSLTSEDSAVYFCARSITTVVGCAMDYWGQGTSVTVSSTRASTKGPSVFPLAPSSKSTSGGTAALGCLVKDYFPEPVTVSWNSGALTSGVHTFPAVLQSSGLYSLSSVVTVPSSSLGTQTYICNVNHKPSNTKVDKRVEPKSCEVKTDSTDHVKPKETENTKQPSKSCHKPKAIVHTEKVNMMSLTVLGLRMLFAKTVAVNFLLTAKLFFL

SEQ ID NO: 15381 - protein, 810 aa, Artificial Sequence
  Synthetic Polypeptide
MALPVTALLLPLALLLHAARPQLQLQESGPGLVKPSETLSLTCTVSGDSISSGDYYWGWIRQPPGKGLEWIGHIYYSGVTYYNPSLKSRVTISVDTSRNQFSLKLSSVTAADTAVYYCTREDSSNWRSRGQGTLVTVSSGTGGGGSGGGGSGGGGSEFDIQMTQSPSSLSASVGDRVTITCKASDHINNWLAWYQQKPGQAPKLLIYGATTLETGVPSRFSGSGSGTDYTLTISSLQPEDFATYYCQQSWNTPWTFGQGTKLEIKRLEGQPKANPTVTLFPPSSEELQANKATLVCLISDFYPGAVTVAWKADGSPVKAGVETTKPSKQSNNKYAASSYLSLTPEQWKSHRSYSCQVTHEGSTVEKTVAPTECSGRADCGITSASYHQGVLSATILYEILLGKATLYAVLVSALVLMAMVKRKDSRGRAKRSGSGATNFSLLKQAGDVEENPGPTSMDWIWRILFLVGAATGAHSGPEVAALEKEVAALEKEVAALEKEVAALEKGSGGGGSGGGGSGGGGSFEQVQLQQPGAELVKPGASVKMSCKASGYAFSSYWINWMKQKPGQGLEWIGQIYPGDGDTNYNGKFKGRATLTADTSSSTAYMQLSSLTSEDSAVYFCARSITTVVGCAMDYWGQGTSVTVSSTRASTKGPSVFPLAPSSKSTSGGTAALGCLVKDYFPEPVTVSWNSGALTSGVHTFPAVLQSSGLYSLSSVVTVPSSSLGTQTYICNVNHKPSNTKVDKRVEPKSCIPEDTFFPSSDVPCDVKLVEKSFETDTNLNFQNLSVIGFRILLLKVAGFNLLMTLRLWSS

SEQ ID NO: 15382 - protein, 810 aa, Artificial Sequence
  Synthetic Polypeptide
MALPVTALLLPLALLLHAARPQLQLQESGPGLVKPSETLSLTCTVSGDSISSGDYYWGWIRQPPGKGLEWIGHIYYSGVTYYNPSLKSRVTISVDTSRNQFSLKLSSVTAADTAVYYCTREDSSNWRSRGQGTLVTVSSGTGGGGSGGGGSGGGGSEFDIQMTQSPSSLSASVGDRVTITCKASDHINNWLAWYQQKPGQAPKLLIYGATTLETGVPSRFSGSGSGTDYTLTISSLQPEDFATYYCQQSWNTPWTFGQGTKLEIKRLEGQPKANPTVTLFPPSSEELQANKATLVCLISDFYPGAVTVAWKADGSPVKAGVETTKPSKQSNNKYAASSYLSLTPEQWKSHRSYSCQVTHEGSTVEKTVAPTECSGRADCGFTSESYQQGVLSATILYEILLGKATLYAVLVSALVLMAMVKRKDSRGRAKRSGSGATNFSLLKQAGDVEENPGPTSMDWIWRILFLVGAATGAHSGPEVAALEKEVAALEKEVAALEKEVAALEKGSGGGGSGGGGSGGGGSFEQVQLQQPGAELVKPGASVKMSCKASGYAFSSYWINWMKQKPGQGLEWIGQIYPGDGDTNYNGKFKGRATLTADTSSSTAYMQLSSLTSEDSAVYFCARSITTVVGCAMDYWGQGTSVTVSSTRASTKGPSVFPLAPSSKSTSGGTAALGCLVKDYFPEPVTVSWNSGALTSGVHTFPAVLQSSGLYSLSSVVTVPSSSLGTQTYICNVNHKPSNTKVDKRVEPKSCIPEDTFFPSPESSCDVKLVEKSFETDTNLNFQNLSVIGFRILLLKVAGFNLLMTLRLWSS

SEQ ID NO: 15383 - protein, 776 aa, Artificial Sequence
  Synthetic Polypeptide
MALPVTALLLPLALLLHAARPQLQLQESGPGLVKPSETLSLTCTVSGDSISSGDYYWGWIRQPPGKGLEWIGHIYYSGVTYYNPSLKSRVTISVDTSRNQFSLKLSSVTAADTAVYYCTREDSSNWRSRGQGTLVTVSSLEGQPKANPTVTLFPPSSEELQANKATLVCLISDFYPGAVTVAWKADGSPVKAGVETTKPSKQSNNKYAASSYLSLTPEQWKSHRSYSCQVTHEGSTVEKTVAPTECSGRADCGFTSESYQQGVLSATILYEILLGKATLYAVLVSALVLMAMVKRKDSRGRAKRSGSGATNFSLLKQAGDVEENPGPTSMDWIWRILFLVGAATGAHSGPEVAALEKEVAALEKEVAALEKEVAALEKTRASTKGPSVFPLAPSSKSTSGGTAALGCLVKDYFPEPVTVSWNSGALTSGVHTFPAVLQSSGLYSLSSVVTVPSSSLGTQTYICNVNHKPSNTKVDKRVEPKSCIPEDTFFPSPESSCDVKLVEKSFETDTNLNFQNLSVIGFRILLLKVAGFNLLMTLRLWSSRAKRSGSGVKQTLNFDLLKLAGDVESNPGPSRGHMTEYKPTVRLATRDDVPRAVRTLAAAFADYPATRHTVDPDRHIERVTELQELFLTRVGLDIGKVWVADDGAAVAVWTTPESVEAGAVFAEIGPRMAELSGSRLAAQQQMEGLLAPHRPKEPAWFLATVGVSPDHQGKGLGSAVVLPGVEAAERAGVPAFLETSAPRNLPFYERLGFTVTADVEVPEGPRTWCMTRKPGA

SEQ ID NO: 15384 - protein, 543 aa, Artificial Sequence
  Synthetic Polypeptide
MALPVTALLLPLALLLHAARPQLQLQESGPGLVKPSETLSLTCTVSGDSISSGDYYWGWIRQPPGKGLEWIGHIYYSGVTYYNPSLKSRVTISVDTSRNQFSLKLSSVTAADTAVYYCTREDSSNWRSRGQGTLVTVSSLEGQPKANPTVTLFPPSSEELQANKATLVCLISDFYPGAVTVAWKADGSPVKAGVETTKPSKQSNNKYAASSYLSLTPEQWKSHRSYSCQVTHEGSTVEKTVAPTECSGRADCGFTSESYQQGVLSATILYEILLGKATLYAVLVSALVLMAMVKRKDSRGRAKRSGSGATNFSLLKQAGDVEENPGPTSMDWIWRILFLVGAATGAHSGPEVAALEKEVAALEKEVAALEKEVAALEKTRASTKGPSVFPLAPSSKSTSGGTAALGCLVKDYFPEPVTVSWNSGALTSGVHTFPAVLQSSGLYSLSSVVTVPSSSLGTQTYICNVNHKPSNTKVDKRVEPKSCIPEDTFFPSPESSCDVKLVEKSFETDTNLNFQNLSVIGFRILLLKVAGFNLLMTLRLWSS

SEQ ID NO: 15385 - protein, 571 aa, Artificial Sequence
  Synthetic Polypeptide
MALPVTALLLPLALLLHAARPQLQLQESGPGLVKPSETLSLTCTVSGDSISSGDYYWGWIRQPPGKGLEWIGHIYYSGVTYYNPSLKSRVTISVDTSRNQFSLKLSSVTAADTAVYYCTREDSSNWRSRGQGTLVTVSSLEGSGRADCGFTSESYQQGVLSATILYEILLGKATLYAVLVSALVLMAMVKRKDSRGRAKRSGSGATNFSLLKQAGDVEENPGPTSMDWIWRILFLVGAATGAHSGPEVAALEKEVAALEKEVAALEKEVAALEKTRGSIPEDTFFPSPESSCDVKLVEKSFETDTNLNFQNLSVIGFRILLLKVAGFNLLMTLRLWSSRAKRSGSGVKQTLNFDLLKLAGDVESNPGPSRGHMTEYKPTVRLATRDDVPRAVRTLAAAFADYPATRHTVDPDRHIERVTELQELFLTRVGLDIGKVWVADDGAAVAVWTTPESVEAGAVFAEIGPRMAELSGSRLAAQQQMEGLLAPHRPKEPAWFLATVGVSPDHQGKGLGSAVVLPGVEAAERAGVPAFLETSAPRNLPFYERLGFTVTADVEVPEGPRTWCMTRKPGA

SEQ ID NO: 15386 - protein, 338 aa, Artificial Sequence
  Synthetic Polypeptide
MALPVTALLLPLALLLHAARPQLQLQESGPGLVKPSETLSLTCTVSGDSISSGDYYWGWIRQPPGKGLEWIGHIYYSGVTYYNPSLKSRVTISVDTSRNQFSLKLSSVTAADTAVYYCTREDSSNWRSRGQGTLVTVSSLEGSGRADCGFTSESYQQGVLSATILYEILLGKATLYAVLVSALVLMAMVKRKDSRGRAKRSGSGATNFSLLKQAGDVEENPGPTSMDWIWRILFLVGAATGAHSGPEVAALEKEVAALEKEVAALEKEVAALEKTRGSIPEDTFFPSPESSCDVKLVEKSFETDTNLNFQNLSVIGFRILLLKVAGFNLLMTLRLWSS

SEQ ID NO: 15387 - protein, 580 aa, Artificial Sequence
  Synthetic Polypeptide
MALPVTALLLPLALLLHAARPQLQLQESGPGLVKPSETLSLTCTVSGDSISSGDYYWGWIRQPPGKGLEWIGHIYYSGVTYYNPSLKSRVTISVDTSRNQFSLKLSSVTAADTAVYYCTREDSSNWRSRGQGTLVTVSSLEDKTHTCPPCPAGRADCGFTSESYQQGVLSATILYEILLGKATLYAVLVSALVLMAMVKRKDSRGRAKRSGSGATNFSLLKQAGDVEENPGPTSMDWIWRILFLVGAATGAHSGPEVAALEKEVAALEKEVAALEKEVAALEKTRGSIPEDTFFPSPESSCDVKLVEKSFETDTNLNFQNLSVIGFRILLLKVAGFNLLMTLRLWSSRAKRSGSGVKQTLNFDLLKLAGDVESNPGPSRGHMTEYKPTVRLATRDDVPRAVRTLAAAFADYPATRHTVDPDRHIERVTELQELFLTRVGLDIGKVWVADDGAAVAVWTTPESVEAGAVFAEIGPRMAELSGSRLAAQQQMEGLLAPHRPKEPAWFLATVGVSPDHQGKGLGSAVVLPGVEAAERAGVPAFLETSAPRNLPFYERLGFTVTADVEVPEGPRTWCMTRKPGA

SEQ ID NO: 15388 - protein, 580 aa, Artificial Sequence
  Synthetic Polypeptide
MALPVTALLLPLALLLHAARPQLQLQESGPGLVKPSETLSLTCTVSGDSISSGDYYWGWIRQPPGKGLEWIGHIYYSGVTYYNPSLKSRVTISVDTSRNQFSLKLSSVTAADTAVYYCTREDSSNWRSRGQGTLVTVSSLEGSGRADCGFTSESYQQGVLSATILYEILLGKATLYAVLVSALVLMAMVKRKDSRGRAKRSGSGATNFSLLKQAGDVEENPGPTSMDWIWRILFLVGAATGAHSGPEVAALEKEVAALEKEVAALEKEVAALEKTRDKTHTCPPCPAIPEDTFFPSPESSCDVKLVEKSFETDTNLNFQNLSVIGFRILLLKVAGFNLLMTLRLWSSRAKRSGSGVKQTLNFDLLKLAGDVESNPGPSRGHMTEYKPTVRLATRDDVPRAVRTLAAAFADYPATRHTVDPDRHIERVTELQELFLTRVGLDIGKVWVADDGAAVAVWTTPESVEAGAVFAEIGPRMAELSGSRLAAQQQMEGLLAPHRPKEPAWFLATVGVSPDHQGKGLGSAVVLPGVEAAERAGVPAFLETSAPRNLPFYERLGFTVTADVEVPEGPRTWCMTRKPGA

SEQ ID NO: 15389 - protein, 589 aa, Artificial Sequence
  Synthetic Polypeptide
MALPVTALLLPLALLLHAARPQLQLQESGPGLVKPSETLSLTCTVSGDSISSGDYYWGWIRQPPGKGLEWIGHIYYSGVTYYNPSLKSRVTISVDTSRNQFSLKLSSVTAADTAVYYCTREDSSNWRSRGQGTLVTVSSLEDKTHTCPPCPAGRADCGFTSESYQQGVLSATILYEILLGKATLYAVLVSALVLMAMVKRKDSRGRAKRSGSGATNFSLLKQAGDVEENPGPTSMDWIWRILFLVGAATGAHSGPEVAALEKEVAALEKEVAALEKEVAALEKTRDKTHTCPPCPAIPEDTFFPSPESSCDVKLVEKSFETDTNLNFQNLSVIGFRILLLKVAGFNLLMTLRLWSSRAKRSGSGVKQTLNFDLLKLAGDVESNPGPSRGHMTEYKPTVRLATRDDVPRAVRTLAAAFADYPATRHTVDPDRHIERVTELQELFLTRVGLDIGKVWVADDGAAVAVWTTPESVEAGAVFAEIGPRMAELSGSRLAAQQQMEGLLAPHRPKEPAWFLATVGVSPDHQGKGLGSAVVLPGVEAAERAGVPAFLETSAPRNLPFYERLGFTVTADVEVPEGPRTWCMTRKPGA

SEQ ID NO: 15390 - protein, 356 aa, Artificial Sequence
  Synthetic Polypeptide
MALPVTALLLPLALLLHAARPQLQLQESGPGLVKPSETLSLTCTVSGDSISSGDYYWGWIRQPPGKGLEWIGHIYYSGVTYYNPSLKSRVTISVDTSRNQFSLKLSSVTAADTAVYYCTREDSSNWRSRGQGTLVTVSSLEDKTHTCPPCPAGRADCGFTSESYQQGVLSATILYEILLGKATLYAVLVSALVLMAMVKRKDSRGRAKRSGSGATNFSLLKQAGDVEENPGPTSMDWIWRILFLVGAATGAHSGPEVAALEKEVAALEKEVAALEKEVAALEKTRDKTHTCPPCPAIPEDTFFPSPESSCDVKLVEKSFETDTNLNFQNLSVIGFRILLLKVAGFNLLMTLRLWSS

SEQ ID NO: 15391 - protein, 347 aa, Artificial Sequence
  Synthetic Polypeptide
MALPVTALLLPLALLLHAARPQLQLQESGPGLVKPSETLSLTCTVSGDSISSGDYYWGWIRQPPGKGLEWIGHIYYSGVTYYNPSLKSRVTISVDTSRNQFSLKLSSVTAADTAVYYCTREDSSNWRSRGQGTLVTVSSLEGSGRADCGFTSESYQQGVLSATILYEILLGKATLYAVLVSALVLMAMVKRKDSRGRAKRSGSGATNFSLLKQAGDVEENPGPTSMDWIWRILFLVGAATGAHSGPEVAALEKEVAALEKEVAALEKEVAALEKTRDKTHTCPPCPAIPEDTFFPSPESSCDVKLVEKSFETDTNLNFQNLSVIGFRILLLKVAGFNLLMTLRLWSS

SEQ ID NO: 15392 - protein, 798 aa, Artificial Sequence
  Synthetic Polypeptide
MALPVTALLLPLALLLHAARPQLQLQESGPGLVKPSETLSLTCTVSGDSISSGDYYWGWIRQPPGKGLEWIGHIYYSGVTYYNPSLKSRVTISVDTSRNQFSLKLSSVTAADTAVYYCTREDSSNWRSRGQGTLVTVSSLEGQPKANPTVTLFPPSSEELQANKATLVCLISDFYPGAVTVAWKADGSPVKAGVETTKPSKQSNNKYAASSYLSLTPEQWKSHRSYSCQVTHEGSTVEKTVAPTECSPIKTDVITMDPKDNCSKDANDTLLLQLTNTSAYYMYLLLLLKSVVYFAIITCCLLRRTAFCCNGEKSRAKRSGSGATNFSLLKQAGDVEENPGPTSMDWIWRILFLVGAATGAHSGPEVAALEKEVAALEKEVAALEKEVAALEKTRASTKGPSVFPLAPSSKSTSGGTAALGCLVKDYFPEPVTVSWNSGALTSGVHTFPAVLQSSGLYSLSSVVTVPSSSLGTQTYICNVNHKPSNTKVDKRVEPKSCEVKTDSTDHVKPKETENTKQPSKSCHKPKAIVHTEKVNMMSLTVLGLRMLFAKTVAVNFLLTAKLFFLRAKRSGSGVKQTLNFDLLKLAGDVESNPGPSRGHMTEYKPTVRLATRDDVPRAVRTLAAAFADYPATRHTVDPDRHIERVTELQELFLTRVGLDIGKVWVADDGAAVAVWTTPESVEAGAVFAEIGPRMAELSGSRLAAQQQMEGLLAPHRPKEPAWFLATVGVSPDHQGKGLGSAVVLPGVEAAERAGVPAFLETSAPRNLPFYERLGFTVTADVEVPEGPRTWCMTRKPGA

SEQ ID NO: 15393 - protein, 565 aa, Artificial Sequence
  Synthetic Polypeptide
MALPVTALLLPLALLLHAARPQLQLQESGPGLVKPSETLSLTCTVSGDSISSGDYYWGWIRQPPGKGLEWIGHIYYSGVTYYNPSLKSRVTISVDTSRNQFSLKLSSVTAADTAVYYCTREDSSNWRSRGQGTLVTVSSLEGQPKANPTVTLFPPSSEELQANKATLVCLISDFYPGAVTVAWKADGSPVKAGVETTKPSKQSNNKYAASSYLSLTPEQWKSHRSYSCQVTHEGSTVEKTVAPTECSPIKTDVITMDPKDNCSKDANDTLLLQLTNTSAYYMYLLLLLKSVVYFAIITCCLLRRTAFCCNGEKSRAKRSGSGATNFSLLKQAGDVEENPGPTSMDWIWRILFLVGAATGAHSGPEVAALEKEVAALEKEVAALEKEVAALEKTRASTKGPSVFPLAPSSKSTSGGTAALGCLVKDYFPEPVTVSWNSGALTSGVHTFPAVLQSSGLYSLSSVVTVPSSSLGTQTYICNVNHKPSNTKVDKRVEPKSCEVKTDSTDHVKPKETENTKQPSKSCHKPKAIVHTEKVNMMSLTVLGLRMLFAKTVAVNFLLTAKLFFL

SEQ ID NO: 15394 - protein, 593 aa, Artificial Sequence
  Synthetic Polypeptide
MALPVTALLLPLALLLHAARPQLQLQESGPGLVKPSETLSLTCTVSGDSISSGDYYWGWIRQPPGKGLEWIGHIYYSGVTYYNPSLKSRVTISVDTSRNQFSLKLSSVTAADTAVYYCTREDSSNWRSRGQGTLVTVSSLEGSPIKTDVITMDPKDNCSKDANDTLLLQLTNTSAYYMYLLLLLKSVVYFAIITCCLLRRTAFCCNGEKSRAKRSGSGATNFSLLKQAGDVEENPGPTSMDWIWRILFLVGAATGAHSGPEVAALEKEVAALEKEVAALEKEVAALEKTRGSEVKTDSTDHVKPKETENTKQPSKSCHKPKAIVHTEKVNMMSLTVLGLRMLFAKTVAVNFLLTAKLFFLRAKRSGSGVKQTLNFDLLKLAGDVESNPGPSRGHMTEYKPTVRLATRDDVPRAVRTLAAAFADYPATRHTVDPDRHIERVTELQELFLTRVGLDIGKVWVADDGAAVAVWTTPESVEAGAVFAEIGPRMAELSGSRLAAQQQMEGLLAPHRPKEPAWFLATVGVSPDHQGKGLGSAVVLPGVEAAERAGVPAFLETSAPRNLPFYERLGFTVTADVEVPEGPRTWCMTRKPGA

SEQ ID NO: 15395 - protein, 360 aa, Artificial Sequence
  Synthetic Polypeptide
MALPVTALLLPLALLLHAARPQLQLQESGPGLVKPSETLSLTCTVSGDSISSGDYYWGWIRQPPGKGLEWIGHIYYSGVTYYNPSLKSRVTISVDTSRNQFSLKLSSVTAADTAVYYCTREDSSNWRSRGQGTLVTVSSLEGSPIKTDVITMDPKDNCSKDANDTLLLQLTNTSAYYMYLLLLLKSVVYFAIITCCLLRRTAFCCNGEKSRAKRSGSGATNFSLLKQAGDVEENPGPTSMDWIWRILFLVGAATGAHSGPEVAALEKEVAALEKEVAALEKEVAALEKTRGSEVKTDSTDHVKPKETENTKQPSKSCHKPKAIVHTEKVNMMSLTVLGLRMLFAKTVAVNFLLTAKLFFL

SEQ ID NO: 15396 - protein, 602 aa, Artificial Sequence
  Synthetic Polypeptide
MALPVTALLLPLALLLHAARPQLQLQESGPGLVKPSETLSLTCTVSGDSISSGDYYWGWIRQPPGKGLEWIGHIYYSGVTYYNPSLKSRVTISVDTSRNQFSLKLSSVTAADTAVYYCTREDSSNWRSRGQGTLVTVSSLEDKTHTCPPCPAPIKTDVITMDPKDNCSKDANDTLLLQLTNTSAYYMYLLLLLKSVVYFAIITCCLLRRTAFCCNGEKSRAKRSGSGATNFSLLKQAGDVEENPGPTSMDWIWRILFLVGAATGAHSGPEVAALEKEVAALEKEVAALEKEVAALEKTRGSEVKTDSTDHVKPKETENTKQPSKSCHKPKAIVHTEKVNMMSLTVLGLRMLFAKTVAVNFLLTAKLFFLRAKRSGSGVKQTLNFDLLKLAGDVESNPGPSRGHMTEYKPTVRLATRDDVPRAVRTLAAAFADYPATRHTVDPDRHIERVTELQELFLTRVGLDIGKVWVADDGAAVAVWTTPESVEAGAVFAEIGPRMAELSGSRLAAQQQMEGLLAPHRPKEPAWFLATVGVSPDHQGKGLGSAVVLPGVEAAERAGVPAFLETSAPRNLPFYERLGFTVTADVEVPEGPRTWCMTRKPGA

SEQ ID NO: 15397 - protein, 602 aa, Artificial Sequence
  Synthetic Polypeptide
MALPVTALLLPLALLLHAARPQLQLQESGPGLVKPSETLSLTCTVSGDSISSGDYYWGWIRQPPGKGLEWIGHIYYSGVTYYNPSLKSRVTISVDTSRNQFSLKLSSVTAADTAVYYCTREDSSNWRSRGQGTLVTVSSLEGSPIKTDVITMDPKDNCSKDANDTLLLQLTNTSAYYMYLLLLLKSVVYFAIITCCLLRRTAFCCNGEKSRAKRSGSGATNFSLLKQAGDVEENPGPTSMDWIWRILFLVGAATGAHSGPEVAALEKEVAALEKEVAALEKEVAALEKTRDKTHTCPPCPAEVKTDSTDHVKPKETENTKQPSKSCHKPKAIVHTEKVNMMSLTVLGLRMLFAKTVAVNFLLTAKLFFLRAKRSGSGVKQTLNFDLLKLAGDVESNPGPSRGHMTEYKPTVRLATRDDVPRAVRTLAAAFADYPATRHTVDPDRHIERVTELQELFLTRVGLDIGKVWVADDGAAVAVWTTPESVEAGAVFAEIGPRMAELSGSRLAAQQQMEGLLAPHRPKEPAWFLATVGVSPDHQGKGLGSAVVLPGVEAAERAGVPAFLETSAPRNLPFYERLGFTVTADVEVPEGPRTWCMTRKPGA

SEQ ID NO: 15398 - protein, 611 aa, Artificial Sequence
  Synthetic Polypeptide
MALPVTALLLPLALLLHAARPQLQLQESGPGLVKPSETLSLTCTVSGDSISSGDYYWGWIRQPPGKGLEWIGHIYYSGVTYYNPSLKSRVTISVDTSRNQFSLKLSSVTAADTAVYYCTREDSSNWRSRGQGTLVTVSSLEDKTHTCPPCPAPIKTDVITMDPKDNCSKDANDTLLLQLTNTSAYYMYLLLLLKSVVYFAIITCCLLRRTAFCCNGEKSRAKRSGSGATNFSLLKQAGDVEENPGPTSMDWIWRILFLVGAATGAHSGPEVAALEKEVAALEKEVAALEKEVAALEKTRDKTHTCPPCPAEVKTDSTDHVKPKETENTKQPSKSCHKPKAIVHTEKVNMMSLTVLGLRMLFAKTVAVNFLLTAKLFFLRAKRSGSGVKQTLNFDLLKLAGDVESNPGPSRGHMTEYKPTVRLATRDDVPRAVRTLAAAFADYPATRHTVDPDRHIERVTELQELFLTRVGLDIGKVWVADDGAAVAVWTTPESVEAGAVFAEIGPRMAELSGSRLAAQQQMEGLLAPHRPKEPAWFLATVGVSPDHQGKGLGSAVVLPGVEAAERAGVPAFLETSAPRNLPFYERLGFTVTADVEVPEGPRTWCMTRKPGA

SEQ ID NO: 15399 - protein, 378 aa, Artificial Sequence
  Synthetic Polypeptide
MALPVTALLLPLALLLHAARPQLQLQESGPGLVKPSETLSLTCTVSGDSISSGDYYWGWIRQPPGKGLEWIGHIYYSGVTYYNPSLKSRVTISVDTSRNQFSLKLSSVTAADTAVYYCTREDSSNWRSRGQGTLVTVSSLEDKTHTCPPCPAPIKTDVITMDPKDNCSKDANDTLLLQLTNTSAYYMYLLLLLKSVVYFAIITCCLLRRTAFCCNGEKSRAKRSGSGATNFSLLKQAGDVEENPGPTSMDWIWRILFLVGAATGAHSGPEVAALEKEVAALEKEVAALEKEVAALEKTRDKTHTCPPCPAEVKTDSTDHVKPKETENTKQPSKSCHKPKAIVHTEKVNMMSLTVLGLRMLFAKTVAVNFLLTAKLFFL

SEQ ID NO: 15400 - protein, 369 aa, Artificial Sequence
  Synthetic Polypeptide
MALPVTALLLPLALLLHAARPQLQLQESGPGLVKPSETLSLTCTVSGDSISSGDYYWGWIRQPPGKGLEWIGHIYYSGVTYYNPSLKSRVTISVDTSRNQFSLKLSSVTAADTAVYYCTREDSSNWRSRGQGTLVTVSSLEGSPIKTDVITMDPKDNCSKDANDTLLLQLTNTSAYYMYLLLLLKSVVYFAIITCCLLRRTAFCCNGEKSRAKRSGSGATNFSLLKQAGDVEENPGPTSMDWIWRILFLVGAATGAHSGPEVAALEKEVAALEKEVAALEKEVAALEKTRDKTHTCPPCPAEVKTDSTDHVKPKETENTKQPSKSCHKPKAIVHTEKVNMMSLTVLGLRMLFAKTVAVNFLLTAKLFFL

SEQ ID NO: 15401 - protein, 585 aa, Artificial Sequence
  Synthetic Polypeptide
MALPVTALLLPLALLLHAARPQLQLQESGPGLVKPSETLSLTCTVSGDSISSGDYYWGWIRQPPGKGLEWIGHIYYSGVTYYNPSLKSRVTISVDTSRNQFSLKLSSVTAADTAVYYCTREDSSNWRSRGQGTLVTVSSLEGSMDPKDNCSKDANDTLLLQLTNTSAYYMYLLLLLKSVVYFAIITCCLLRRTAFCCNGEKSRAKRSGSGATNFSLLKQAGDVEENPGPTSMDWIWRILFLVGAATGAHSGPEVAALEKEVAALEKEVAALEKEVAALEKTRGSEVKTDSTDHVKPKETENTKQPSKSCHKPKAIVHTEKVNMMSLTVLGLRMLFAKTVAVNFLLTAKLFFLRAKRSGSGVKQTLNFDLLKLAGDVESNPGPSRGHMTEYKPTVRLATRDDVPRAVRTLAAAFADYPATRHTVDPDRHIERVTELQELFLTRVGLDIGKVWVADDGAAVAVWTTPESVEAGAVFAEIGPRMAELSGSRLAAQQQMEGLLAPHRPKEPAWFLATVGVSPDHQGKGLGSAVVLPGVEAAERAGVPAFLETSAPRNLPFYERLGFTVTADVEVPEGPRTWCMTRKPGA

SEQ ID NO: 15402 - protein, 586 aa, Artificial Sequence
  Synthetic Polypeptide
MALPVTALLLPLALLLHAARPQLQLQESGPGLVKPSETLSLTCTVSGDSISSGDYYWGWIRQPPGKGLEWIGHIYYSGVTYYNPSLKSRVTISVDTSRNQFSLKLSSVTAADTAVYYCTREDSSNWRSRGQGTLVTVSSLEGSPIKTDVITMDPKDNCSKDANDTLLLQLTNTSAYYMYLLLLLKSVVYFAIITCCLLRRTAFCCNGEKSRAKRSGSGATNFSLLKQAGDVEENPGPTSMDWIWRILFLVGAATGAHSGPEVAALEKEVAALEKEVAALEKEVAALEKTRGSDHVKPKETENTKQPSKSCHKPKAIVHTEKVNMMSLTVLGLRMLFAKTVAVNFLLTAKLFFLRAKRSGSGVKQTLNFDLLKLAGDVESNPGPSRGHMTEYKPTVRLATRDDVPRAVRTLAAAFADYPATRHTVDPDRHIERVTELQELFLTRVGLDIGKVWVADDGAAVAVWTTPESVEAGAVFAEIGPRMAELSGSRLAAQQQMEGLLAPHRPKEPAWFLATVGVSPDHQGKGLGSAVVLPGVEAAERAGVPAFLETSAPRNLPFYERLGFTVTADVEVPEGPRTWCMTRKPGA

SEQ ID NO: 15403 - protein, 578 aa, Artificial Sequence
  Synthetic Polypeptide
MALPVTALLLPLALLLHAARPQLQLQESGPGLVKPSETLSLTCTVSGDSISSGDYYWGWIRQPPGKGLEWIGHIYYSGVTYYNPSLKSRVTISVDTSRNQFSLKLSSVTAADTAVYYCTREDSSNWRSRGQGTLVTVSSLEGSMDPKDNCSKDANDTLLLQLTNTSAYYMYLLLLLKSVVYFAIITCCLLRRTAFCCNGEKSRAKRSGSGATNFSLLKQAGDVEENPGPTSMDWIWRILFLVGAATGAHSGPEVAALEKEVAALEKEVAALEKEVAALEKTRGSDHVKPKETENTKQPSKSCHKPKAIVHTEKVNMMSLTVLGLRMLFAKTVAVNFLLTAKLFFLRAKRSGSGVKQTLNFDLLKLAGDVESNPGPSRGHMTEYKPTVRLATRDDVPRAVRTLAAAFADYPATRHTVDPDRHIERVTELQELFLTRVGLDIGKVWVADDGAAVAVWTTPESVEAGAVFAEIGPRMAELSGSRLAAQQQMEGLLAPHRPKEPAWFLATVGVSPDHQGKGLGSAVVLPGVEAAERAGVPAFLETSAPRNLPFYERLGFTVTADVEVPEGPRTWCMTRKPGA

SEQ ID NO: 15404 - protein, 345 aa, Artificial Sequence
  Synthetic Polypeptide
MALPVTALLLPLALLLHAARPQLQLQESGPGLVKPSETLSLTCTVSGDSISSGDYYWGWIRQPPGKGLEWIGHIYYSGVTYYNPSLKSRVTISVDTSRNQFSLKLSSVTAADTAVYYCTREDSSNWRSRGQGTLVTVSSLEGSMDPKDNCSKDANDTLLLQLTNTSAYYMYLLLLLKSVVYFAIITCCLLRRTAFCCNGEKSRAKRSGSGATNFSLLKQAGDVEENPGPTSMDWIWRILFLVGAATGAHSGPEVAALEKEVAALEKEVAALEKEVAALEKTRGSDHVKPKETENTKQPSKSCHKPKAIVHTEKVNMMSLTVLGLRMLFAKTVAVNFLLTAKLFFL

SEQ ID NO: 15405 - protein, 587 aa, Artificial Sequence
  Synthetic Polypeptide
MALPVTALLLPLALLLHAARPQLQLQESGPGLVKPSETLSLTCTVSGDSISSGDYYWGWIRQPPGKGLEWIGHIYYSGVTYYNPSLKSRVTISVDTSRNQFSLKLSSVTAADTAVYYCTREDSSNWRSRGQGTLVTVSSLEDKTHTCPPCPAMDPKDNCSKDANDTLLLQLTNTSAYYMYLLLLLKSVVYFAIITCCLLRRTAFCCNGEKSRAKRSGSGATNFSLLKQAGDVEENPGPTSMDWIWRILFLVGAATGAHSGPEVAALEKEVAALEKEVAALEKEVAALEKTRGSDHVKPKETENTKQPSKSCHKPKAIVHTEKVNMMSLTVLGLRMLFAKTVAVNFLLTAKLFFLRAKRSGSGVKQTLNFDLLKLAGDVESNPGPSRGHMTEYKPTVRLATRDDVPRAVRTLAAAFADYPATRHTVDPDRHIERVTELQELFLTRVGLDIGKVWVADDGAAVAVWTTPESVEAGAVFAEIGPRMAELSGSRLAAQQQMEGLLAPHRPKEPAWFLATVGVSPDHQGKGLGSAVVLPGVEAAERAGVPAFLETSAPRNLPFYERLGFTVTADVEVPEGPRTWCMTRKPGA

SEQ ID NO: 15406 - protein, 596 aa, Artificial Sequence
  Synthetic Polypeptide
MALPVTALLLPLALLLHAARPQLQLQESGPGLVKPSETLSLTCTVSGDSISSGDYYWGWIRQPPGKGLEWIGHIYYSGVTYYNPSLKSRVTISVDTSRNQFSLKLSSVTAADTAVYYCTREDSSNWRSRGQGTLVTVSSLEDKTHTCPPCPAMDPKDNCSKDANDTLLLQLTNTSAYYMYLLLLLKSVVYFAIITCCLLRRTAFCCNGEKSRAKRSGSGATNFSLLKQAGDVEENPGPTSMDWIWRILFLVGAATGAHSGPEVAALEKEVAALEKEVAALEKEVAALEKTRDKTHTCPPCPADHVKPKETENTKQPSKSCHKPKAIVHTEKVNMMSLTVLGLRMLFAKTVAVNFLLTAKLFFLRAKRSGSGVKQTLNFDLLKLAGDVESNPGPSRGHMTEYKPTVRLATRDDVPRAVRTLAAAFADYPATRHTVDPDRHIERVTELQELFLTRVGLDIGKVWVADDGAAVAVWTTPESVEAGAVFAEIGPRMAELSGSRLAAQQQMEGLLAPHRPKEPAWFLATVGVSPDHQGKGLGSAVVLPGVEAAERAGVPAFLETSAPRNLPFYERLGFTVTADVEVPEGPRTWCMTRKPGA

SEQ ID NO: 15407 - protein, 363 aa, Artificial Sequence
  Synthetic Polypeptide
MALPVTALLLPLALLLHAARPQLQLQESGPGLVKPSETLSLTCTVSGDSISSGDYYWGWIRQPPGKGLEWIGHIYYSGVTYYNPSLKSRVTISVDTSRNQFSLKLSSVTAADTAVYYCTREDSSNWRSRGQGTLVTVSSLEDKTHTCPPCPAMDPKDNCSKDANDTLLLQLTNTSAYYMYLLLLLKSVVYFAIITCCLLRRTAFCCNGEKSRAKRSGSGATNFSLLKQAGDVEENPGPTSMDWIWRILFLVGAATGAHSGPEVAALEKEVAALEKEVAALEKEVAALEKTRDKTHTCPPCPADHVKPKETENTKQPSKSCHKPKAIVHTEKVNMMSLTVLGLRMLFAKTVAVNFLLTAKLFFL

SEQ ID NO: 15408 - protein, 300 aa, Artificial Sequence; identical to SEQ ID NO: 14900
  Synthetic Polypeptide

SEQ ID NO: 15409 - protein, 214 aa, Artificial Sequence; identical to SEQ ID NO: 15282
  Synthetic Polypeptide

SEQ ID NO: 15410 - protein, 314 aa, Artificial Sequence; identical to SEQ ID NO: 14902
  Synthetic Polypeptide

SEQ ID NO: 15411 - protein, 222 aa, Artificial Sequence; identical to SEQ ID NO: 15284
  Synthetic Polypeptide

SEQ ID NO: 15412 - protein, 640 aa, Artificial Sequence; identical to SEQ ID NO: 14777
  Synthetic Polypeptide

SEQ ID NO: 15413 - protein, 993 aa, Artificial Sequence; identical to SEQ ID NO: 14778
  Synthetic Polypeptide

SEQ ID NO: 15414 - protein, 992 aa, Artificial Sequence; identical to SEQ ID NO: 14779
  Synthetic Polypeptide

SEQ ID NO: 15415 - protein, 992 aa, Artificial Sequence; identical to SEQ ID NO: 14780
  Synthetic Polypeptide

SEQ ID NO: 15416 - protein, 759 aa, Artificial Sequence; identical to SEQ ID NO: 14781
  Synthetic Polypeptide

SEQ ID NO: 15417 - protein, 984 aa, Artificial Sequence; identical to SEQ ID NO: 14782
  Synthetic Polypeptide

SEQ ID NO: 15418 - protein, 763 aa, Artificial Sequence; identical to SEQ ID NO: 14783
  Synthetic Polypeptide

SEQ ID NO: 15419 - protein, 985 aa, Artificial Sequence; identical to SEQ ID NO: 14784
  Synthetic Polypeptide

SEQ ID NO: 15420 - protein, 992 aa, Artificial Sequence; identical to SEQ ID NO: 14785
  Synthetic Polypeptide

SEQ ID NO: 15421 - protein, 1074 aa, Artificial Sequence; identical to SEQ ID NO: 14786
  Synthetic Polypeptide

SEQ ID NO: 15422 - protein, 1029 aa, Artificial Sequence; identical to SEQ ID NO: 14787
  Synthetic Polypeptide

SEQ ID NO: 15423 - protein, 767 aa, Artificial Sequence; identical to SEQ ID NO: 14788
  Synthetic Polypeptide

SEQ ID NO: 15424 - protein, 1169 aa, Artificial Sequence; identical to SEQ ID NO: 14789
  Synthetic Polypeptide

SEQ ID NO: 15425 - protein, 955 aa, Artificial Sequence; identical to SEQ ID NO: 14790
  Synthetic Polypeptide

SEQ ID NO: 15426 - protein, 955 aa, Artificial Sequence; identical to SEQ ID NO: 14791
  Synthetic Polypeptide

SEQ ID NO: 15427 - protein, 1026 aa, Artificial Sequence; identical to SEQ ID NO: 14792
  Synthetic Polypeptide

SEQ ID NO: 15428 - protein, 1067 aa, Artificial Sequence; identical to SEQ ID NO: 14793
  Synthetic Polypeptide

SEQ ID NO: 15429 - protein, 1028 aa, Artificial Sequence; identical to SEQ ID NO: 14794
  Synthetic Polypeptide

SEQ ID NO: 15430 - protein, 1070 aa, Artificial Sequence; identical to SEQ ID NO: 14795
  Synthetic Polypeptide

SEQ ID NO: 15431 - protein, 960 aa, Artificial Sequence; identical to SEQ ID NO: 14796
  Synthetic Polypeptide

SEQ ID NO: 15432 - protein, 785 aa, Artificial Sequence; identical to SEQ ID NO: 14797
  Synthetic Polypeptide

SEQ ID NO: 15433 - protein, 763 aa, Artificial Sequence; identical to SEQ ID NO: 14798
  Synthetic Polypeptide

SEQ ID NO: 15434 - protein, 763 aa, Artificial Sequence; identical to SEQ ID NO: 14799
  Synthetic Polypeptide

SEQ ID NO: 15435 - protein, 593 aa, Artificial Sequence; identical to SEQ ID NO: 14800
  Synthetic Polypeptide

SEQ ID NO: 15436 - protein, 558 aa, Artificial Sequence; identical to SEQ ID NO: 14801
  Synthetic Polypeptide

SEQ ID NO: 15437 - protein, 568 aa, Artificial Sequence; identical to SEQ ID NO: 14802
  Synthetic Polypeptide

SEQ ID NO: 15438 - protein, 551 aa, Artificial Sequence; identical to SEQ ID NO: 14803
  Synthetic Polypeptide

SEQ ID NO: 15439 - protein, 587 aa, Artificial Sequence; identical to SEQ ID NO: 14804
  Synthetic Polypeptide

SEQ ID NO: 15440 - protein, 421 aa, Artificial Sequence; identical to SEQ ID NO: 14805
  Synthetic Polypeptide

SEQ ID NO: 15441 - protein, 599 aa, Artificial Sequence; identical to SEQ ID NO: 14806
  Synthetic Polypeptide

SEQ ID NO: 15442 - protein, 433 aa, Artificial Sequence; identical to SEQ ID NO: 14807
  Synthetic Polypeptide

SEQ ID NO: 15443 - protein, 708 aa, Artificial Sequence
  Synthetic Polypeptide
MALPVTALLLPLALLLHAARPGMRTEDLPKAVVFLEPQWYRVLEKDSVTLKCQGAYSPEDNSTQWFHNESLISSQASSYFIDAATVDDSGEYRCQTNLSTLSDPVQLEVHIGWLLLQAPRWVFKEEDPIHLRCHSWKNTALHKVTYLQNGKGRKYFHHNSDFYIPKATLKDSGSYFCRGLVGSKNVSSETVNITITQGLAVSTISSFFPPGYQGTGGGGSGGGGSGGGGSEFDIQMTQSPSSLSASVGDRVTITCKASDHINNWLAWYQQKPGQAPKLLIYGATTLETGVPSRFSGSGSGTDYTLTISSLQPEDFATYYCQQSWNTPWTFGQGTKLEIKRGGGGSGGGGSGGGGSQVQLQQPGAELVKPGASVKMSCKASGYAFSSYWINWMKQKPGQGLEWIGQIYPGDGDTNYNGKFKGRATLTADTSSSTAYMQLSSLTSEDSAVYFCARSITTVVGCAMDYWGQGTSVTVSSTREQKLISEEDLKIEVMYPPPYLDNEKSNGTIIHVKGKHLCPSPLFPGPSKPFWVLVVVGGVLACYSLLVTVAFIIFWVRSKRSRLLHSDYMNMTPRRPGPTRKHYQPYAPPRDFAAYRSRVKFSRSADAPAYQQGQNQLYNELNLGRREEYDVLDKRRGRDPEMGGKPRRKNPQEGLYNELQKDKMAEAYSEIGMKGERRRGKGHDGLYQGLSTATKDTYDALHMQALPPR

SEQ ID NO: 15444 - protein, 714 aa, Artificial Sequence
  Synthetic Polypeptide
MALPVTALLLPLALLLHAARPGMRTEDLPKAVVFLEPQWYRVLEKDSVTLKCQGAYSPEDNSTQWFHNESLISSQASSYFIDAATVDDSGEYRCQTNLSTLSDPVQLEVHIGWLLLQAPRWVFKEEDPIHLRCHSWKNTALHKVTYLQNGKGRKYFHHNSDFYIPKATLKDSGSYFCRGLVGSKNVSSETVNITITQGLAVSTISSFFPPGYQGTGGGGSGGGGSGGGGSEFDIQMTQSPSSLSASVGDRVTITCKASDHINNWLAWYQQKPGQAPKLLIYGATTLETGVPSRFSGSGSGTDYTLTISSLQPEDFATYYCQQSWNTPWTFGQGTKLEIKRGGGGSGGGGSGGGGSQVQLQQPGAELVKPGASVKMSCKASGYAFSSYWINWMKQKPGQGLEWIGQIYPGDGDTNYNGKFKGRATLTADTSSSTAYMQLSSLTSEDSAVYFCARSITTVVGCAMDYWGQGTSVTVSSTREQKLISEEDLAKPTTTPAPRPPTPAPTIASQPLSLRPEACRPAAGGAVHTRGLDFACDIYIWAPLAGTCGVLLLSLVITLYCKRGRKKLLYIFKQPFMRPVQTTQEEDGCSCRFPEEEEGGCELRVKFSRSADAPAYQQGQNQLYNELNLGRREEYDVLDKRRGRDPEMGGKPRRKNPQEGLYNELQKDKMAEAYSEIGMKGERRRGKGHDGLYQGLSTATKDTYDALHMQALPPR

SEQ ID NO: 15445 - protein, 1127 aa, Artificial Sequence
  Synthetic Polypeptide
MALPVTALLLPLALLLHAARPGMRTEDLPKAVVFLEPQWYRVLEKDSVTLKCQGAYSPEDNSTQWFHNESLISSQASSYFIDAATVDDSGEYRCQTNLSTLSDPVQLEVHIGWLLLQAPRWVFKEEDPIHLRCHSWKNTALHKVTYLQNGKGRKYFHHNSDFYIPKATLKDSGSYFCRGLVGSKNVSSETVNITITQGLAVSTISSFFPPGYQGTGGGGSGGGGSGGGGSEFDIQMTQSPSSLSASVGDRVTITCKASDHINNWLAWYQQKPGQAPKLLIYGATTLETGVPSRFSGSGSGTDYTLTISSLQPEDFATYYCQQSWNTPWTFGQGTKLEIKRGGGGSGGGGSGGGGSQVQLQQPGAELVKPGASVKMSCKASGYAFSSYWINWMKQKPGQGLEWIGQIYPGDGDTNYNGKFKGRATLTADTSSSTAYMQLSSLTSEDSAVYFCARSITTVVGCAMDYWGQGTSVTVSSTREQKLISEEDLAKPTTTPAPRPPTPAPTIASQPLSLRPEACRPAAGGAVHTRGLDFACDIYIWAPLAGTCGVLLLSLVITLYCGRARVKFSRSADAPAYQQGQNQLYNELNLGRREEYDVLDKRRGRDPEMGGKPRRKNPQEGLYNELQKDKMAEAYSEIGMKGERRRGKGHDGLYQGLSTATKDTYDALHMQALPPRSRGSGATNFSLLKQAGDVEENPGPGIHMATYEVLCEVARKLGTDDREVVLFLLNVFIPQPTLAQLIGALRALKEEGRLTFPLLAECLFRAGRRDLLRDLLHLDPRFLERHLAGTMSYFSPYQLTVLHVDGELCARDIRSLIFLSKDTIGSRSTPQTFLHWVYCMENLDLLGPTDVDALMSMLRSLSRVDLQRQVQTLMGLHLSGPSHSQHYRHTPLETDFYDYKDDDDKTSGSGEGRGSLLTCGDVEENPGPHMTEYKPTVRLATRDDVPRAVRTLAAAFADYPATRHTVDPDRHIERVTELQELFLTRVGLDIGKVWVADDGAAVAVWTTPESVEAGAVFAEIGPRMAELSGSRLAAQQQMEGLLAPHRPKEPAWFLATVGVSPDHQGKGLGSAVVLPGVEAAERAGVPAFLETSAPRNLPFYERLGFTVTADVEVPEGPRTWCMTRKPGA

SEQ ID NO: 15446 - protein, 1067 aa, Artificial Sequence
  Synthetic Polypeptide
MALPVTALLLPLALLLHAARPGMRTEDLPKAVVFLEPQWYRVLEKDSVTLKCQGAYSPEDNSTQWFHNESLISSQASSYFIDAATVDDSGEYRCQTNLSTLSDPVQLEVHIGWLLLQAPRWVFKEEDPIHLRCHSWKNTALHKVTYLQNGKGRKYFHHNSDFYIPKATLKDSGSYFCRGLVGSKNVSSETVNITITQGLAVSTISSFFPPGYQGTGGGGSGGGGSGGGGSEFDIQMTQSPSSLSASVGDRVTITCKASDHINNWLAWYQQKPGQAPKLLIYGATTLETGVPSRFSGSGSGTDYTLTISSLQPEDFATYYCQQSWNTPWTFGQGTKLEIKRLEIQNPDPAVYQLRDSKSSDKSVCLFTDFDSQTNVSQSKDSDVYITDKCVLDMRSMDFKSNSAVAWSNKSDFACANAFNNSIIPEDTFFPSSDVPCDVKLVEKSFETDTNLNFQNLSVIGFRILLLKVAGFNLLMTLRLWSSRAKRSGSGVKQTLNFDLLKLAGDVESNPGPTSMDWIWRILFLVGAATGAHSFEQVQLQQPGAELVKPGASVKMSCKASGYAFSSYWINWMKQKPGQGLEWIGQIYPGDGDTNYNGKFKGRATLTADTSSSTAYMQLSSLTSEDSAVYFCARSITTVVGCAMDYWGQGTSVTVSSTREDLKNVFPPEVAVFEPSKAEIAHTQKATLVCLATGFYPDHVELSWWVNGKEVHSGVCTDPQPLKEQPALNDSRYCLSSRLRVSATFWQNPRNHFRCQVQFYGLSENDEWTQDRAKPVTQIVSAEAWGRADCGITSASYHQGVLSATILYEILLGKATLYAVLVSALVLMAMVKRKDSRGRAKRSGSGATNFSLLKQAGDVEENPGPSRGHMTEYKPTVRLATRDDVPRAVRTLAAAFADYPATRHTVDPDRHIERVTELQELFLTRVGLDIGKVWVADDGAAVAVWTTPESVEAGAVFAEIGPRMAELSGSRLAAQQQMEGLLAPHRPKEPAWFLATVGVSPDHQGKGLGSAVVLPGVEAAERAGVPAFLETSAPRNLPFYERLGFTVTADVEVPEGPRTWCMTRKPGA

SEQ ID NO: 15447 - protein, 1066 aa, Artificial Sequence
  Synthetic Polypeptide
MALPVTALLLPLALLLHAARPGMRTEDLPKAVVFLEPQWYRVLEKDSVTLKCQGAYSPEDNSTQWFHNESLISSQASSYFIDAATVDDSGEYRCQTNLSTLSDPVQLEVHIGWLLLQAPRWVFKEEDPIHLRCHSWKNTALHKVTYLQNGKGRKYFHHNSDFYIPKATLKDSGSYFCRGLVGSKNVSSETVNITITQGLAVSTISSFFPPGYQGTGGGGSGGGGSGGGGSEFDIQMTQSPSSLSASVGDRVTITCKASDHINNWLAWYQQKPGQAPKLLIYGATTLETGVPSRFSGSGSGTDYTLTISSLQPEDFATYYCQQSWNTPWTFGQGTKLEIKRLEDLKNVFPPEVAVFEPSKAEIAHTQKATLVCLATGFYPDHVELSWWVNGKEVHSGVCTDPQPLKEQPALNDSRYCLSSRLRVSATFWQNPRNHFRCQVQFYGLSENDEWTQDRAKPVTQIVSAEAWGRADCGITSASYHQGVLSATILYEILLGKATLYAVLVSALVLMAMVKRKDSRGRAKRSGSGATNFSLLKQAGDVEENPGPTSMDWIWRILFLVGAATGAHSFEQVQLQQPGAELVKPGASVKMSCKASGYAFSSYWINWMKQKPGQGLEWIGQIYPGDGDTNYNGKFKGRATLTADTSSSTAYMQLSSLTSEDSAVYFCARSITTVVGCAMDYWGQGTSVTVSSTRIQNPDPAVYQLRDSKSSDKSVCLFTDFDSQTNVSQSKDSDVYITDKCVLDMRSMDFKSNSAVAWSNKSDFACANAFNNSIIPEDTFFPSSDVPCDVKLVEKSFETDTNLNFQNLSVIGFRILLLKVAGFNLLMTLRLWSSRAKRSGSGVKQTLNFDLLKLAGDVESNPGPSRGHMTEYKPTVRLATRDDVPRAVRTLAAAFADYPATRHTVDPDRHIERVTELQELFLTRVGLDIGKVWVADDGAAVAVWTTPESVEAGAVFAEIGPRMAELSGSRLAAQQQMEGLLAPHRPKEPAWFLATVGVSPDHQGKGLGSAVVLPGVEAAERAGVPAFLETSAPRNLPFYERLGFTVTADVEVPEGPRTWCMTRKPGA

SEQ ID NO: 15448 - protein, 833 aa, Artificial Sequence
  Synthetic Polypeptide
MALPVTALLLPLALLLHAARPGMRTEDLPKAVVFLEPQWYRVLEKDSVTLKCQGAYSPEDNSTQWFHNESLISSQASSYFIDAATVDDSGEYRCQTNLSTLSDPVQLEVHIGWLLLQAPRWVFKEEDPIHLRCHSWKNTALHKVTYLQNGKGRKYFHHNSDFYIPKATLKDSGSYFCRGLVGSKNVSSETVNITITQGLAVSTISSFFPPGYQGTGGGGSGGGGSGGGGSEFDIQMTQSPSSLSASVGDRVTITCKASDHINNWLAWYQQKPGQAPKLLIYGATTLETGVPSRFSGSGSGTDYTLTISSLQPEDFATYYCQQSWNTPWTFGQGTKLEIKRLEDLKNVFPPEVAVFEPSEAEISHTQKATLVCLATGFYPDHVELSWWVNGKEVHSGVCTDPQPLKEQPALNDSRYCLSSRLRVSATFWQNPRNHFRCQVQFYGLSENDEWTQDRAKPVTQIVSAEAWGRADCGFTSESYQQGVLSATILYEILLGKATLYAVLVSALVLMAMVKRKDSRGRAKRSGSGATNFSLLKQAGDVEENPGPTSMDWIWRILFLVGAATGAHSFEQVQLQQPGAELVKPGASVKMSCKASGYAFSSYWINWMKQKPGQGLEWIGQIYPGDGDTNYNGKFKGRATLTADTSSSTAYMQLSSLTSEDSAVYFCARSITTVVGCAMDYWGQGTSVTVSSTRIQNPDPAVYQLRDSKSSDKSVCLFTDFDSQTNVSQSKDSDVYITDKCVLDMRSMDFKSNSAVAWSNKSDFACANAFNNSIIPEDTFFPSPESSCDVKLVEKSFETDTNLNFQNLSVIGFRILLLKVAGFNLLMTLRLWSS

SEQ ID NO: 15449 - protein, 1058 aa, Artificial Sequence
  Synthetic Polypeptide
MALPVTALLLPLALLLHAARPGMRTEDLPKAVVFLEPQWYRVLEKDSVTLKCQGAYSPEDNSTQWFHNESLISSQASSYFIDAATVDDSGEYRCQTNLSTLSDPVQLEVHIGWLLLQAPRWVFKEEDPIHLRCHSWKNTALHKVTYLQNGKGRKYFHHNSDFYIPKATLKDSGSYFCRGLVGSKNVSSETVNITITQGLAVSTISSFFPPGYQGTGGGGSGGGGSGGGGSEFDIQMTQSPSSLSASVGDRVTITCKASDHINNWLAWYQQKPGQAPKLLIYGATTLETGVPSRFSGSGSGTDYTLTISSLQPEDFATYYCQQSWNTPWTFGQGTKLEIKRLEDLKNVFPPEVAVFEPSEAEISHTQKATLVCLATGFYPDHVELSWWVNGKEVHSGVCTDPQPLKEQPALNDSRYCLSSRLRVSATFWQNPRNHFRCQVQFYGLSENDEWTQDRAKPVTQIVSAEAWGRADCGFTSESYQQGVLSATILYEILLGKATLYAVLVSALVLMAMVKRKDSRGRAKRSGSGATNFSLLKQAGDVEENPGPTSMDWIWRILFLVGAATGAHSFEQVQLQQPGAELVKPGASVKMSCKASGYAFSSYWINWMKQKPGQGLEWIGQIYPGDGDTNYNGKFKGRATLTADTSSSTAYMQLSSLTSEDSAVYFCARSITTVVGCAMDYWGQGTSVTVSSTRIQNPDPAVYQLRDSKSSDKSVCLFTDFDSQTNVSQSKDSDVYITDKCVLDMRSMDFKSNSAVAWSNKSDFACANAFNNSIIPEDTFFPSPESSCDVKLVEKSFETDTNLNFQNLSVIGFRILLLKVAGFNLLMTLRLWSSRAKRSGSGVKQTLNFDLLKLAGDVESNPGPSRGGIHTMATYEVLCEVARKLGTDDREVVLFLLNVFIPQPTLAQLIGALRALKEEGRLTFPLLAECLFRAGRRDLLRDLLHLDPRFLERHLAGTMSYFSPYQLTVLHVDGELCARDIRSLIFLSKDTIGSRSTPQTFLHWVYCMENLDLLGPTDVDALMSMLRSLSRVDLQRQVQTLMGLHLSGPSHSQHYRHTP

SEQ ID NO: 15450 - protein, 837 aa, Artificial Sequence
  Synthetic Polypeptide
MALPVTALLLPLALLLHAARPGMRTEDLPKAVVFLEPQWYRVLEKDSVTLKCQGAYSPEDNSTQWFHNESLISSQASSYFIDAATVDDSGEYRCQTNLSTLSDPVQLEVHIGWLLLQAPRWVFKEEDPIHLRCHSWKNTALHKVTYLQNGKGRKYFHHNSDFYIPKATLKDSGSYFCRGLVGSKNVSSETVNITITQGLAVSTISSFFPPGYQGTGGGGSGGGGSGGGGSEFDIQMTQSPSSLSASVGDRVTITCKASDHINNWLAWYQQKPGQAPKLLIYGATTLETGVPSRFSGSGSGTDYTLTISSLQPEDFATYYCQQSWNTPWTFGQGTKLEIKRLEIQNPDPAVYQLRDSKSSDKSVCLFTDFDSQTNVSQSKDSDVYITDKCVLDMRSMDFKSNSAVAWSNKSDFACANAFNNSIIPEDTFFPSPESSCDVKLVEKSFETDTNLNFQNLSVIGFRILLLKVAGFNLLMTLRLWSSRAKRSGSGVKQTLNFDLLKLAGDVESNPGPTSMDWIWRILFLVGAATGAHSFEQVQLQQPGAELVKPGASVKMSCKASGYAFSSYWINWMKQKPGQGLEWIGQIYPGDGDTNYNGKFKGRATLTADTSSSTAYMQLSSLTSEDSAVYFCARSITTVVGCAMDYWGQGTSVTVSSTREDLKNVFPPEVAVFEPSEAEISHTQKATLVCLATGFYPDHVELSWWVNGKEVHSGVCTDPQPLKEQPALNDSRYCLSSRLRVSATFWQNPRNHFRCQVQFYGLSENDEWTQDRAKPVTQIVSAEAWGRADCGFTSESYQQGVLSATILYEILLGKATLYAVLVSALVLMAMVKRKDSRG

SEQ ID NO: 15451 - protein, 1059 aa, Artificial Sequence
  Synthetic Polypeptide
MALPVTALLLPLALLLHAARPGMRTEDLPKAVVFLEPQWYRVLEKDSVTLKCQGAYSPEDNSTQWFHNESLISSQASSYFIDAATVDDSGEYRCQTNLSTLSDPVQLEVHIGWLLLQAPRWVFKEEDPIHLRCHSWKNTALHKVTYLQNGKGRKYFHHNSDFYIPKATLKDSGSYFCRGLVGSKNVSSETVNITITQGLAVSTISSFFPPGYQGTGGGGSGGGGSGGGGSEFDIQMTQSPSSLSASVGDRVTITCKASDHINNWLAWYQQKPGQAPKLLIYGATTLETGVPSRFSGSGSGTDYTLTISSLQPEDFATYYCQQSWNTPWTFGQGTKLEIKRLEIQNPDPAVYQLRDSKSSDKSVCLFTDFDSQTNVSQSKDSDVYITDKCVLDMRSMDFKSNSAVAWSNKSDFACANAFNNSIIPEDTFFPSPESSCDVKLVEKSFETDTNLNFQNLSVIGFRILLLKVAGFNLLMTLRLWSSRAKRSGSGVKQTLNFDLLKLAGDVESNPGPTSMDWIWRILFLVGAATGAHSFEQVQLQQPGAELVKPGASVKMSCKASGYAFSSYWINWMKQKPGQGLEWIGQIYPGDGDTNYNGKFKGRATLTADTSSSTAYMQLSSLTSEDSAVYFCARSITTVVGCAMDYWGQGTSVTVSSTREDLKNVFPPEVAVFEPSEAEISHTQKATLVCLATGFYPDHVELSWWVNGKEVHSGVCTDPQPLKEQPALNDSRYCLSSRLRVSATFWQNPRNHFRCQVQFYGLSENDEWTQDRAKPVTQIVSAEAWGRADCGFTSESYQQGVLSATILYEILLGKATLYAVLVSALVLMAMVKRKDSRGRAKRSGSGATNFSLLKQAGDVEENPGPSRGGIHTMATYEVLCEVARKLGTDDREVVLFLLNVFIPQPTLAQLIGALRALKEEGRLTFPLLAECLFRAGRRDLLRDLLHLDPRFLERHLAGTMSYFSPYQLTVLHVDGELCARDIRSLIFLSKDTIGSRSTPQTFLHWVYCMENLDLLGPTDVDALMSMLRSLSRVDLQRQVQTLMGLHLSGPSHSQHYRHTP

SEQ ID NO: 15452 - protein, 1111 aa, Artificial Sequence
  Synthetic Polypeptide
MALPVTALLLPLALLLHAARPLEGKPIPNPLLGLDSTGSGEDLKNVFPPEVAVFEPSKAEIAHTQKATLVCLATGFYPDHVELSWWVNGKEVHSGVCTDPQPLKEQPALNDSRYCLSSRLRVSATFWQNPRNHFRCQVQFYGLSENDEWTQDRAKPVTQIVSAEAWGRADCGITSASYHQGVLSATILYEILLGKATLYAVLVSALVLMAMVKRKDSRGRAKRSGSGATNFSLLKQAGDVEENPGPTSMALPVTALLLPLALLLHAARPGMRTEDLPKAVVFLEPQWYRVLEKDSVTLKCQGAYSPEDNSTQWFHNESLISSQASSYFIDAATVDDSGEYRCQTNLSTLSDPVQLEVHIGWLLLQAPRWVFKEEDPIHLRCHSWKNTALHKVTYLQNGKGRKYFHHNSDFYIPKATLKDSGSYFCRGLVGSKNVSSETVNITITQGLAVSTISSFFPPGYQGTGGGGSGGGGSGGGGSEFDIQMTQSPSSLSASVGDRVTITCKASDHINNWLAWYQQKPGQAPKLLIYGATTLETGVPSRFSGSGSGTDYTLTISSLQPEDFATYYCQQSWNTPWTFGQGTKLEIKRGGGGSGGGGSGGGGSQVQLQQPGAELVKPGASVKMSCKASGYAFSSYWINWMKQKPGQGLEWIGQIYPGDGDTNYNGKFKGRATLTADTSSSTAYMQLSSLTSEDSAVYFCARSITTVVGCAMDYWGQGTSVTVSSTREQKLISEEDGSGIQNPDPAVYQLRDSKSSDKSVCLFTDFDSQTNVSQSKDSDVYITDKCVLDMRSMDFKSNSAVAWSNKSDFACANAFNNSIIPEDTFFPSSDVPCDVKLVEKSFETDTNLNFQNLSVIGFRILLLKVAGFNLLMTLRLWSSRAKRSGSGVKQTLNFDLLKLAGDVESNPGPSRGHMTEYKPTVRLATRDDVPRAVRTLAAAFADYPATRHTVDPDRHIERVTELQELFLTRVGLDIGKVWVADDGAAVAVWTTPESVEAGAVFAEIGPRMAELSGSRLAAQQQMEGLLAPHRPKEPAWFLATVGVSPDHQGKGLGSAVVLPGVEAAERAGVPAFLETSAPRNLPFYERLGFTVTADVEVPEGPRTWCMTRKPGA

SEQ ID NO: 15453 - protein, 1112 aa, Artificial Sequence
  Synthetic Polypeptide
MALPVTALLLPLALLLHAARPLEQKLISEEDLGSGDRPDPAVYQLRDSKSSDKSVCLFTDFDSQTNVSQSKDSDVYITDKCVLDMRSMDFKSNSAVAWSNKSDFACANAFNNSIIPEDTFFPSPESSCDVKLVEKSFETDTNLNFQNLSVIGFRILLLKVAGFNLLMTLRLWSSSSRAKRSGSGVKQTLNFDLLKLAGDVESNPGPTSMALPVTALLLPLALLLHAARPGMRTEDLPKAVVFLEPQWYRVLEKDSVTLKCQGAYSPEDNSTQWFHNESLISSQASSYFIDAATVDDSGEYRCQTNLSTLSDPVQLEVHIGWLLLQAPRWVFKEEDPIHLRCHSWKNTALHKVTYLQNGKGRKYFHHNSDFYIPKATLKDSGSYFCRGLVGSKNVSSETVNITITQGLAVSTISSFFPPGYQGTGGGGSGGGGSGGGGSEFDIQMTQSPSSLSASVGDRVTITCKASDHINNWLAWYQQKPGQAPKLLIYGATTLETGVPSRFSGSGSGTDYTLTISSLQPEDFATYYCQQSWNTPWTFGQGTKLEIKRGGGGSGGGGSGGGGSQVQLQQPGAELVKPGASVKMSCKASGYAFSSYWINWMKQKPGQGLEWIGQIYPGDGDTNYNGKFKGRATLTADTSSSTAYMQLSSLTSEDSAVYFCARSITTVVGCAMDYWGQGTSVTVSSTRGKPIPNPLLGLDSTGSGEDLKNVFPPEVAVFEPSEAEISHTQKATLVCLATGFYPDHVELSWWVNGKEVHSGVCTDPQPLKEQPALNDSRYCLSSRLRVSATFWQNPRNHFRCQVQFYGLSENDEWTQDRAKPVTQIVSAEAWGRADCGFTSESYQQGVLSATILYEILLGKATLYAVLVSALVLMAMVKRKDSRGRAKRSGSGATNFSLLKQAGDVEENPGPSRGHMTEYKPTVRLATRDDVPRAVRTLAAAFADYPATRHTVDPDRHIERVTELQELFLTRVGLDIGKVWVADDGAAVAVWTTPESVEAGAVFAEIGPRMAELSGSRLAAQQQMEGLLAPHRPKEPAWFLATVGVSPDHQGKGLGSAVVLPGVEAAERAGVPAFLETSAPRNLPFYERLGFTVTADVEVPEGPRTWCMTRKPGA

SEQ ID NO: 15454 - protein, 1066 aa, Artificial Sequence
  Synthetic Polypeptide
MALPVTALLLPLALLLHAARPGMRTEDLPKAVVFLEPQWYRVLEKDSVTLKCQGAYSPEDNSTQWFHNESLISSQASSYFIDAATVDDSGEYRCQTNLSTLSDPVQLEVHIGWLLLQAPRWVFKEEDPIHLRCHSWKNTALHKVTYLQNGKGRKYFHHNSDFYIPKATLKDSGSYFCRGLVGSKNVSSETVNITITQGLAVSTISSFFPPGYQGTGGGGSGGGGSGGGGSEFDIQMTQSPSSLSASVGDRVTITCKASDHINNWLAWYQQKPGQAPKLLIYGATTLETGVPSRFSGSGSGTDYTLTISSLQPEDFATYYCQQSWNTPWTFGQGTKLEIKRLEDLKNVFPPEVAVFEPSEAEISHTQKATLVCLATGFYPDHVELSWWVNGKEVHSGVSTDPQPLKEQPALNDSRYCLSSRLRVSATFWQNPRNHFRCQVQFYGLSENDEWTQDRAKPVTQIVSAEAWGRADCGFTSESYQQGVLSATILYEILLGKATLYAVLVSALVLMAMVKRKDSRGRAKRSGSGATNFSLLKQAGDVEENPGPTSMDWIWRILFLVGAATGAHSFEQVQLQQPGAELVKPGASVKMSCKASGYAFSSYWINWMKQKPGQGLEWIGQIYPGDGDTNYNGKFKGRATLTADTSSSTAYMQLSSLTSEDSAVYFCARSITTVVGCAMDYWGQGTSVTVSSTRIQNPDPAVYQLRDSKSSDKSVCLFTDFDSQTNVSQSKDSDVYITDKTVLDMRSMDFKSNSAVAWSNKSDFACANAFNNSIIPEDTFFPSPESSCDVKLVEKSFETDTNLNFQNLSVIGFRILLLKVAGFNLLMTLRLWSSRAKRSGSGVKQTLNFDLLKLAGDVESNPGPSRGHMTEYKPTVRLATRDDVPRAVRTLAAAFADYPATRHTVDPDRHIERVTELQELFLTRVGLDIGKVWVADDGAAVAVWTTPESVEAGAVFAEIGPRMAELSGSRLAAQQQMEGLLAPHRPKEPAWFLATVGVSPDHQGKGLGSAVVLPGVEAAERAGVPAFLETSAPRNLPFYERLGFTVTADVEVPEGPRTWCMTRKPGA

SEQ ID NO: 15455 - protein, 1148 aa, Artificial Sequence
  Synthetic Polypeptide
MALPVTALLLPLALLLHAARPGMRTEDLPKAVVFLEPQWYRVLEKDSVTLKCQGAYSPEDNSTQWFHNESLISSQASSYFIDAATVDDSGEYRCQTNLSTLSDPVQLEVHIGWLLLQAPRWVFKEEDPIHLRCHSWKNTALHKVTYLQNGKGRKYFHHNSDFYIPKATLKDSGSYFCRGLVGSKNVSSETVNITITQGLAVSTISSFFPPGYQGTGGGGSGGGGSGGGGSEFDIQMTQSPSSLSASVGDRVTITCKASDHINNWLAWYQQKPGQAPKLLIYGATTLETGVPSRFSGSGSGTDYTLTISSLQPEDFATYYCQQSWNTPWTFGQGTKLEIKRLEDLKNVFPPEVAVFEPSEAEISHTQKATLVCLATGFYPDHVELSWWVNGKEVHSGVSTDPQPLKEQPALNDSRYCLSSRLRVSATFWQNPRNHFRCQVQFYGLSENDEWTQDRAKPVTQIVSAEAWGRADCGFTSESYQQGVLSATILYEILLGKATLYAVLVSALVLMAMVKRKDSRGRAKRSGSGATNFSLLKQAGDVEENPGPTSMDWIWRILFLVGAATGAHSFEQVQLQQPGAELVKPGASVKMSCKASGYAFSSYWINWMKQKPGQGLEWIGQIYPGDGDTNYNGKFKGRATLTADTSSSTAYMQLSSLTSEDSAVYFCARSITTVVGCAMDYWGQGTSVTVSSTREQKLISEEDGSGTPFPSLAPPIMLLVDGKQQMVVVCLVLDVAPPGLDSPIWFSAGNGSALDAFTYGPSPATDGTWTNLAHLSLPSEELASWEPLVCHTGPGAEGHSRSTQPMHLSGEASTARTCPQEPLRGTPGGALWLGVLRLLLFKLLLFDLLLTCSCLCDPAGPLPSPATTTRLRALGSHRLHPATETGGREATSSPRPQPRDRRWGDTPPGRKPGSPVRAKRSGSGVKQTLNFDLLKLAGDVESNPGPSRGHMTEYKPTVRLATRDDVPRAVRTLAAAFADYPATRHTVDPDRHIERVTELQELFLTRVGLDIGKVWVADDGAAVAVWTTPESVEAGAVFAEIGPRMAELSGSRLAAQQQMEGLLAPHRPKEPAWFLATVGVSPDHQGKGLGSAVVLPGVEAAERAGVPAFLETSAPRNLPFYERLGFTVTADVEVPEGPRTWCMTRKPGA

SEQ ID NO: 15456 - protein, 1166 aa, Artificial Sequence
  Synthetic Polypeptide
MALPVTALLLPLALLLHAARPLEDLKNVFPPEVAVFEPSEAEISHTQKATLVCLATGFYPDHVELSWWVNGKEVHSGVSTDPQPLKEQPALNDSRYCLSSRLRVSATFWQNPRNHFRCQVQFYGLSENDEWTQDRAKPVTQIVSAEAWGRADCGFTSESYQQGVLSATILYEILLGKATLYAVLVSALVLMAMVKRKDSRGRAKRSGSGATNFSLLKQAGDVEENPGPTSMALPVTALLLPLALLLHAARPGMRTEDLPKAVVFLEPQWYRVLEKDSVTLKCQGAYSPEDNSTQWFHNESLISSQASSYFIDAATVDDSGEYRCQTNLSTLSDPVQLEVHIGWLLLQAPRWVFKEEDPIHLRCHSWKNTALHKVTYLQNGKGRKYFHHNSDFYIPKATLKDSGSYFCRGLVGSKNVSSETVNITITQGLAVSTISSFFPPGYQGTGGGGSGGGGSGGGGSEFDIQMTQSPSSLSASVGDRVTITCKASDHINNWLAWYQQKPGQAPKLLIYGATTLETGVPSRFSGSGSGTDYTLTISSLQPEDFATYYCQQSWNTPWTFGQGTKLEIKRGGGGSGGGGSGGGGSQVQLQQPGAELVKPGASVKMSCKASGYAFSSYWINWMKQKPGQGLEWIGQIYPGDGDTNYNGKFKGRATLTADTSSSTAYMQLSSLTSEDSAVYFCARSITTVVGCAMDYWGQGTSVTVSSTREQKLISEEDLGSGTPFPSLAPPIMLLVDGKQQMVVVCLVLDVAPPGLDSPIWFSAGNGSALDAFTYGPSPATDGTWTNLAHLSLPSEELASWEPLVCHTGPGAEGHSRSTQPMHLSGEASTARTCPQEPLRGTPGGALWLGVLRLLLFKLLLFDLLLTCSCLCDPAGPLPSPATTTRLRALGSHRLHPATETGGREATSSPRPQPRDRRWGDTPPGRKPGSPVRAKRSGSGVKQTLNFDLLKLAGDVESNPGPSRSRGHMTEYKPTVRLATRDDVPRAVRTLAAAFADYPATRHTVDPDRHIERVTELQELFLTRVGLDIGKVWVADDGAAVAVWTTPESVEAGAVFAEIGPRMAELSGSRLAAQQQMEGLLAPHRPKEPAWFLATVGVSPDHQGKGLGSAVVLPGVEAAERAGVPAFLETSAPRNLPFYERLGFTVTADVEVPEGPRTWCMTRKPGA

SEQ ID NO: 15457 - protein, 1103 aa, Artificial Sequence
  Synthetic Polypeptide
MALPVTALLLPLALLLHAARPGMRTEDLPKAVVFLEPQWYRVLEKDSVTLKCQGAYSPEDNSTQWFHNESLISSQASSYFIDAATVDDSGEYRCQTNLSTLSDPVQLEVHIGWLLLQAPRWVFKEEDPIHLRCHSWKNTALHKVTYLQNGKGRKYFHHNSDFYIPKATLKDSGSYFCRGLVGSKNVSSETVNITITQGLAVSTISSFFPPGYQGTGGGGSGGGGSGGGGSEFDIQMTQSPSSLSASVGDRVTITCKASDHINNWLAWYQQKPGQAPKLLIYGATTLETGVPSRFSGSGSGTDYTLTISSLQPEDFATYYCQQSWNTPWTFGQGTKLEIKRLEGKPIPNPLLGLDSTGSGDKQLDADVSPKPTIFLPSIAETKLQKAGTYLCLLEKFFPDVIKIHWQEKKSNTILGSQEGNTMKTNDTYMKFSWLTVPEKSLDKEHRCIVRHENNKNGVDQEIIFPPIKTDVITMDPKDNCSKDANDTLLLQLTNTSAYYMYLLLLLKSVVYFAIITCCLLRRTAFCCNGEKSRAKRSGSGATNFSLLKQAGDVEENPGPTSMDWIWRILFLVGAATGAHSFEQVQLQQPGAELVKPGASVKMSCKASGYAFSSYWINWMKQKPGQGLEWIGQIYPGDGDTNYNGKFKGRATLTADTSSSTAYMQLSSLTSEDSAVYFCARSITTVVGCAMDYWGQGTSVTVSSTREQKLISEEDGSGSQPHTKPSVFVMKNGTNVACLVKEFYPKDIRINLVSSKKITEFDPAIVISPSGKYNAVKLGKYEDSNSVTCSVQHDNKTVHSTDFEVKTDSTDHVKPKETENTKQPSKSCHKPKAIVHTEKVNMMSLTVLGLRMLFAKTVAVNFLLTAKLFFLRAKRSGSGVKQTLNFDLLKLAGDVESNPGPSRGHMTEYKPTVRLATRDDVPRAVRTLAAAFADYPATRHTVDPDRHIERVTELQELFLTRVGLDIGKVWVADDGAAVAVWTTPESVEAGAVFAEIGPRMAELSGSRLAAQQQMEGLLAPHRPKEPAWFLATVGVSPDHQGKGLGSAVVLPGVEAAERAGVPAFLETSAPRNLPFYERLGFTVTADVEVPEGPRTWCMTRKPGA

SEQ ID NO: 15458 - protein, 841 aa, Artificial Sequence
  Synthetic Polypeptide
MALPVTALLLPLALLLHAARPGMRTEDLPKAVVFLEPQWYRVLEKDSVTLKCQGAYSPEDNSTQWFHNESLISSQASSYFIDAATVDDSGEYRCQTNLSTLSDPVQLEVHIGWLLLQAPRWVFKEEDPIHLRCHSWKNTALHKVTYLQNGKGRKYFHHNSDFYIPKATLKDSGSYFCRGLVGSKNVSSETVNITITQGLAVSTISSFFPPGYQGTGGGGSGGGGSGGGGSEFDIQMTQSPSSLSASVGDRVTITCKASDHINNWLAWYQQKPGQAPKLLIYGATTLETGVPSRFSGSGSGTDYTLTISSLQPEDFATYYCQQSWNTPWTFGQGTKLEIKRLESQPHTKPSVFVMKNGTNVACLVKEFYPKDIRINLVSSKKITEFDPAIVISPSGKYNAVKLGKYEDSNSVTCSVQHDNKTVHSTDFEVKTDSTDHVKPKETENTKQPSKSCHKPKAIVHTEKVNMMSLTVLGLRMLFAKTVAVNFLLTAKLFFLRAKRSGSGATNFSLLKQAGDVEENPGPTSMDWIWRILFLVGAATGAHSFEQVQLQQPGAELVKPGASVKMSCKASGYAFSSYWINWMKQKPGQGLEWIGQIYPGDGDTNYNGKFKGRATLTADTSSSTAYMQLSSLTSEDSAVYFCARSITTVVGCAMDYWGQGTSVTVSSTRDKQLDADVSPKPTIFLPSIAETKLQKAGTYLCLLEKFFPDVIKIHWQEKKSNTILGSQEGNTMKTNDTYMKFSWLTVPEKSLDKEHRCIVRHENNKNGVDQEIIFPPIKTDVITMDPKDNCSKDANDTLLLQLTNTSAYYMYLLLLLKSVVYFAIITCCLLRRTAFCCNGEKS

SEQ ID NO: 15459 - protein, 1118 aa, Artificial Sequence
  Synthetic Polypeptide
MALPVTALLLPLALLLHAARPLEGKPIPNPLLGLDSTGSGDKQLDADVSPKPTIFLPSIAETKLQKAGTYLCLLEKFFPDVIKIHWQEKKSNTILGSQEGNTMKTNDTYMKFSWLTVPEKSLDKEHRCIVRHENNKNGVDQEIIFPPIKTDVITMDPKDNCSKDANDTLLLQLTNTSAYYMYLLLLLKSVVYFAIITCCLLRRTAFCCNGEKSRAKRSGSGATNFSLLKQAGDVEENPGPTSMALPVTALLLPLALLLHAARPGMRTEDLPKAVVFLEPQWYRVLEKDSVTLKCQGAYSPEDNSTQWFHNESLISSQASSYFIDAATVDDSGEYRCQTNLSTLSDPVQLEVHIGWLLLQAPRWVFKEEDPIHLRCHSWKNTALHKVTYLQNGKGRKYFHHNSDFYIPKATLKDSGSYFCRGLVGSKNVSSETVNITITQGLAVSTISSFFPPGYQGTGGGGSGGGGSGGGGSEFDIQMTQSPSSLSASVGDRVTITCKASDHINNWLAWYQQKPGQAPKLLIYGATTLETGVPSRFSGSGSGTDYTLTISSLQPEDFATYYCQQSWNTPWTFGQGTKLEIKRGGGGSGGGGSGGGGSQVQLQQPGAELVKPGASVKMSCKASGYAFSSYWINWMKQKPGQGLEWIGQIYPGDGDTNYNGKFKGRATLTADTSSSTAYMQLSSLTSEDSAVYFCARSITTVVGCAMDYWGQGTSVTVSSTREQKLISEEDGSGSQPHTKPSVFVMKNGTNVACLVKEFYPKDIRINLVSSKKITEFDPAIVISPSGKYNAVKLGKYEDSNSVTCSVQHDNKTVHSTDFEVKTDSTDHVKPKETENTKQPSKSCHKPKAIVHTEKVNMMSLTVLGLRMLFAKTVAVNFLLTAKLFFLRAKRSGSGVKQTLNFDLLKLAGDVESNPGPSRGHMTEYKPTVRLATRDDVPRAVRTLAAAFADYPATRHTVDPDRHIERVTELQELFLTRVGLDIGKVWVADDGAAVAVWTTPESVEAGAVFAEIGPRMAELSGSRLAAQQQMEGLLAPHRPKEPAWFLATVGVSPDHQGKGLGSAVVLPGVEAAERAGVPAFLETSAPRNLPFYERLGFTVTADVEVPEGPRTWCMTRKPGA

SEQ ID NO: 15460 - protein, 1243 aa, Artificial Sequence
  Synthetic Polypeptide
MALPVTALLLPLALLLHAARPGMRTEDLPKAVVFLEPQWYRVLEKDSVTLKCQGAYSPEDNSTQWFHNESLISSQASSYFIDAATVDDSGEYRCQTNLSTLSDPVQLEVHIGWLLLQAPRWVFKEEDPIHLRCHSWKNTALHKVTYLQNGKGRKYFHHNSDFYIPKATLKDSGSYFCRGLVGSKNVSSETVNITITQGLAVSTISSFFPPGYQGTGGGGSGGGGSGGGGSEFDIQMTQSPSSLSASVGDRVTITCKASDHINNWLAWYQQKPGQAPKLLIYGATTLETGVPSRFSGSGSGTDYTLTISSLQPEDFATYYCQQSWNTPWTFGQGTKLEIKRGQPKANPTVTLFPPSSEELQANKATLVCLISDFYPGAVTVAWKADGSPVKAGVETTKPSKQSNNKYAASSYLSLTPEQWKSHRSYSCQVTHEGSTVEKTVAPTECSGSQSFGLLDPKLCYLLDGILFIYGVILTALFLRVKFSRSADAPAYQQGQNQLYNELNLGRREEYDVLDKRRGRDPEMGGKPQRRKNPQEGLYNELQKDKMAEAYSEIGMKGERRRGKGHDGLYQGLSTATKDTYDALHMQALPPRRAKRSGSGATNFSLLKQAGDVEENPGPTSMDWIWRILFLVGAATGAHSFEQVQLQQPGAELVKPGASVKMSCKASGYAFSSYWINWMKQKPGQGLEWIGQIYPGDGDTNYNGKFKGRATLTADTSSSTAYMQLSSLTSEDSAVYFCARSITTVVGCAMDYWGQGTSVTVSSASTKGPSVFPLAPSSKSTSGGTAALGCLVKDYFPEPVTVSWNSGALTSGVHTFPAVLQSSGLYSLSSVVTVPSSSLGTQTYICNVNHKPSNTKVDKRVEPKSCGTQSFGLLDPKLCYLLDGILFIYGVILTALFLRVKFSRSADAPAYQQGQNQLYNELNLGRREEYDVLDKRRGRDPEMGGKPQRRKNPQEGLYNELQKDKMAEAYSEIGMKGERRRGKGHDGLYQGLSTATKDTYDALHMQALPPRRAKRSGSGVKQTLNFDLLKLAGDVESNPGPSRGHMTEYKPTVRLATRDDVPRAVRTLAAAFADYPATRHTVDPDRHIERVTELQELFLTRVGLDIGKVWVADDGAAVAVWTTPESVEAGAVFAEIGPRMAELSGSRLAAQQQMEGLLAPHRPKEPAWFLATVGVSPDHQGKGLGSAVVLPGVEAAERAGVPAFLETSAPRNLPFYERLGFTVTADVEVPEGPRTWCMTRKPGA

SEQ ID NO: 15461 - protein, 1029 aa, Artificial Sequence
  Synthetic Polypeptide
MALPVTALLLPLALLLHAARPGMRTEDLPKAVVFLEPQWYRVLEKDSVTLKCQGAYSPEDNSTQWFHNESLISSQASSYFIDAATVDDSGEYRCQTNLSTLSDPVQLEVHIGWLLLQAPRWVFKEEDPIHLRCHSWKNTALHKVTYLQNGKGRKYFHHNSDFYIPKATLKDSGSYFCRGLVGSKNVSSETVNITITQGLAVSTISSFFPPGYQGTGGGGSGGGGSGGGGSEFDIQMTQSPSSLSASVGDRVTITCKASDHINNWLAWYQQKPGQAPKLLIYGATTLETGVPSRFSGSGSGTDYTLTISSLQPEDFATYYCQQSWNTPWTFGQGTKLEIKRLEDLKNVFPPEVAVFEPSEAEISHTQKATLVCLATGFYPDHVELSWWVNGKEVHSGVSTDPQPLKEQPALNDSRYCLSSRLRVSATFWQNPRNHFRCQVQFYGLSENDEWTQDRAKPVTQIVSAEAWGRADCGSQSFGLLDPKLCYLLDGILFIYGVILTALFLRVKFSRSADAPAYQQGQNQLYNELNLGRREEYDVLDKRRGRDPEMGGKPQRRKNPQEGLYNELQKDKMAEAYSEIGMKGERRRGKGHDGLYQGLSTATKDTYDALHMQALPPRRAKRSGSGATNFSLLKQAGDVEENPGPTSMDWIWRILFLVGAATGAHSFEQVQLQQPGAELVKPGASVKMSCKASGYAFSSYWINWMKQKPGQGLEWIGQIYPGDGDTNYNGKFKGRATLTADTSSSTAYMQLSSLTSEDSAVYFCARSITTVVGCAMDYWGQGTSVTVSSTRIQNPDPAVYQLRDSKSSDKSVCLFTDFDSQTNVSQSKDSDVYITDKTVLDMRSMDFKSNSAVAWSNKSDFACANAFNNSIIPEDTFFPSPESSCGTQSFGLLDPKLCYLLDGILFIYGVILTALFLRVKFSRSADAPAYQQGQNQLYNELNLGRREEYDVLDKRRGRDPEMGGKPQRRKNPQEGLYNELQKDKMAEAYSEIGMKGERRRGKGHDGLYQGLSTATKDTYDALHMQALPPR

SEQ ID NO: 15462 - protein, 1029 aa, Artificial Sequence
  Synthetic Polypeptide
MALPVTALLLPLALLLHAARPGMRTEDLPKAVVFLEPQWYRVLEKDSVTLKCQGAYSPEDNSTQWFHNESLISSQASSYFIDAATVDDSGEYRCQTNLSTLSDPVQLEVHIGWLLLQAPRWVFKEEDPIHLRCHSWKNTALHKVTYLQNGKGRKYFHHNSDFYIPKATLKDSGSYFCRGLVGSKNVSSETVNITITQGLAVSTISSFFPPGYQGTGGGGSGGGGSGGGGSEFDIQMTQSPSSLSASVGDRVTITCKASDHINNWLAWYQQKPGQAPKLLIYGATTLETGVPSRFSGSGSGTDYTLTISSLQPEDFATYYCQQSWNTPWTFGQGTKLEIKRLEDLKNVFPPEVAVFEPSKAEIAHTQKATLVCLATGFYPDHVELSWWVNGKEVHSGVCTDPQPLKEQPALNDSRYCLSSRLRVSATFWQNPRNHFRCQVQFYGLSENDEWTQDRAKPVTQIVSAEAWGRADCGSQSFGLLDPKLCYLLDGILFIYGVILTALFLRVKFSRSADAPAYQQGQNQLYNELNLGRREEYDVLDKRRGRDPEMGGKPQRRKNPQEGLYNELQKDKMAEAYSEIGMKGERRRGKGHDGLYQGLSTATKDTYDALHMQALPPRRAKRSGSGATNFSLLKQAGDVEENPGPTSMDWIWRILFLVGAATGAHSFEQVQLQQPGAELVKPGASVKMSCKASGYAFSSYWINWMKQKPGQGLEWIGQIYPGDGDTNYNGKFKGRATLTADTSSSTAYMQLSSLTSEDSAVYFCARSITTVVGCAMDYWGQGTSVTVSSTRIQNPDPAVYQLRDSKSSDKSVCLFTDFDSQTNVSQSKDSDVYITDKCVLDMRSMDFKSNSAVAWSNKSDFACANAFNNSIIPEDTFFPSSDVPCGTQSFGLLDPKLCYLLDGILFIYGVILTALFLRVKFSRSADAPAYQQGQNQLYNELNLGRREEYDVLDKRRGRDPEMGGKPQRRKNPQEGLYNELQKDKMAEAYSEIGMKGERRRGKGHDGLYQGLSTATKDTYDALHMQALPPR

SEQ ID NO: 15463 - protein, 1100 aa, Artificial Sequence
  Synthetic Polypeptide
MALPVTALLLPLALLLHAARPGMRTEDLPKAVVFLEPQWYRVLEKDSVTLKCQGAYSPEDNSTQWFHNESLISSQASSYFIDAATVDDSGEYRCQTNLSTLSDPVQLEVHIGWLLLQAPRWVFKEEDPIHLRCHSWKNTALHKVTYLQNGKGRKYFHHNSDFYIPKATLKDSGSYFCRGLVGSKNVSSETVNITITQGLAVSTISSFFPPGYQGTGGGGSGGGGSGGGGSEFDIQMTQSPSSLSASVGDRVTITCKASDHINNWLAWYQQKPGQAPKLLIYGATTLETGVPSRFSGSGSGTDYTLTISSLQPEDFATYYCQQSWNTPWTFGQGTKLEIKRLEGKPIPNPLLGLDSTGSGEDLKNVFPPEVAVFEPSEAEISHTQKATLVCLATGFYPDHVELSWWVNGKEVHSGVSTDPQPLKEQPALNDSRYCLSSRLRVSATFWQNPRNHFRCQVQFYGLSENDEWTQDRAKPVTQIVSAEAWGRADCGSQSFGLLDPKLCYLLDGILFIYGVILTALFLRVKFSRSADAPAYQQGQNQLYNELNLGRREEYDVLDKRRGRDPEMGGKPQRRKNPQEGLYNELQKDKMAEAYSEIGMKGERRRGKGHDGLYQGLSTATKDTYDALHMQALPPRRAKRSGSGATNFSLLKQAGDVEENPGPTSMDWIWRILFLVGAATGAHSFEQVQLQQPGAELVKPGASVKMSCKASGYAFSSYWINWMKQKPGQGLEWIGQIYPGDGDTNYNGKFKGRATLTADTSSSTAYMQLSSLTSEDSAVYFCARSITTVVGCAMDYWGQGTSVTVSSTREQKLISEEDGSGIQNPDPAVYQLRDSKSSDKSVCLFTDFDSQTNVSQSKDSDVYITDKTVLDMRSMDFKSNSAVAWSNKSDFACANAFNNSIIPEDTFFPSPESSCGTQSFGLLDPKLCYLLDGILFIYGVILTALFLRSKRSRLLHSDYMNMTPRRPGPTRKHYQPYAPPRDFAAYRSRVKFSRSADAPAYQQGQNQLYNELNLGRREEYDVLDKRRGRDPEMGGKPQRRKNPQEGLYNELQKDKMAEAYSEIGMKGERRRGKGHDGLYQGLSTATKDTYDALHMQALPPR

SEQ ID NO: 15464 - protein, 1141 aa, Artificial Sequence
  Synthetic Polypeptide
MALPVTALLLPLALLLHAARPGMRTEDLPKAVVFLEPQWYRVLEKDSVTLKCQGAYSPEDNSTQWFHNESLISSQASSYFIDAATVDDSGEYRCQTNLSTLSDPVQLEVHIGWLLLQAPRWVFKEEDPIHLRCHSWKNTALHKVTYLQNGKGRKYFHHNSDFYIPKATLKDSGSYFCRGLVGSKNVSSETVNITITQGLAVSTISSFFPPGYQGTGGGGSGGGGSGGGGSEFDIQMTQSPSSLSASVGDRVTITCKASDHINNWLAWYQQKPGQAPKLLIYGATTLETGVPSRFSGSGSGTDYTLTISSLQPEDFATYYCQQSWNTPWTFGQGTKLEIKRLEGKPIPNPLLGLDSTGSGEDLKNVFPPEVAVFEPSEAEISHTQKATLVCLATGFYPDHVELSWWVNGKEVHSGVSTDPQPLKEQPALNDSRYCLSSRLRVSATFWQNPRNHFRCQVQFYGLSENDEWTQDRAKPVTQIVSAEAWGRADCGSQSFGLLDPKLCYLLDGILFIYGVILTALFLRSKRSRLLHSDYMNMTPRRPGPTRKHYQPYAPPRDFAAYRSRVKFSRSADAPAYQQGQNQLYNELNLGRREEYDVLDKRRGRDPEMGGKPQRRKNPQEGLYNELQKDKMAEAYSEIGMKGERRRGKGHDGLYQGLSTATKDTYDALHMQALPPRRAKRSGSGATNFSLLKQAGDVEENPGPTSMDWIWRILFLVGAATGAHSFEQVQLQQPGAELVKPGASVKMSCKASGYAFSSYWINWMKQKPGQGLEWIGQIYPGDGDTNYNGKFKGRATLTADTSSSTAYMQLSSLTSEDSAVYFCARSITTVVGCAMDYWGQGTSVTVSSTREQKLISEEDGSGIQNPDPAVYQLRDSKSSDKSVCLFTDFDSQTNVSQSKDSDVYITDKTVLDMRSMDFKSNSAVAWSNKSDFACANAFNNSIIPEDTFFPSPESSCGTQSFGLLDPKLCYLLDGILFIYGVILTALFLRSKRSRLLHSDYMNMTPRRPGPTRKHYQPYAPPRDFAAYRSRVKFSRSADAPAYQQGQNQLYNELNLGRREEYDVLDKRRGRDPEMGGKPQRRKNPQEGLYNELQKDKMAEAYSEIGMKGERRRGKGHDGLYQGLSTATKDTYDALHMQALPPR

SEQ ID NO: 15465 - protein, 1102 aa, Artificial Sequence
  Synthetic Polypeptide
MALPVTALLLPLALLLHAARPGMRTEDLPKAVVFLEPQWYRVLEKDSVTLKCQGAYSPEDNSTQWFHNESLISSQASSYFIDAATVDDSGEYRCQTNLSTLSDPVQLEVHIGWLLLQAPRWVFKEEDPIHLRCHSWKNTALHKVTYLQNGKGRKYFHHNSDFYIPKATLKDSGSYFCRGLVGSKNVSSETVNITITQGLAVSTISSFFPPGYQGTGGGGSGGGGSGGGGSEFDIQMTQSPSSLSASVGDRVTITCKASDHINNWLAWYQQKPGQAPKLLIYGATTLETGVPSRFSGSGSGTDYTLTISSLQPEDFATYYCQQSWNTPWTFGQGTKLEIKRLEGKPIPNPLLGLDSTGSGEDLKNVFPPEVAVFEPSEAEISHTQKATLVCLATGFYPDHVELSWWVNGKEVHSGVSTDPQPLKEQPALNDSRYCLSSRLRVSATFWQNPRNHFRCQVQFYGLSENDEWTQDRAKPVTQIVSAEAWGRADCGSQSFGLLDPKLCYLLDGILFIYGVILTALFLRVKFSRSADAPAYQQGQNQLYNELNLGRREEYDVLDKRRGRDPEMGGKPQRRKNPQEGLYNELQKDKMAEAYSEIGMKGERRRGKGHDGLYQGLSTATKDTYDALHMQALPPRRAKRSGSGATNFSLLKQAGDVEENPGPTSMDWIWRILFLVGAATGAHSFEQVQLQQPGAELVKPGASVKMSCKASGYAFSSYWINWMKQKPGQGLEWIGQIYPGDGDTNYNGKFKGRATLTADTSSSTAYMQLSSLTSEDSAVYFCARSITTVVGCAMDYWGQGTSVTVSSTREQKLISEEDLGSGIQNPDPAVYQLRDSKSSDKSVCLFTDFDSQTNVSQSKDSDVYITDKTVLDMRSMDFKSNSAVAWSNKSDFACANAFNNSIIPEDTFFPSPESSCGTQSFGLLDPKLCYLLDGILFIYGVILTALFLKRGRKKLLYIFKQPFMRPVQTTQEEDGCSCRFPEEEEGGCELRVKFSRSADAPAYQQGQNQLYNELNLGRREEYDVLDKRRGRDPEMGGKPQRRKNPQEGLYNELQKDKMAEAYSEIGMKGERRRGKGHDGLYQGLSTATKDTYDALHMQALPPR

SEQ ID NO: 15466 - protein, 1144 aa, Artificial Sequence
  Synthetic Polypeptide
MALPVTALLLPLALLLHAARPGMRTEDLPKAVVFLEPQWYRVLEKDSVTLKCQGAYSPEDNSTQWFHNESLISSQASSYFIDAATVDDSGEYRCQTNLSTLSDPVQLEVHIGWLLLQAPRWVFKEEDPIHLRCHSWKNTALHKVTYLQNGKGRKYFHHNSDFYIPKATLKDSGSYFCRGLVGSKNVSSETVNITITQGLAVSTISSFFPPGYQGTGGGGSGGGGSGGGGSEFDIQMTQSPSSLSASVGDRVTITCKASDHINNWLAWYQQKPGQAPKLLIYGATTLETGVPSRFSGSGSGTDYTLTISSLQPEDFATYYCQQSWNTPWTFGQGTKLEIKRLEGKPIPNPLLGLDSTGSGEDLKNVFPPEVAVFEPSEAEISHTQKATLVCLATGFYPDHVELSWWVNGKEVHSGVSTDPQPLKEQPALNDSRYCLSSRLRVSATFWQNPRNHFRCQVQFYGLSENDEWTQDRAKPVTQIVSAEAWGRADCGSQSFGLLDPKLCYLLDGILFIYGVILTALFLKRGRKKLLYIFKQPFMRPVQTTQEEDGCSCRFPEEEEGGCELRVKFSRSADAPAYQQGQNQLYNELNLGRREEYDVLDKRRGRDPEMGGKPQRRKNPQEGLYNELQKDKMAEAYSEIGMKGERRRGKGHDGLYQGLSTATKDTYDALHMQALPPRRAKRSGSGATNFSLLKQAGDVEENPGPTSMDWIWRILFLVGAATGAHSFEQVQLQQPGAELVKPGASVKMSCKASGYAFSSYWINWMKQKPGQGLEWIGQIYPGDGDTNYNGKFKGRATLTADTSSSTAYMQLSSLTSEDSAVYFCARSITTVVGCAMDYWGQGTSVTVSSTREQKLISEEDLGSGIQNPDPAVYQLRDSKSSDKSVCLFTDFDSQTNVSQSKDSDVYITDKTVLDMRSMDFKSNSAVAWSNKSDFACANAFNNSIIPEDTFFPSPESSCGTQSFGLLDPKLCYLLDGILFIYGVILTALFLKRGRKKLLYIFKQPFMRPVQTTQEEDGCSCRFPEEEEGGCELRVKFSRSADAPAYQQGQNQLYNELNLGRREEYDVLDKRRGRDPEMGGKPQRRKNPQEGLYNELQKDKMAEAYSEIGMKGERRRGKGHDGLYQGLSTATKDTYDALHMQALPPR

SEQ ID NO: 15467 - protein, 1034 aa, Artificial Sequence
  Synthetic Polypeptide
MALPVTALLLPLALLLHAARPGMRTEDLPKAVVFLEPQWYRVLEKDSVTLKCQGAYSPEDNSTQWFHNESLISSQASSYFIDAATVDDSGEYRCQTNLSTLSDPVQLEVHIGWLLLQAPRWVFKEEDPIHLRCHSWKNTALHKVTYLQNGKGRKYFHHNSDFYIPKATLKDSGSYFCRGLVGSKNVSSETVNITITQGLAVSTISSFFPPGYQGTGGGGSGGGGSGGGGSEFDIQMTQSPSSLSASVGDRVTITCKASDHINNWLAWYQQKPGQAPKLLIYGATTLETGVPSRFSGSGSGTDYTLTISSLQPEDFATYYCQQSWNTPWTFGQGTKLEIKRLEQSFGLLDPKLCYLLDGILFIYGVILTALFLRVKFSRSADAPAYQQGQNQLYNELNLGRREEYDVLDKRRGRDPEMGGKPQRRKNPQEGLYNELQKDKMAEAYSEIGMKGERRRGKGHDGLYQGLSTATKDTYDALHMQALPPRRAKRSGSGATNFSLLKQAGDVEENPGPTSMDWIWRILFLVGAATGAHSFEQVQLQQPGAELVKPGASVKMSCKASGYAFSSYWINWMKQKPGQGLEWIGQIYPGDGDTNYNGKFKGRATLTADTSSSTAYMQLSSLTSEDSAVYFCARSITTVVGCAMDYWGQGTSVTVSSTRQSFGLLDPKLCYLLDGILFIYGVILTALFLRVKFSRSADAPAYQQGQNQLYNELNLGRREEYDVLDKRRGRDPEMGGKPQRRKNPQEGLYNELQKDKMAEAYSEIGMKGERRRGKGHDGLYQGLSTATKDTYDALHMQALPPRRAKRSGSGVKQTLNFDLLKLAGDVESNPGPSRGHMTEYKPTVRLATRDDVPRAVRTLAAAFADYPATRHTVDPDRHIERVTELQELFLTRVGLDIGKVWVADDGAAVAVWTTPESVEAGAVFAEIGPRMAELSGSRLAAQQQMEGLLAPHRPKEPAWFLATVGVSPDHQGKGLGSAVVLPGVEAAERAGVPAFLETSAPRNLPFYERLGFTVTADVEVPEGPRTWCMTRKPGA

SEQ ID NO: 15468 - protein, 859 aa, Artificial Sequence
  Synthetic Polypeptide
MALPVTALLLPLALLLHAARPGMRTEDLPKAVVFLEPQWYRVLEKDSVTLKCQGAYSPEDNSTQWFHNESLISSQASSYFIDAATVDDSGEYRCQTNLSTLSDPVQLEVHIGWLLLQAPRWVFKEEDPIHLRCHSWKNTALHKVTYLQNGKGRKYFHHNSDFYIPKATLKDSGSYFCRGLVGSKNVSSETVNITITQGLAVSTISSFFPPGYQGTGGGGSGGGGSGGGGSEFDIQMTQSPSSLSASVGDRVTITCKASDHINNWLAWYQQKPGQAPKLLIYGATTLETGVPSRFSGSGSGTDYTLTISSLQPEDFATYYCQQSWNTPWTFGQGTKLEIKRLEGQPKANPTVTLFPPSSEELQANKATLVCLISDFYPGAVTVAWKADGSPVKAGVETTKPSKQSNNKYAASSYLSLTPEQWKSHRSYSCQVTHEGSTVEKTVAPTECSPIKTDVITMDPKDNCSKDANDTLLLQLTNTSAYYMYLLLLLKSVVYFAIITCCLLRRTAFCCNGEKSRAKRSGSGATNFSLLKQAGDVEENPGPTSMDWIWRILFLVGAATGAHSFEQVQLQQPGAELVKPGASVKMSCKASGYAFSSYWINWMKQKPGQGLEWIGQIYPGDGDTNYNGKFKGRATLTADTSSSTAYMQLSSLTSEDSAVYFCARSITTVVGCAMDYWGQGTSVTVSSTRASTKGPSVFPLAPSSKSTSGGTAALGCLVKDYFPEPVTVSWNSGALTSGVHTFPAVLQSSGLYSLSSVVTVPSSSLGTQTYICNVNHKPSNTKVDKRVEPKSCEVKTDSTDHVKPKETENTKQPSKSCHKPKAIVHTEKVNMMSLTVLGLRMLFAKTVAVNFLLTAKLFFL

SEQ ID NO: 15469 - protein, 837 aa, Artificial Sequence
  Synthetic Polypeptide
MALPVTALLLPLALLLHAARPGMRTEDLPKAVVFLEPQWYRVLEKDSVTLKCQGAYSPEDNSTQWFHNESLISSQASSYFIDAATVDDSGEYRCQTNLSTLSDPVQLEVHIGWLLLQAPRWVFKEEDPIHLRCHSWKNTALHKVTYLQNGKGRKYFHHNSDFYIPKATLKDSGSYFCRGLVGSKNVSSETVNITITQGLAVSTISSFFPPGYQGTGGGGSGGGGSGGGGSEFDIQMTQSPSSLSASVGDRVTITCKASDHINNWLAWYQQKPGQAPKLLIYGATTLETGVPSRFSGSGSGTDYTLTISSLQPEDFATYYCQQSWNTPWTFGQGTKLEIKRLEGQPKANPTVTLFPPSSEELQANKATLVCLISDFYPGAVTVAWKADGSPVKAGVETTKPSKQSNNKYAASSYLSLTPEQWKSHRSYSCQVTHEGSTVEKTVAPTECSGRADCGITSASYHQGVLSATILYEILLGKATLYAVLVSALVLMAMVKRKDSRGRAKRSGSGATNFSLLKQAGDVEENPGPTSMDWIWRILFLVGAATGAHSFEQVQLQQPGAELVKPGASVKMSCKASGYAFSSYWINWMKQKPGQGLEWIGQIYPGDGDTNYNGKFKGRATLTADTSSSTAYMQLSSLTSEDSAVYFCARSITTVVGCAMDYWGQGTSVTVSSTRASTKGPSVFPLAPSSKSTSGGTAALGCLVKDYFPEPVTVSWNSGALTSGVHTFPAVLQSSGLYSLSSVVTVPSSSLGTQTYICNVNHKPSNTKVDKRVEPKSCIPEDTFFPSSDVPCDVKLVEKSFETDTNLNFQNLSVIGFRILLLKVAGFNLLMTLRLWSS

SEQ ID NO: 15470 - protein, 837 aa, Artificial Sequence
  Synthetic Polypeptide
MALPVTALLLPLALLLHAARPGMRTEDLPKAVVFLEPQWYRVLEKDSVTLKCQGAYSPEDNSTQWFHNESLISSQASSYFIDAATVDDSGEYRCQTNLSTLSDPVQLEVHIGWLLLQAPRWVFKEEDPIHLRCHSWKNTALHKVTYLQNGKGRKYFHHNSDFYIPKATLKDSGSYFCRGLVGSKNVSSETVNITITQGLAVSTISSFFPPGYQGTGGGGSGGGGSGGGGSEFDIQMTQSPSSLSASVGDRVTITCKASDHINNWLAWYQQKPGQAPKLLIYGATTLETGVPSRFSGSGSGTDYTLTISSLQPEDFATYYCQQSWNTPWTFGQGTKLEIKRLEGQPKANPTVTLFPPSSEELQANKATLVCLISDFYPGAVTVAWKADGSPVKAGVETTKPSKQSNNKYAASSYLSLTPEQWKSHRSYSCQVTHEGSTVEKTVAPTECSGRADCGFTSESYQQGVLSATILYEILLGKATLYAVLVSALVLMAMVKRKDSRGRAKRSGSGATNFSLLKQAGDVEENPGPTSMDWIWRILFLVGAATGAHSFEQVQLQQPGAELVKPGASVKMSCKASGYAFSSYWINWMKQKPGQGLEWIGQIYPGDGDTNYNGKFKGRATLTADTSSSTAYMQLSSLTSEDSAVYFCARSITTVVGCAMDYWGQGTSVTVSSTRASTKGPSVFPLAPSSKSTSGGTAALGCLVKDYFPEPVTVSWNSGALTSGVHTFPAVLQSSGLYSLSSVVTVPSSSLGTQTYICNVNHKPSNTKVDKRVEPKSCIPEDTFFPSPESSCDVKLVEKSFETDTNLNFQNLSVIGFRILLLKVAGFNLLMTLRLWSS

SEQ ID NO: 15471 - protein, 663 aa, Artificial Sequence
  Synthetic Polypeptide
MALPVTALLLPLALLLHAARPGMRTEDLPKAVVFLEPQWYRVLEKDSVTLKCQGAYSPEDNSTQWFHNESLISSQASSYFIDAATVDDSGEYRCQTNLSTLSDPVQLEVHIGWLLLQAPRWVFKEEDPIHLRCHSWKNTALHKVTYLQNGKGRKYFHHNSDFYIPKATLKDSGSYFCRGLVGSKNVSSETVNITITQGLAVSTISSFFPPGYQGTGGGGSGGGGSGGGGSEFDIQMTQSPSSLSASVGDRVTITCKASDHINNWLAWYQQKPGQAPKLLIYGATTLETGVPSRFSGSGSGTDYTLTISSLQPEDFATYYCQQSWNTPWTFGQGTKLEIKRGGGGSGGGGSGGGGSQVQLQQPGAELVKPGASVKMSCKASGYAFSSYWINWMKQKPGQGLEWIGQIYPGDGDTNYNGKFKGRATLTADTSSSTAYMQLSSLTSEDSAVYFCARSITTVVGCAMDYWGQGTSVTVSSTRDGNEEMGGITQTPYKVSISGTTVILTCPQYPGSEILWQHNDKNIGGDEDDKNIGSDEDHLSLKEFSELEQSGYYVCYPRGSKPEDANFYLYLRARVCENCMEMDVMSVATIVIVDICITGGLLLLVYYWSKNRKAKAKPVTRGAGAGGRQRGQNKERPPPVPNPDYEPIRKGQRDLYSGLNQRRI

SEQ ID NO: 15472 - protein, 628 aa, Artificial Sequence
  Synthetic Polypeptide
MALPVTALLLPLALLLHAARPGMRTEDLPKAVVFLEPQWYRVLEKDSVTLKCQGAYSPEDNSTQWFHNESLISSQASSYFIDAATVDDSGEYRCQTNLSTLSDPVQLEVHIGWLLLQAPRWVFKEEDPIHLRCHSWKNTALHKVTYLQNGKGRKYFHHNSDFYIPKATLKDSGSYFCRGLVGSKNVSSETVNITITQGLAVSTISSFFPPGYQGTGGGGSGGGGSGGGGSEFDIQMTQSPSSLSASVGDRVTITCKASDHINNWLAWYQQKPGQAPKLLIYGATTLETGVPSRFSGSGSGTDYTLTISSLQPEDFATYYCQQSWNTPWTFGQGTKLEIKRGGGGSGGGGSGGGGSQVQLQQPGAELVKPGASVKMSCKASGYAFSSYWINWMKQKPGQGLEWIGQIYPGDGDTNYNGKFKGRATLTADTSSSTAYMQLSSLTSEDSAVYFCARSITTVVGCAMDYWGQGTSVTVSSTRFKIPIEELEDRVFVNCNTSITWVEGTVGTLLSDITRLDLGKRILDPRGIYRCNGTDIYKDKESTVQVHYRMCQSCVELDPATVAGIIVTDVIATLLLALGVFCFAGHETGRLSGAADTQALLRNDQVYQPLRDRDDAQYSHLGGNWARNK

SEQ ID NO: 15473 - protein, 638 aa, Artificial Sequence
  Synthetic Polypeptide
MALPVTALLLPLALLLHAARPGMRTEDLPKAVVFLEPQWYRVLEKDSVTLKCQGAYSPEDNSTQWFHNESLISSQASSYFIDAATVDDSGEYRCQTNLSTLSDPVQLEVHIGWLLLQAPRWVFKEEDPIHLRCHSWKNTALHKVTYLQNGKGRKYFHHNSDFYIPKATLKDSGSYFCRGLVGSKNVSSETVNITITQGLAVSTISSFFPPGYQGTGGGGSGGGGSGGGGSEFDIQMTQSPSSLSASVGDRVTITCKASDHINNWLAWYQQKPGQAPKLLIYGATTLETGVPSRFSGSGSGTDYTLTISSLQPEDFATYYCQQSWNTPWTFGQGTKLEIKRGGGGSGGGGSGGGGSQVQLQQPGAELVKPGASVKMSCKASGYAFSSYWINWMKQKPGQGLEWIGQIYPGDGDTNYNGKFKGRATLTADTSSSTAYMQLSSLTSEDSAVYFCARSITTVVGCAMDYWGQGTSVTVSSTRQSIKGNHLVKVYDYQEDGSVLLTCDAEAKNITWFKDGKMIGFLTEDKKKWNLGSNAKDPRGMYQCKGSQNKSKPLQVYYRMCQNCIELNAATISGFLFAEIVSIFVLAVGVYFIAGQDGVRQSRASDKQTLLPNDQLYQPLKDREDDQYSHLQGNQLRRN

SEQ ID NO: 15474 - protein, 621 aa, Artificial Sequence
  Synthetic Polypeptide
MALPVTALLLPLALLLHAARPGMRTEDLPKAVVFLEPQWYRVLEKDSVTLKCQGAYSPEDNSTQWFHNESLISSQASSYFIDAATVDDSGEYRCQTNLSTLSDPVQLEVHIGWLLLQAPRWVFKEEDPIHLRCHSWKNTALHKVTYLQNGKGRKYFHHNSDFYIPKATLKDSGSYFCRGLVGSKNVSSETVNITITQGLAVSTISSFFPPGYQGTGGGGSGGGGSGGGGSEFDIQMTQSPSSLSASVGDRVTITCKASDHINNWLAWYQQKPGQAPKLLIYGATTLETGVPSRFSGSGSGTDYTLTISSLQPEDFATYYCQQSWNTPWTFGQGTKLEIKRGGGGSGGGGSGGGGSQVQLQQPGAELVKPGASVKMSCKASGYAFSSYWINWMKQKPGQGLEWIGQIYPGDGDTNYNGKFKGRATLTADTSSSTAYMQLSSLTSEDSAVYFCARSITTVVGCAMDYWGQGTSVTVSSTRQSFGLLDPKLCYLLDGILFIYGVILTALFLRVKFSRSADAPAYQQGQNQLYNELNLGRREEYDVLDKRRGRDPEMGGKPQRRKNPQEGLYNELQKDKMAEAYSEIGMKGERRRGKGHDGLYQGLSTATKDTYDALHMQALPPR

SEQ ID NO: 15475 - protein, 854 aa, Artificial Sequence
  Synthetic Polypeptide
MALPVTALLLPLALLLHAARPGMRTEDLPKAVVFLEPQWYRVLEKDSVTLKCQGAYSPEDNSTQWFHNESLISSQASSYFIDAATVDDSGEYRCQTNLSTLSDPVQLEVHIGWLLLQAPRWVFKEEDPIHLRCHSWKNTALHKVTYLQNGKGRKYFHHNSDFYIPKATLKDSGSYFCRGLVGSKNVSSETVNITITQGLAVSTISSFFPPGYQGTGGGGSGGGGSGGGGSEFDIQMTQSPSSLSASVGDRVTITCKASDHINNWLAWYQQKPGQAPKLLIYGATTLETGVPSRFSGSGSGTDYTLTISSLQPEDFATYYCQQSWNTPWTFGQGTKLEIKRGGGGSGGGGSGGGGSQVQLQQPGAELVKPGASVKMSCKASGYAFSSYWINWMKQKPGQGLEWIGQIYPGDGDTNYNGKFKGRATLTADTSSSTAYMQLSSLTSEDSAVYFCARSITTVVGCAMDYWGQGTSVTVSSTRGSGIQNPDPAVYQLRDSKSSDKSVCLFTDFDSQTNVSQSKDSDVYITDKTVLDMRSMDFKSNSAVAWSNKSDFACANAFNNSIIPEDTFFPSPESSCDVKLVEKSFETDTNLNFQNLSVIGFRILLLKVAGFNLLMTLRLWSSRAKRSGSGVKQTLNFDLLKLAGDVESNPGPSRGHMTEYKPTVRLATRDDVPRAVRTLAAAFADYPATRHTVDPDRHIERVTELQELFLTRVGLDIGKVWVADDGAAVAVWTTPESVEAGAVFAEIGPRMAELSGSRLAAQQQMEGLLAPHRPKEPAWFLATVGVSPDHQGKGLGSAVVLPGVEAAERAGVPAFLETSAPRNLPFYERLGFTVTADVEVPEGPRTWCMTRKPGA

SEQ ID NO: 15476 - protein, 886 aa, Artificial Sequence
  Synthetic Polypeptide
MALPVTALLLPLALLLHAARPGMRTEDLPKAVVFLEPQWYRVLEKDSVTLKCQGAYSPEDNSTQWFHNESLISSQASSYFIDAATVDDSGEYRCQTNLSTLSDPVQLEVHIGWLLLQAPRWVFKEEDPIHLRCHSWKNTALHKVTYLQNGKGRKYFHHNSDFYIPKATLKDSGSYFCRGLVGSKNVSSETVNITITQGLAVSTISSFFPPGYQGTGGGGSGGGGSGGGGSEFDIQMTQSPSSLSASVGDRVTITCKASDHINNWLAWYQQKPGQAPKLLIYGATTLETGVPSRFSGSGSGTDYTLTISSLQPEDFATYYCQQSWNTPWTFGQGTKLEIKRGGGGSGGGGSGGGGSQVQLQQPGAELVKPGASVKMSCKASGYAFSSYWINWMKQKPGQGLEWIGQIYPGDGDTNYNGKFKGRATLTADTSSSTAYMQLSSLTSEDSAVYFCARSITTVVGCAMDYWGQGTSVTVSSLEDLKNVFPPEVAVFEPSEAEISHTQKATLVCLATGFYPDHVELSWWVNGKEVHSGVSTDPQPLKEQPALNDSRYCLSSRLRVSATFWQNPRNHFRCQVQFYGLSENDEWTQDRAKPVTQIVSAEAWGRADCGFTSESYQQGVLSATILYEILLGKATLYAVLVSALVLMAMVKRKDSRGRAKRSGSGATNFSLLKQAGDVEENPGPTRGHMTEYKPTVRLATRDDVPRAVRTLAAAFADYPATRHTVDPDRHIERVTELQELFLTRVGLDIGKVWVADDGAAVAVWTTPESVEAGAVFAEIGPRMAELSGSRLAAQQQMEGLLAPHRPKEPAWFLATVGVSPDHQGKGLGSAVVLPGVEAAERAGVPAFLETSAPRNLPFYERLGFTVTADVEVPEGPRTWCMTRKPGA

SEQ ID NO: 15477 - protein, 936 aa, Artificial Sequence
  Synthetic Polypeptide
MALPVTALLLPLALLLHAARPGMRTEDLPKAVVFLEPQWYRVLEKDSVTLKCQGAYSPEDNSTQWFHNESLISSQASSYFIDAATVDDSGEYRCQTNLSTLSDPVQLEVHIGWLLLQAPRWVFKEEDPIHLRCHSWKNTALHKVTYLQNGKGRKYFHHNSDFYIPKATLKDSGSYFCRGLVGSKNVSSETVNITITQGLAVSTISSFFPPGYQGTGGGGSGGGGSGGGGSEFDIQMTQSPSSLSASVGDRVTITCKASDHINNWLAWYQQKPGQAPKLLIYGATTLETGVPSRFSGSGSGTDYTLTISSLQPEDFATYYCQQSWNTPWTFGQGTKLEIKRGGGGSGGGGSGGGGSQVQLQQPGAELVKPGASVKMSCKASGYAFSSYWINWMKQKPGQGLEWIGQIYPGDGDTNYNGKFKGRATLTADTSSSTAYMQLSSLTSEDSAVYFCARSITTVVGCAMDYWGQGTSVTVSSTREQKLISEEDLGSGTPFPSLAPPIMLLVDGKQQMVVVCLVLDVAPPGLDSPIWFSAGNGSALDAFTYGPSPATDGTWTNLAHLSLPSEELASWEPLVCHTGPGAEGHSRSTQPMHLSGEASTARTCPQEPLRGTPGGALWLGVLRLLLFKLLLFDLLLTCSCLCDPAGPLPSPATTTRLRALGSHRLHPATETGGREATSSPRPQPRDRRWGDTPPGRKPGSPVRAKRSGSGVKQTLNFDLLKLAGDVESNPGPSRSRGHMTEYKPTVRLATRDDVPRAVRTLAAAFADYPATRHTVDPDRHIERVTELQELFLTRVGLDIGKVWVADDGAAVAVWTTPESVEAGAVFAEIGPRMAELSGSRLAAQQQMEGLLAPHRPKEPAWFLATVGVSPDHQGKGLGSAVVLPGVEAAERAGVPAFLETSAPRNLPFYERLGFTVTADVEVPEGPRTWCMTRKPGA

SEQ ID NO: 15478 - protein, 750 aa, Artificial Sequence
  Synthetic Polypeptide
MALPVTALLLPLALLLHAARPGMRTEDLPKAVVFLEPQWYRVLEKDSVTLKCQGAYSPEDNSTQWFHNESLISSQASSYFIDAATVDDSGEYRCQTNLSTLSDPVQLEVHIGWLLLQAPRWVFKEEDPIHLRCHSWKNTALHKVTYLQNGKGRKYFHHNSDFYIPKATLKDSGSYFCRGLVGSKNVSSETVNITITQGLAVSTISSFFPPGYQGTGGGGSGGGGSGGGGSEFDIQMTQSPSSLSASVGDRVTITCKASDHINNWLAWYQQKPGQAPKLLIYGATTLETGVPSRFSGSGSGTDYTLTISSLQPEDFATYYCQQSWNTPWTFGQGTKLEIKRLEDLKNVFPPEVAVFEPSEAEISHTQKATLVCLATGFYPDHVELSWWVNGKEVHSGVSTDPQPLKEQPALNDSRYCLSSRLRVSATFWQNPRNHFRCQVQFYGLSENDEWTQDRAKPVTQIVSAEAWGRADCGFTSESYQQGVLSATILYEILLGKATLYAVLVSALVLMAMVKRKDSRGRAKRSGSGATNFSLLKQAGDVEENPGPTRGHMTEYKPTVRLATRDDVPRAVRTLAAAFADYPATRHTVDPDRHIERVTELQELFLTRVGLDIGKVWVADDGAAVAVWTTPESVEAGAVFAEIGPRMAELSGSRLAAQQQMEGLLAPHRPKEPAWFLATVGVSPDHQGKGLGSAVVLPGVEAAERAGVPAFLETSAPRNLPFYERLGFTVTADVEVPEGPRTWCMTRKPGA

SEQ ID NO: 15479 - protein, 520 aa, Artificial Sequence
  Synthetic Polypeptide
MALPVTALLLPLALLLHAARPGMRTEDLPKAVVFLEPQWYRVLEKDSVTLKCQGAYSPEDNSTQWFHNESLISSQASSYFIDAATVDDSGEYRCQTNLSTLSDPVQLEVHIGWLLLQAPRWVFKEEDPIHLRCHSWKNTALHKVTYLQNGKGRKYFHHNSDFYIPKATLKDSGSYFCRGLVGSKNVSSETVNITITQGLAVSTISSFFPPGYQGTGGGGSGGGGSGGGGSEFDIQMTQSPSSLSASVGDRVTITCKASDHINNWLAWYQQKPGQAPKLLIYGATTLETGVPSRFSGSGSGTDYTLTISSLQPEDFATYYCQQSWNTPWTFGQGTKLEIKRLEDLKNVFPPEVAVFEPSEAEISHTQKATLVCLATGFYPDHVELSWWVNGKEVHSGVSTDPQPLKEQPALNDSRYCLSSRLRVSATFWQNPRNHFRCQVQFYGLSENDEWTQDRAKPVTQIVSAEAWGRADCGFTSESYQQGVLSATILYEILLGKATLYAVLVSALVLMAMVKRKDSRG

SEQ ID NO: 15480 - protein, 450 aa, Artificial Sequence; identical to SEQ ID NO: 14845
  Synthetic Polypeptide

SEQ ID NO: 15481 - protein, 284 aa, Artificial Sequence; identical to SEQ ID NO: 14846
  Synthetic Polypeptide

SEQ ID NO: 15482 - protein, 768 aa, Artificial Sequence
  Synthetic Polypeptide
MALPVTALLLPLALLLHAARPGMRTEDLPKAVVFLEPQWYRVLEKDSVTLKCQGAYSPEDNSTQWFHNESLISSQASSYFIDAATVDDSGEYRCQTNLSTLSDPVQLEVHIGWLLLQAPRWVFKEEDPIHLRCHSWKNTALHKVTYLQNGKGRKYFHHNSDFYIPKATLKDSGSYFCRGLVGSKNVSSETVNITITQGLAVSTISSFFPPGYQGTGGGGSGGGGSGGGGSEFDIQMTQSPSSLSASVGDRVTITCKASDHINNWLAWYQQKPGQAPKLLIYGATTLETGVPSRFSGSGSGTDYTLTISSLQPEDFATYYCQQSWNTPWTFGQGTKLEIKRLEGKPIPNPLLGLDSTGSGEDLKNVFPPEVAVFEPSEAEISHTQKATLVCLATGFYPDHVELSWWVNGKEVHSGVCTDPQPLKEQPALNDSRYCLSSRLRVSATFWQNPRNHFRCQVQFYGLSENDEWTQDRAKPVTQIVSAEAWGRADCGFTSESYQQGVLSATILYEILLGKATLYAVLVSALVLMAMVKRKDSRGRAKRSGSGATNFSLLKQAGDVEENPGPTRGHMTEYKPTVRLATRDDVPRAVRTLAAAFADYPATRHTVDPDRHIERVTELQELFLTRVGLDIGKVWVADDGAAVAVWTTPESVEAGAVFAEIGPRMAELSGSRLAAQQQMEGLLAPHRPKEPAWFLATVGVSPDHQGKGLGSAVVLPGVEAAERAGVPAFLETSAPRNLPFYERLGFTVTADVEVPEGPRTWCMTRKPGA

SEQ ID NO: 15483 - protein, 538 aa, Artificial Sequence
  Synthetic Polypeptide
MALPVTALLLPLALLLHAARPGMRTEDLPKAVVFLEPQWYRVLEKDSVTLKCQGAYSPEDNSTQWFHNESLISSQASSYFIDAATVDDSGEYRCQTNLSTLSDPVQLEVHIGWLLLQAPRWVFKEEDPIHLRCHSWKNTALHKVTYLQNGKGRKYFHHNSDFYIPKATLKDSGSYFCRGLVGSKNVSSETVNITITQGLAVSTISSFFPPGYQGTGGGGSGGGGSGGGGSEFDIQMTQSPSSLSASVGDRVTITCKASDHINNWLAWYQQKPGQAPKLLIYGATTLETGVPSRFSGSGSGTDYTLTISSLQPEDFATYYCQQSWNTPWTFGQGTKLEIKRLEGKPIPNPLLGLDSTGSGEDLKNVFPPEVAVFEPSEAEISHTQKATLVCLATGFYPDHVELSWWVNGKEVHSGVCTDPQPLKEQPALNDSRYCLSSRLRVSATFWQNPRNHFRCQVQFYGLSENDEWTQDRAKPVTQIVSAEAWGRADCGFTSESYQQGVLSATILYEILLGKATLYAVLVSALVLMAMVKRKDSRG

SEQ ID NO: 15484 - protein, 462 aa, Artificial Sequence; identical to SEQ ID NO: 14849
  Synthetic Polypeptide

SEQ ID NO: 15485 - protein, 296 aa, Artificial Sequence; identical to SEQ ID NO: 14850
  Synthetic Polypeptide

SEQ ID NO: 15486 - protein, 854 aa, Artificial Sequence
  Synthetic Polypeptide
MALPVTALLLPLALLLHAARPGMRTEDLPKAVVFLEPQWYRVLEKDSVTLKCQGAYSPEDNSTQWFHNESLISSQASSYFIDAATVDDSGEYRCQTNLSTLSDPVQLEVHIGWLLLQAPRWVFKEEDPIHLRCHSWKNTALHKVTYLQNGKGRKYFHHNSDFYIPKATLKDSGSYFCRGLVGSKNVSSETVNITITQGLAVSTISSFFPPGYQGTGGGGSGGGGSGGGGSEFDIQMTQSPSSLSASVGDRVTITCKASDHINNWLAWYQQKPGQAPKLLIYGATTLETGVPSRFSGSGSGTDYTLTISSLQPEDFATYYCQQSWNTPWTFGQGTKLEIKRGGGGSGGGGSGGGGSQVQLQQPGAELVKPGASVKMSCKASGYAFSSYWINWMKQKPGQGLEWIGQIYPGDGDTNYNGKFKGRATLTADTSSSTAYMQLSSLTSEDSAVYFCARSITTVVGCAMDYWGQGTSVTVSSTRGSGIQNPDPAVYQLRDSKSSDKSVCLFTDFDSQTNVSQSKDSDVYITDKTVLDMRSMDFKSNSAVAWSNKSDFACANAFNNSIIPEDTFFPSSDVPCDVKLVEKSFETDTNLNFQNLSVIGFRILLLKVAGFNLLMTLRLWSSRAKRSGSGVKQTLNFDLLKLAGDVESNPGPSRGHMTEYKPTVRLATRDDVPRAVRTLAAAFADYPATRHTVDPDRHIERVTELQELFLTRVGLDIGKVWVADDGAAVAVWTTPESVEAGAVFAEIGPRMAELSGSRLAAQQQMEGLLAPHRPKEPAWFLATVGVSPDHQGKGLGSAVVLPGVEAAERAGVPAFLETSAPRNLPFYERLGFTVTADVEVPEGPRTWCMTRKPGA

SEQ ID NO: 15487 - protein, 886 aa, Artificial Sequence
  Synthetic Polypeptide
MALPVTALLLPLALLLHAARPGMRTEDLPKAVVFLEPQWYRVLEKDSVTLKCQGAYSPEDNSTQWFHNESLISSQASSYFIDAATVDDSGEYRCQTNLSTLSDPVQLEVHIGWLLLQAPRWVFKEEDPIHLRCHSWKNTALHKVTYLQNGKGRKYFHHNSDFYIPKATLKDSGSYFCRGLVGSKNVSSETVNITITQGLAVSTISSFFPPGYQGTGGGGSGGGGSGGGGSEFDIQMTQSPSSLSASVGDRVTITCKASDHINNWLAWYQQKPGQAPKLLIYGATTLETGVPSRFSGSGSGTDYTLTISSLQPEDFATYYCQQSWNTPWTFGQGTKLEIKRGGGGSGGGGSGGGGSQVQLQQPGAELVKPGASVKMSCKASGYAFSSYWINWMKQKPGQGLEWIGQIYPGDGDTNYNGKFKGRATLTADTSSSTAYMQLSSLTSEDSAVYFCARSITTVVGCAMDYWGQGTSVTVSSLEDLKNVFPPEVAVFEPSKAEIAHTQKATLVCLATGFYPDHVELSWWVNGKEVHSGVSTDPQPLKEQPALNDSRYCLSSRLRVSATFWQNPRNHFRCQVQFYGLSENDEWTQDRAKPVTQIVSAEAWGRADCGITSASYHQGVLSATILYEILLGKATLYAVLVSALVLMAMVKRKDSRGRAKRSGSGATNFSLLKQAGDVEENPGPTRGHMTEYKPTVRLATRDDVPRAVRTLAAAFADYPATRHTVDPDRHIERVTELQELFLTRVGLDIGKVWVADDGAAVAVWTTPESVEAGAVFAEIGPRMAELSGSRLAAQQQMEGLLAPHRPKEPAWFLATVGVSPDHQGKGLGSAVVLPGVEAAERAGVPAFLETSAPRNLPFYERLGFTVTADVEVPEGPRTWCMTRKPGA

SEQ ID NO: 15488 - protein, 1204 aa, Artificial Sequence
  Synthetic Polypeptide
MALPVTALLLPLALLLHAARPGMRTEDLPKAVVFLEPQWYRVLEKDSVTLKCQGAYSPEDNSTQWFHNESLISSQASSYFIDAATVDDSGEYRCQTNLSTLSDPVQLEVHIGWLLLQAPRWVFKEEDPIHLRCHSWKNTALHKVTYLQNGKGRKYFHHNSDFYIPKATLKDSGSYFCRGLVGSKNVSSETVNITITQGLAVSTISSFFPPGYQGTGGGGSGGGGSGGGGSEFDIQMTQSPSSLSASVGDRVTITCKASDHINNWLAWYQQKPGQAPKLLIYGATTLETGVPSRFSGSGSGTDYTLTISSLQPEDFATYYCQQSWNTPWTFGQGTKLEIKRLEIQNPDPAVYQLRDSKSSDKSVCLFTDFDSQTNVSQSKDSDVYITDKCVLDMRSMDFKSNSAVAWSNKSDFACANAFNNSIIPEDTFFPSSDVPCDVKLVEKSFETDTNLNFQNLSVIGFRILLLKVAGFNLLMTLRLWSSRAKRSGSGVKQTLNFDLLKLAGDVESNPGPTSMDWIWRILFLVGAATGAHSGPQVQLQESGGGLAQAGGSLRLSCAASGRTFSMGWFRQAPGKEREFVAAITYSGGSPYYASSVRGRFTISRDNAKNTVYLQMNSLKPEDTAVYYCAANPTYGSDWNAENWGQGTQVTVSSGSGGGGSGGGGSGGGGSFEQVQLQQPGAELVKPGASVKMSCKASGYAFSSYWINWMKQKPGQGLEWIGQIYPGDGDTNYNGKFKGRATLTADTSSSTAYMQLSSLTSEDSAVYFCARSITTVVGCAMDYWGQGTSVTVSSTREDLKNVFPPEVAVFEPSKAEIAHTQKATLVCLATGFYPDHVELSWWVNGKEVHSGVCTDPQPLKEQPALNDSRYCLSSRLRVSATFWQNPRNHFRCQVQFYGLSENDEWTQDRAKPVTQIVSAEAWGRADCGITSASYHQGVLSATILYEILLGKATLYAVLVSALVLMAMVKRKDSRGRAKRSGSGATNFSLLKQAGDVEENPGPSRGHMTEYKPTVRLATRDDVPRAVRTLAAAFADYPATRHTVDPDRHIERVTELQELFLTRVGLDIGKVWVADDGAAVAVWTTPESVEAGAVFAEIGPRMAELSGSRLAAQQQMEGLLAPHRPKEPAWFLATVGVSPDHQGKGLGSAVVLPGVEAAERAGVPAFLETSAPRNLPFYERLGFTVTADVEVPEGPRTWCMTRKPGA

SEQ ID NO: 15489 - protein, 1203 aa, Artificial Sequence
  Synthetic Polypeptide
MALPVTALLLPLALLLHAARPGMRTEDLPKAVVFLEPQWYRVLEKDSVTLKCQGAYSPEDNSTQWFHNESLISSQASSYFIDAATVDDSGEYRCQTNLSTLSDPVQLEVHIGWLLLQAPRWVFKEEDPIHLRCHSWKNTALHKVTYLQNGKGRKYFHHNSDFYIPKATLKDSGSYFCRGLVGSKNVSSETVNITITQGLAVSTISSFFPPGYQGTGGGGSGGGGSGGGGSEFDIQMTQSPSSLSASVGDRVTITCKASDHINNWLAWYQQKPGQAPKLLIYGATTLETGVPSRFSGSGSGTDYTLTISSLQPEDFATYYCQQSWNTPWTFGQGTKLEIKRLEDLKNVFPPEVAVFEPSKAEIAHTQKATLVCLATGFYPDHVELSWWVNGKEVHSGVCTDPQPLKEQPALNDSRYCLSSRLRVSATFWQNPRNHFRCQVQFYGLSENDEWTQDRAKPVTQIVSAEAWGRADCGITSASYHQGVLSATILYEILLGKATLYAVLVSALVLMAMVKRKDSRGRAKRSGSGATNFSLLKQAGDVEENPGPTSMDWIWRILFLVGAATGAHSGPQVQLQESGGGLAQAGGSLRLSCAASGRTFSMGWFRQAPGKEREFVAAITYSGGSPYYASSVRGRFTISRDNAKNTVYLQMNSLKPEDTAVYYCAANPTYGSDWNAENWGQGTQVTVSSGSGGGGSGGGGSGGGGSFEQVQLQQPGAELVKPGASVKMSCKASGYAFSSYWINWMKQKPGQGLEWIGQIYPGDGDTNYNGKFKGRATLTADTSSSTAYMQLSSLTSEDSAVYFCARSITTVVGCAMDYWGQGTSVTVSSTRIQNPDPAVYQLRDSKSSDKSVCLFTDFDSQTNVSQSKDSDVYITDKCVLDMRSMDFKSNSAVAWSNKSDFACANAFNNSIIPEDTFFPSSDVPCDVKLVEKSFETDTNLNFQNLSVIGFRILLLKVAGFNLLMTLRLWSSRAKRSGSGVKQTLNFDLLKLAGDVESNPGPSRGHMTEYKPTVRLATRDDVPRAVRTLAAAFADYPATRHTVDPDRHIERVTELQELFLTRVGLDIGKVWVADDGAAVAVWTTPESVEAGAVFAEIGPRMAELSGSRLAAQQQMEGLLAPHRPKEPAWFLATVGVSPDHQGKGLGSAVVLPGVEAAERAGVPAFLETSAPRNLPFYERLGFTVTADVEVPEGPRTWCMTRKPGA

SEQ ID NO: 15490 - protein, 1203 aa, Artificial Sequence
  Synthetic Polypeptide
MALPVTALLLPLALLLHAARPGMRTEDLPKAVVFLEPQWYRVLEKDSVTLKCQGAYSPEDNSTQWFHNESLISSQASSYFIDAATVDDSGEYRCQTNLSTLSDPVQLEVHIGWLLLQAPRWVFKEEDPIHLRCHSWKNTALHKVTYLQNGKGRKYFHHNSDFYIPKATLKDSGSYFCRGLVGSKNVSSETVNITITQGLAVSTISSFFPPGYQGTGGGGSGGGGSGGGGSEFDIQMTQSPSSLSASVGDRVTITCKASDHINNWLAWYQQKPGQAPKLLIYGATTLETGVPSRFSGSGSGTDYTLTISSLQPEDFATYYCQQSWNTPWTFGQGTKLEIKRLEDLKNVFPPEVAVFEPSEAEISHTQKATLVCLATGFYPDHVELSWWVNGKEVHSGVCTDPQPLKEQPALNDSRYCLSSRLRVSATFWQNPRNHFRCQVQFYGLSENDEWTQDRAKPVTQIVSAEAWGRADCGFTSESYQQGVLSATILYEILLGKATLYAVLVSALVLMAMVKRKDSRGRAKRSGSGATNFSLLKQAGDVEENPGPTSMDWIWRILFLVGAATGAHSGPQVQLQESGGGLAQAGGSLRLSCAASGRTFSMGWFRQAPGKEREFVAAITYSGGSPYYASSVRGRFTISRDNAKNTVYLQMNSLKPEDTAVYYCAANPTYGSDWNAENWGQGTQVTVSSGSGGGGSGGGGSGGGGSFEQVQLQQPGAELVKPGASVKMSCKASGYAFSSYWINWMKQKPGQGLEWIGQIYPGDGDTNYNGKFKGRATLTADTSSSTAYMQLSSLTSEDSAVYFCARSITTVVGCAMDYWGQGTSVTVSSTRIQNPDPAVYQLRDSKSSDKSVCLFTDFDSQTNVSQSKDSDVYITDKCVLDMRSMDFKSNSAVAWSNKSDFACANAFNNSIIPEDTFFPSPESSCDVKLVEKSFETDTNLNFQNLSVIGFRILLLKVAGFNLLMTLRLWSSRAKRSGSGVKQTLNFDLLKLAGDVESNPGPSRGHMTEYKPTVRLATRDDVPRAVRTLAAAFADYPATRHTVDPDRHIERVTELQELFLTRVGLDIGKVWVADDGAAVAVWTTPESVEAGAVFAEIGPRMAELSGSRLAAQQQMEGLLAPHRPKEPAWFLATVGVSPDHQGKGLGSAVVLPGVEAAERAGVPAFLETSAPRNLPFYERLGFTVTADVEVPEGPRTWCMTRKPGA

SEQ ID NO: 15491 - protein, 970 aa, Artificial Sequence
  Synthetic Polypeptide
MALPVTALLLPLALLLHAARPGMRTEDLPKAVVFLEPQWYRVLEKDSVTLKCQGAYSPEDNSTQWFHNESLISSQASSYFIDAATVDDSGEYRCQTNLSTLSDPVQLEVHIGWLLLQAPRWVFKEEDPIHLRCHSWKNTALHKVTYLQNGKGRKYFHHNSDFYIPKATLKDSGSYFCRGLVGSKNVSSETVNITITQGLAVSTISSFFPPGYQGTGGGGSGGGGSGGGGSEFDIQMTQSPSSLSASVGDRVTITCKASDHINNWLAWYQQKPGQAPKLLIYGATTLETGVPSRFSGSGSGTDYTLTISSLQPEDFATYYCQQSWNTPWTFGQGTKLEIKRLEDLKNVFPPEVAVFEPSEAEISHTQKATLVCLATGFYPDHVELSWWVNGKEVHSGVCTDPQPLKEQPALNDSRYCLSSRLRVSATFWQNPRNHFRCQVQFYGLSENDEWTQDRAKPVTQIVSAEAWGRADCGFTSESYQQGVLSATILYEILLGKATLYAVLVSALVLMAMVKRKDSRGRAKRSGSGATNFSLLKQAGDVEENPGPTSMDWIWRILFLVGAATGAHSGPQVQLQESGGGLAQAGGSLRLSCAASGRTFSMGWFRQAPGKEREFVAAITYSGGSPYYASSVRGRFTISRDNAKNTVYLQMNSLKPEDTAVYYCAANPTYGSDWNAENWGQGTQVTVSSGSGGGGSGGGGSGGGGSFEQVQLQQPGAELVKPGASVKMSCKASGYAFSSYWINWMKQKPGQGLEWIGQIYPGDGDTNYNGKFKGRATLTADTSSSTAYMQLSSLTSEDSAVYFCARSITTVVGCAMDYWGQGTSVTVSSTRIQNPDPAVYQLRDSKSSDKSVCLFTDFDSQTNVSQSKDSDVYITDKCVLDMRSMDFKSNSAVAWSNKSDFACANAFNNSIIPEDTFFPSPESSCDVKLVEKSFETDTNLNFQNLSVIGFRILLLKVAGFNLLMTLRLWSS

SEQ ID NO: 15492 - protein, 1195 aa, Artificial Sequence
  Synthetic Polypeptide
MALPVTALLLPLALLLHAARPGMRTEDLPKAVVFLEPQWYRVLEKDSVTLKCQGAYSPEDNSTQWFHNESLISSQASSYFIDAATVDDSGEYRCQTNLSTLSDPVQLEVHIGWLLLQAPRWVFKEEDPIHLRCHSWKNTALHKVTYLQNGKGRKYFHHNSDFYIPKATLKDSGSYFCRGLVGSKNVSSETVNITITQGLAVSTISSFFPPGYQGTGGGGSGGGGSGGGGSEFDIQMTQSPSSLSASVGDRVTITCKASDHINNWLAWYQQKPGQAPKLLIYGATTLETGVPSRFSGSGSGTDYTLTISSLQPEDFATYYCQQSWNTPWTFGQGTKLEIKRLEDLKNVFPPEVAVFEPSEAEISHTQKATLVCLATGFYPDHVELSWWVNGKEVHSGVCTDPQPLKEQPALNDSRYCLSSRLRVSATFWQNPRNHFRCQVQFYGLSENDEWTQDRAKPVTQIVSAEAWGRADCGFTSESYQQGVLSATILYEILLGKATLYAVLVSALVLMAMVKRKDSRGRAKRSGSGATNFSLLKQAGDVEENPGPTSMDWIWRILFLVGAATGAHSGPQVQLQESGGGLAQAGGSLRLSCAASGRTFSMGWFRQAPGKEREFVAAITYSGGSPYYASSVRGRFTISRDNAKNTVYLQMNSLKPEDTAVYYCAANPTYGSDWNAENWGQGTQVTVSSGSGGGGSGGGGSGGGGSFEQVQLQQPGAELVKPGASVKMSCKASGYAFSSYWINWMKQKPGQGLEWIGQIYPGDGDTNYNGKFKGRATLTADTSSSTAYMQLSSLTSEDSAVYFCARSITTVVGCAMDYWGQGTSVTVSSTRIQNPDPAVYQLRDSKSSDKSVCLFTDFDSQTNVSQSKDSDVYITDKCVLDMRSMDFKSNSAVAWSNKSDFACANAFNNSIIPEDTFFPSPESSCDVKLVEKSFETDTNLNFQNLSVIGFRILLLKVAGFNLLMTLRLWSSRAKRSGSGVKQTLNFDLLKLAGDVESNPGPSRGGIHTMATYEVLCEVARKLGTDDREVVLFLLNVFIPQPTLAQLIGALRALKEEGRLTFPLLAECLFRAGRRDLLRDLLHLDPRFLERHLAGTMSYFSPYQLTVLHVDGELCARDIRSLIFLSKDTIGSRSTPQTFLHWVYCMENLDLLGPTDVDALMSMLRSLSRVDLQRQVQTLMGLHLSGPSHSQHYRHTP

SEQ ID NO: 15493 - protein, 974 aa, Artificial Sequence
  Synthetic Polypeptide
MALPVTALLLPLALLLHAARPGMRTEDLPKAVVFLEPQWYRVLEKDSVTLKCQGAYSPEDNSTQWFHNESLISSQASSYFIDAATVDDSGEYRCQTNLSTLSDPVQLEVHIGWLLLQAPRWVFKEEDPIHLRCHSWKNTALHKVTYLQNGKGRKYFHHNSDFYIPKATLKDSGSYFCRGLVGSKNVSSETVNITITQGLAVSTISSFFPPGYQGTGGGGSGGGGSGGGGSEFDIQMTQSPSSLSASVGDRVTITCKASDHINNWLAWYQQKPGQAPKLLIYGATTLETGVPSRFSGSGSGTDYTLTISSLQPEDFATYYCQQSWNTPWTFGQGTKLEIKRLEIQNPDPAVYQLRDSKSSDKSVCLFTDFDSQTNVSQSKDSDVYITDKCVLDMRSMDFKSNSAVAWSNKSDFACANAFNNSIIPEDTFFPSPESSCDVKLVEKSFETDTNLNFQNLSVIGFRILLLKVAGFNLLMTLRLWSSRAKRSGSGVKQTLNFDLLKLAGDVESNPGPTSMDWIWRILFLVGAATGAHSGPQVQLQESGGGLAQAGGSLRLSCAASGRTFSMGWFRQAPGKEREFVAAITYSGGSPYYASSVRGRFTISRDNAKNTVYLQMNSLKPEDTAVYYCAANPTYGSDWNAENWGQGTQVTVSSGSGGGGSGGGGSGGGGSFEQVQLQQPGAELVKPGASVKMSCKASGYAFSSYWINWMKQKPGQGLEWIGQIYPGDGDTNYNGKFKGRATLTADTSSSTAYMQLSSLTSEDSAVYFCARSITTVVGCAMDYWGQGTSVTVSSTREDLKNVFPPEVAVFEPSEAEISHTQKATLVCLATGFYPDHVELSWWVNGKEVHSGVCTDPQPLKEQPALNDSRYCLSSRLRVSATFWQNPRNHFRCQVQFYGLSENDEWTQDRAKPVTQIVSAEAWGRADCGFTSESYQQGVLSATILYEILLGKATLYAVLVSALVLMAMVKRKDSRG

SEQ ID NO: 15494 - protein, 1196 aa, Artificial Sequence
  Synthetic Polypeptide
MALPVTALLLPLALLLHAARPGMRTEDLPKAVVFLEPQWYRVLEKDSVTLKCQGAYSPEDNSTQWFHNESLISSQASSYFIDAATVDDSGEYRCQTNLSTLSDPVQLEVHIGWLLLQAPRWVFKEEDPIHLRCHSWKNTALHKVTYLQNGKGRKYFHHNSDFYIPKATLKDSGSYFCRGLVGSKNVSSETVNITITQGLAVSTISSFFPPGYQGTGGGGSGGGGSGGGGSEFDIQMTQSPSSLSASVGDRVTITCKASDHINNWLAWYQQKPGQAPKLLIYGATTLETGVPSRFSGSGSGTDYTLTISSLQPEDFATYYCQQSWNTPWTFGQGTKLEIKRLEIQNPDPAVYQLRDSKSSDKSVCLFTDFDSQTNVSQSKDSDVYITDKCVLDMRSMDFKSNSAVAWSNKSDFACANAFNNSIIPEDTFFPSPESSCDVKLVEKSFETDTNLNFQNLSVIGFRILLLKVAGFNLLMTLRLWSSRAKRSGSGVKQTLNFDLLKLAGDVESNPGPTSMDWIWRILFLVGAATGAHSGPQVQLQESGGGLAQAGGSLRLSCAASGRTFSMGWFRQAPGKEREFVAAITYSGGSPYYASSVRGRFTISRDNAKNTVYLQMNSLKPEDTAVYYCAANPTYGSDWNAENWGQGTQVTVSSGSGGGGSGGGGSGGGGSFEQVQLQQPGAELVKPGASVKMSCKASGYAFSSYWINWMKQKPGQGLEWIGQIYPGDGDTNYNGKFKGRATLTADTSSSTAYMQLSSLTSEDSAVYFCARSITTVVGCAMDYWGQGTSVTVSSTREDLKNVFPPEVAVFEPSEAEISHTQKATLVCLATGFYPDHVELSWWVNGKEVHSGVCTDPQPLKEQPALNDSRYCLSSRLRVSATFWQNPRNHFRCQVQFYGLSENDEWTQDRAKPVTQIVSAEAWGRADCGFTSESYQQGVLSATILYEILLGKATLYAVLVSALVLMAMVKRKDSRGRAKRSGSGATNFSLLKQAGDVEENPGPSRGGIHTMATYEVLCEVARKLGTDDREVVLFLLNVFIPQPTLAQLIGALRALKEEGRLTFPLLAECLFRAGRRDLLRDLLHLDPRFLERHLAGTMSYFSPYQLTVLHVDGELCARDIRSLIFLSKDTIGSRSTPQTFLHWVYCMENLDLLGPTDVDALMSMLRSLSRVDLQRQVQTLMGLHLSGPSHSQHYRHTP

SEQ ID NO: 15495 - protein, 1203 aa, Artificial Sequence
  Synthetic Polypeptide
MALPVTALLLPLALLLHAARPGMRTEDLPKAVVFLEPQWYRVLEKDSVTLKCQGAYSPEDNSTQWFHNESLISSQASSYFIDAATVDDSGEYRCQTNLSTLSDPVQLEVHIGWLLLQAPRWVFKEEDPIHLRCHSWKNTALHKVTYLQNGKGRKYFHHNSDFYIPKATLKDSGSYFCRGLVGSKNVSSETVNITITQGLAVSTISSFFPPGYQGTGGGGSGGGGSGGGGSEFDIQMTQSPSSLSASVGDRVTITCKASDHINNWLAWYQQKPGQAPKLLIYGATTLETGVPSRFSGSGSGTDYTLTISSLQPEDFATYYCQQSWNTPWTFGQGTKLEIKRLEDLKNVFPPEVAVFEPSEAEISHTQKATLVCLATGFYPDHVELSWWVNGKEVHSGVSTDPQPLKEQPALNDSRYCLSSRLRVSATFWQNPRNHFRCQVQFYGLSENDEWTQDRAKPVTQIVSAEAWGRADCGFTSESYQQGVLSATILYEILLGKATLYAVLVSALVLMAMVKRKDSRGRAKRSGSGATNFSLLKQAGDVEENPGPTSMDWIWRILFLVGAATGAHSGPQVQLQESGGGLAQAGGSLRLSCAASGRTFSMGWFRQAPGKEREFVAAITYSGGSPYYASSVRGRFTISRDNAKNTVYLQMNSLKPEDTAVYYCAANPTYGSDWNAENWGQGTQVTVSSGSGGGGSGGGGSGGGGSFEQVQLQQPGAELVKPGASVKMSCKASGYAFSSYWINWMKQKPGQGLEWIGQIYPGDGDTNYNGKFKGRATLTADTSSSTAYMQLSSLTSEDSAVYFCARSITTVVGCAMDYWGQGTSVTVSSTRIQNPDPAVYQLRDSKSSDKSVCLFTDFDSQTNVSQSKDSDVYITDKTVLDMRSMDFKSNSAVAWSNKSDFACANAFNNSIIPEDTFFPSPESSCDVKLVEKSFETDTNLNFQNLSVIGFRILLLKVAGFNLLMTLRLWSSRAKRSGSGVKQTLNFDLLKLAGDVESNPGPSRGHMTEYKPTVRLATRDDVPRAVRTLAAAFADYPATRHTVDPDRHIERVTELQELFLTRVGLDIGKVWVADDGAAVAVWTTPESVEAGAVFAEIGPRMAELSGSRLAAQQQMEGLLAPHRPKEPAWFLATVGVSPDHQGKGLGSAVVLPGVEAAERAGVPAFLETSAPRNLPFYERLGFTVTADVEVPEGPRTWCMTRKPGA

SEQ ID NO: 15496 - protein, 1285 aa, Artificial Sequence
  Synthetic Polypeptide
MALPVTALLLPLALLLHAARPGMRTEDLPKAVVFLEPQWYRVLEKDSVTLKCQGAYSPEDNSTQWFHNESLISSQASSYFIDAATVDDSGEYRCQTNLSTLSDPVQLEVHIGWLLLQAPRWVFKEEDPIHLRCHSWKNTALHKVTYLQNGKGRKYFHHNSDFYIPKATLKDSGSYFCRGLVGSKNVSSETVNITITQGLAVSTISSFFPPGYQGTGGGGSGGGGSGGGGSEFDIQMTQSPSSLSASVGDRVTITCKASDHINNWLAWYQQKPGQAPKLLIYGATTLETGVPSRFSGSGSGTDYTLTISSLQPEDFATYYCQQSWNTPWTFGQGTKLEIKRLEDLKNVFPPEVAVFEPSEAEISHTQKATLVCLATGFYPDHVELSWWVNGKEVHSGVSTDPQPLKEQPALNDSRYCLSSRLRVSATFWQNPRNHFRCQVQFYGLSENDEWTQDRAKPVTQIVSAEAWGRADCGFTSESYQQGVLSATILYEILLGKATLYAVLVSALVLMAMVKRKDSRGRAKRSGSGATNFSLLKQAGDVEENPGPTSMDWIWRILFLVGAATGAHSGPQVQLQESGGGLAQAGGSLRLSCAASGRTFSMGWFRQAPGKEREFVAAITYSGGSPYYASSVRGRFTISRDNAKNTVYLQMNSLKPEDTAVYYCAANPTYGSDWNAENWGQGTQVTVSSGSGGGGSGGGGSGGGGSFEQVQLQQPGAELVKPGASVKMSCKASGYAFSSYWINWMKQKPGQGLEWIGQIYPGDGDTNYNGKFKGRATLTADTSSSTAYMQLSSLTSEDSAVYFCARSITTVVGCAMDYWGQGTSVTVSSTREQKLISEEDGSGTPFPSLAPPIMLLVDGKQQMVVVCLVLDVAPPGLDSPIWFSAGNGSALDAFTYGPSPATDGTWTNLAHLSLPSEELASWEPLVCHTGPGAEGHSRSTQPMHLSGEASTARTCPQEPLRGTPGGALWLGVLRLLLFKLLLFDLLLTCSCLCDPAGPLPSPATTTRLRALGSHRLHPATETGGREATSSPRPQPRDRRWGDTPPGRKPGSPVRAKRSGSGVKQTLNFDLLKLAGDVESNPGPSRGHMTEYKPTVRLATRDDVPRAVRTLAAAFADYPATRHTVDPDRHIERVTELQELFLTRVGLDIGKVWVADDGAAVAVWTTPESVEAGAVFAEIGPRMAELSGSRLAAQQQMEGLLAPHRPKEPAWFLATVGVSPDHQGKGLGSAVVLPGVEAAERAGVPAFLETSAPRNLPFYERLGFTVTADVEVPEGPRTWCMTRKPGA

SEQ ID NO: 15497 - protein, 1240 aa, Artificial Sequence
  Synthetic Polypeptide
MALPVTALLLPLALLLHAARPGMRTEDLPKAVVFLEPQWYRVLEKDSVTLKCQGAYSPEDNSTQWFHNESLISSQASSYFIDAATVDDSGEYRCQTNLSTLSDPVQLEVHIGWLLLQAPRWVFKEEDPIHLRCHSWKNTALHKVTYLQNGKGRKYFHHNSDFYIPKATLKDSGSYFCRGLVGSKNVSSETVNITITQGLAVSTISSFFPPGYQGTGGGGSGGGGSGGGGSEFDIQMTQSPSSLSASVGDRVTITCKASDHINNWLAWYQQKPGQAPKLLIYGATTLETGVPSRFSGSGSGTDYTLTISSLQPEDFATYYCQQSWNTPWTFGQGTKLEIKRLEGKPIPNPLLGLDSTGSGDKQLDADVSPKPTIFLPSIAETKLQKAGTYLCLLEKFFPDVIKIHWQEKKSNTILGSQEGNTMKTNDTYMKFSWLTVPEKSLDKEHRCIVRHENNKNGVDQEIIFPPIKTDVITMDPKDNCSKDANDTLLLQLTNTSAYYMYLLLLLKSVVYFAIITCCLLRRTAFCCNGEKSRAKRSGSGATNFSLLKQAGDVEENPGPTSMDWIWRILFLVGAATGAHSGPQVQLQESGGGLAQAGGSLRLSCAASGRTFSMGWFRQAPGKEREFVAAITYSGGSPYYASSVRGRFTISRDNAKNTVYLQMNSLKPEDTAVYYCAANPTYGSDWNAENWGQGTQVTVSSGSGGGGSGGGGSGGGGSFEQVQLQQPGAELVKPGASVKMSCKASGYAFSSYWINWMKQKPGQGLEWIGQIYPGDGDTNYNGKFKGRATLTADTSSSTAYMQLSSLTSEDSAVYFCARSITTVVGCAMDYWGQGTSVTVSSTREQKLISEEDGSGSQPHTKPSVFVMKNGTNVACLVKEFYPKDIRINLVSSKKITEFDPAIVISPSGKYNAVKLGKYEDSNSVTCSVQHDNKTVHSTDFEVKTDSTDHVKPKETENTKQPSKSCHKPKAIVHTEKVNMMSLTVLGLRMLFAKTVAVNFLLTAKLFFLRAKRSGSGVKQTLNFDLLKLAGDVESNPGPSRGHMTEYKPTVRLATRDDVPRAVRTLAAAFADYPATRHTVDPDRHIERVTELQELFLTRVGLDIGKVWVADDGAAVAVWTTPESVEAGAVFAEIGPRMAELSGSRLAAQQQMEGLLAPHRPKEPAWFLATVGVSPDHQGKGLGSAVVLPGVEAAERAGVPAFLETSAPRNLPFYERLGFTVTADVEVPEGPRTWCMTRKPGA

SEQ ID NO: 15498 - protein, 978 aa, Artificial Sequence
  Synthetic Polypeptide
MALPVTALLLPLALLLHAARPGMRTEDLPKAVVFLEPQWYRVLEKDSVTLKCQGAYSPEDNSTQWFHNESLISSQASSYFIDAATVDDSGEYRCQTNLSTLSDPVQLEVHIGWLLLQAPRWVFKEEDPIHLRCHSWKNTALHKVTYLQNGKGRKYFHHNSDFYIPKATLKDSGSYFCRGLVGSKNVSSETVNITITQGLAVSTISSFFPPGYQGTGGGGSGGGGSGGGGSEFDIQMTQSPSSLSASVGDRVTITCKASDHINNWLAWYQQKPGQAPKLLIYGATTLETGVPSRFSGSGSGTDYTLTISSLQPEDFATYYCQQSWNTPWTFGQGTKLEIKRLESQPHTKPSVFVMKNGTNVACLVKEFYPKDIRINLVSSKKITEFDPAIVISPSGKYNAVKLGKYEDSNSVTCSVQHDNKTVHSTDFEVKTDSTDHVKPKETENTKQPSKSCHKPKAIVHTEKVNMMSLTVLGLRMLFAKTVAVNFLLTAKLFFLRAKRSGSGATNFSLLKQAGDVEENPGPTSMDWIWRILFLVGAATGAHSGPQVQLQESGGGLAQAGGSLRLSCAASGRTFSMGWFRQAPGKEREFVAAITYSGGSPYYASSVRGRFTISRDNAKNTVYLQMNSLKPEDTAVYYCAANPTYGSDWNAENWGQGTQVTVSSGSGGGGSGGGGSGGGGSFEQVQLQQPGAELVKPGASVKMSCKASGYAFSSYWINWMKQKPGQGLEWIGQIYPGDGDTNYNGKFKGRATLTADTSSSTAYMQLSSLTSEDSAVYFCARSITTVVGCAMDYWGQGTSVTVSSTRDKQLDADVSPKPTIFLPSIAETKLQKAGTYLCLLEKFFPDVIKIHWQEKKSNTILGSQEGNTMKTNDTYMKFSWLTVPEKSLDKEHRCIVRHENNKNGVDQEIIFPPIKTDVITMDPKDNCSKDANDTLLLQLTNTSAYYMYLLLLLKSVVYFAIITCCLLRRTAFCCNGEKS

SEQ ID NO: 15499 - protein, 1380 aa, Artificial Sequence
  Synthetic Polypeptide
MALPVTALLLPLALLLHAARPGMRTEDLPKAVVFLEPQWYRVLEKDSVTLKCQGAYSPEDNSTQWFHNESLISSQASSYFIDAATVDDSGEYRCQTNLSTLSDPVQLEVHIGWLLLQAPRWVFKEEDPIHLRCHSWKNTALHKVTYLQNGKGRKYFHHNSDFYIPKATLKDSGSYFCRGLVGSKNVSSETVNITITQGLAVSTISSFFPPGYQGTGGGGSGGGGSGGGGSEFDIQMTQSPSSLSASVGDRVTITCKASDHINNWLAWYQQKPGQAPKLLIYGATTLETGVPSRFSGSGSGTDYTLTISSLQPEDFATYYCQQSWNTPWTFGQGTKLEIKRGQPKANPTVTLFPPSSEELQANKATLVCLISDFYPGAVTVAWKADGSPVKAGVETTKPSKQSNNKYAASSYLSLTPEQWKSHRSYSCQVTHEGSTVEKTVAPTECSGSQSFGLLDPKLCYLLDGILFIYGVILTALFLRVKFSRSADAPAYQQGQNQLYNELNLGRREEYDVLDKRRGRDPEMGGKPQRRKNPQEGLYNELQKDKMAEAYSEIGMKGERRRGKGHDGLYQGLSTATKDTYDALHMQALPPRRAKRSGSGATNFSLLKQAGDVEENPGPTSMDWIWRILFLVGAATGAHSGPQVQLQESGGGLAQAGGSLRLSCAASGRTFSMGWFRQAPGKEREFVAAITYSGGSPYYASSVRGRFTISRDNAKNTVYLQMNSLKPEDTAVYYCAANPTYGSDWNAENWGQGTQVTVSSGSGGGGSGGGGSGGGGSFEQVQLQQPGAELVKPGASVKMSCKASGYAFSSYWINWMKQKPGQGLEWIGQIYPGDGDTNYNGKFKGRATLTADTSSSTAYMQLSSLTSEDSAVYFCARSITTVVGCAMDYWGQGTSVTVSSASTKGPSVFPLAPSSKSTSGGTAALGCLVKDYFPEPVTVSWNSGALTSGVHTFPAVLQSSGLYSLSSVVTVPSSSLGTQTYICNVNHKPSNTKVDKRVEPKSCGTQSFGLLDPKLCYLLDGILFIYGVILTALFLRVKFSRSADAPAYQQGQNQLYNELNLGRREEYDVLDKRRGRDPEMGGKPQRRKNPQEGLYNELQKDKMAEAYSEIGMKGERRRGKGHDGLYQGLSTATKDTYDALHMQALPPRRAKRSGSGVKQTLNFDLLKLAGDVESNPGPSRGHMTEYKPTVRLATRDDVPRAVRTLAAAFADYPATRHTVDPDRHIERVTELQELFLTRVGLDIGKVWVADDGAAVAVWTTPESVEAGAVFAEIGPRMAELSGSRLAAQQQMEGLLAPHRPKEPAWFLATVGVSPDHQGKGLGSAVVLPGVEAAERAGVPAFLETSAPRNLPFYERLGFTVTADVEVPEGPRTWCMTRKPGA

SEQ ID NO: 15500 - protein, 1166 aa, Artificial Sequence
  Synthetic Polypeptide
MALPVTALLLPLALLLHAARPGMRTEDLPKAVVFLEPQWYRVLEKDSVTLKCQGAYSPEDNSTQWFHNESLISSQASSYFIDAATVDDSGEYRCQTNLSTLSDPVQLEVHIGWLLLQAPRWVFKEEDPIHLRCHSWKNTALHKVTYLQNGKGRKYFHHNSDFYIPKATLKDSGSYFCRGLVGSKNVSSETVNITITQGLAVSTISSFFPPGYQGTGGGGSGGGGSGGGGSEFDIQMTQSPSSLSASVGDRVTITCKASDHINNWLAWYQQKPGQAPKLLIYGATTLETGVPSRFSGSGSGTDYTLTISSLQPEDFATYYCQQSWNTPWTFGQGTKLEIKRLEDLKNVFPPEVAVFEPSEAEISHTQKATLVCLATGFYPDHVELSWWVNGKEVHSGVSTDPQPLKEQPALNDSRYCLSSRLRVSATFWQNPRNHFRCQVQFYGLSENDEWTQDRAKPVTQIVSAEAWGRADCGSQSFGLLDPKLCYLLDGILFIYGVILTALFLRVKFSRSADAPAYQQGQNQLYNELNLGRREEYDVLDKRRGRDPEMGGKPQRRKNPQEGLYNELQKDKMAEAYSEIGMKGERRRGKGHDGLYQGLSTATKDTYDALHMQALPPRRAKRSGSGATNFSLLKQAGDVEENPGPTSMDWIWRILFLVGAATGAHSGPQVQLQESGGGLAQAGGSLRLSCAASGRTFSMGWFRQAPGKEREFVAAITYSGGSPYYASSVRGRFTISRDNAKNTVYLQMNSLKPEDTAVYYCAANPTYGSDWNAENWGQGTQVTVSSGSGGGGSGGGGSGGGGSFEQVQLQQPGAELVKPGASVKMSCKASGYAFSSYWINWMKQKPGQGLEWIGQIYPGDGDTNYNGKFKGRATLTADTSSSTAYMQLSSLTSEDSAVYFCARSITTVVGCAMDYWGQGTSVTVSSTRIQNPDPAVYQLRDSKSSDKSVCLFTDFDSQTNVSQSKDSDVYITDKTVLDMRSMDFKSNSAVAWSNKSDFACANAFNNSIIPEDTFFPSPESSCGTQSFGLLDPKLCYLLDGILFIYGVILTALFLRVKFSRSADAPAYQQGQNQLYNELNLGRREEYDVLDKRRGRDPEMGGKPQRRKNPQEGLYNELQKDKMAEAYSEIGMKGERRRGKGHDGLYQGLSTATKDTYDALHMQALPPR

SEQ ID NO: 15501 - protein, 1166 aa, Artificial Sequence
  Synthetic Polypeptide
MALPVTALLLPLALLLHAARPGMRTEDLPKAVVFLEPQWYRVLEKDSVTLKCQGAYSPEDNSTQWFHNESLISSQASSYFIDAATVDDSGEYRCQTNLSTLSDPVQLEVHIGWLLLQAPRWVFKEEDPIHLRCHSWKNTALHKVTYLQNGKGRKYFHHNSDFYIPKATLKDSGSYFCRGLVGSKNVSSETVNITITQGLAVSTISSFFPPGYQGTGGGGSGGGGSGGGGSEFDIQMTQSPSSLSASVGDRVTITCKASDHINNWLAWYQQKPGQAPKLLIYGATTLETGVPSRFSGSGSGTDYTLTISSLQPEDFATYYCQQSWNTPWTFGQGTKLEIKRLEDLKNVFPPEVAVFEPSKAEIAHTQKATLVCLATGFYPDHVELSWWVNGKEVHSGVCTDPQPLKEQPALNDSRYCLSSRLRVSATFWQNPRNHFRCQVQFYGLSENDEWTQDRAKPVTQIVSAEAWGRADCGSQSFGLLDPKLCYLLDGILFIYGVILTALFLRVKFSRSADAPAYQQGQNQLYNELNLGRREEYDVLDKRRGRDPEMGGKPQRRKNPQEGLYNELQKDKMAEAYSEIGMKGERRRGKGHDGLYQGLSTATKDTYDALHMQALPPRRAKRSGSGATNFSLLKQAGDVEENPGPTSMDWIWRILFLVGAATGAHSGPQVQLQESGGGLAQAGGSLRLSCAASGRTFSMGWFRQAPGKEREFVAAITYSGGSPYYASSVRGRFTISRDNAKNTVYLQMNSLKPEDTAVYYCAANPTYGSDWNAENWGQGTQVTVSSGSGGGGSGGGGSGGGGSFEQVQLQQPGAELVKPGASVKMSCKASGYAFSSYWINWMKQKPGQGLEWIGQIYPGDGDTNYNGKFKGRATLTADTSSSTAYMQLSSLTSEDSAVYFCARSITTVVGCAMDYWGQGTSVTVSSTRIQNPDPAVYQLRDSKSSDKSVCLFTDFDSQTNVSQSKDSDVYITDKCVLDMRSMDFKSNSAVAWSNKSDFACANAFNNSIIPEDTFFPSSDVPCGTQSFGLLDPKLCYLLDGILFIYGVILTALFLRVKFSRSADAPAYQQGQNQLYNELNLGRREEYDVLDKRRGRDPEMGGKPQRRKNPQEGLYNELQKDKMAEAYSEIGMKGERRRGKGHDGLYQGLSTATKDTYDALHMQALPPR

SEQ ID NO: 15502 - protein, 1237 aa, Artificial Sequence
  Synthetic Polypeptide
MALPVTALLLPLALLLHAARPGMRTEDLPKAVVFLEPQWYRVLEKDSVTLKCQGAYSPEDNSTQWFHNESLISSQASSYFIDAATVDDSGEYRCQTNLSTLSDPVQLEVHIGWLLLQAPRWVFKEEDPIHLRCHSWKNTALHKVTYLQNGKGRKYFHHNSDFYIPKATLKDSGSYFCRGLVGSKNVSSETVNITITQGLAVSTISSFFPPGYQGTGGGGSGGGGSGGGGSEFDIQMTQSPSSLSASVGDRVTITCKASDHINNWLAWYQQKPGQAPKLLIYGATTLETGVPSRFSGSGSGTDYTLTISSLQPEDFATYYCQQSWNTPWTFGQGTKLEIKRLEGKPIPNPLLGLDSTGSGEDLKNVFPPEVAVFEPSEAEISHTQKATLVCLATGFYPDHVELSWWVNGKEVHSGVSTDPQPLKEQPALNDSRYCLSSRLRVSATFWQNPRNHFRCQVQFYGLSENDEWTQDRAKPVTQIVSAEAWGRADCGSQSFGLLDPKLCYLLDGILFIYGVILTALFLRVKFSRSADAPAYQQGQNQLYNELNLGRREEYDVLDKRRGRDPEMGGKPQRRKNPQEGLYNELQKDKMAEAYSEIGMKGERRRGKGHDGLYQGLSTATKDTYDALHMQALPPRRAKRSGSGATNFSLLKQAGDVEENPGPTSMDWIWRILFLVGAATGAHSGPQVQLQESGGGLAQAGGSLRLSCAASGRTFSMGWFRQAPGKEREFVAAITYSGGSPYYASSVRGRFTISRDNAKNTVYLQMNSLKPEDTAVYYCAANPTYGSDWNAENWGQGTQVTVSSGSGGGGSGGGGSGGGGSFEQVQLQQPGAELVKPGASVKMSCKASGYAFSSYWINWMKQKPGQGLEWIGQIYPGDGDTNYNGKFKGRATLTADTSSSTAYMQLSSLTSEDSAVYFCARSITTVVGCAMDYWGQGTSVTVSSTREQKLISEEDGSGIQNPDPAVYQLRDSKSSDKSVCLFTDFDSQTNVSQSKDSDVYITDKTVLDMRSMDFKSNSAVAWSNKSDFACANAFNNSIIPEDTFFPSPESSCGTQSFGLLDPKLCYLLDGILFIYGVILTALFLRSKRSRLLHSDYMNMTPRRPGPTRKHYQPYAPPRDFAAYRSRVKFSRSADAPAYQQGQNQLYNELNLGRREEYDVLDKRRGRDPEMGGKPQRRKNPQEGLYNELQKDKMAEAYSEIGMKGERRRGKGHDGLYQGLSTATKDTYDALHMQALPPR

SEQ ID NO: 15503 - protein, 1278 aa, Artificial Sequence
  Synthetic Polypeptide
MALPVTALLLPLALLLHAARPGMRTEDLPKAVVFLEPQWYRVLEKDSVTLKCQGAYSPEDNSTQWFHNESLISSQASSYFIDAATVDDSGEYRCQTNLSTLSDPVQLEVHIGWLLLQAPRWVFKEEDPIHLRCHSWKNTALHKVTYLQNGKGRKYFHHNSDFYIPKATLKDSGSYFCRGLVGSKNVSSETVNITITQGLAVSTISSFFPPGYQGTGGGGSGGGGSGGGGSEFDIQMTQSPSSLSASVGDRVTITCKASDHINNWLAWYQQKPGQAPKLLIYGATTLETGVPSRFSGSGSGTDYTLTISSLQPEDFATYYCQQSWNTPWTFGQGTKLEIKRLEGKPIPNPLLGLDSTGSGEDLKNVFPPEVAVFEPSEAEISHTQKATLVCLATGFYPDHVELSWWVNGKEVHSGVSTDPQPLKEQPALNDSRYCLSSRLRVSATFWQNPRNHFRCQVQFYGLSENDEWTQDRAKPVTQIVSAEAWGRADCGSQSFGLLDPKLCYLLDGILFIYGVILTALFLRSKRSRLLHSDYMNMTPRRPGPTRKHYQPYAPPRDFAAYRSRVKFSRSADAPAYQQGQNQLYNELNLGRREEYDVLDKRRGRDPEMGGKPQRRKNPQEGLYNELQKDKMAEAYSEIGMKGERRRGKGHDGLYQGLSTATKDTYDALHMQALPPRRAKRSGSGATNFSLLKQAGDVEENPGPTSMDWIWRILFLVGAATGAHSGPQVQLQESGGGLAQAGGSLRLSCAASGRTFSMGWFRQAPGKEREFVAAITYSGGSPYYASSVRGRFTISRDNAKNTVYLQMNSLKPEDTAVYYCAANPTYGSDWNAENWGQGTQVTVSSGSGGGGSGGGGSGGGGSFEQVQLQQPGAELVKPGASVKMSCKASGYAFSSYWINWMKQKPGQGLEWIGQIYPGDGDTNYNGKFKGRATLTADTSSSTAYMQLSSLTSEDSAVYFCARSITTVVGCAMDYWGQGTSVTVSSTREQKLISEEDGSGIQNPDPAVYQLRDSKSSDKSVCLFTDFDSQTNVSQSKDSDVYITDKTVLDMRSMDFKSNSAVAWSNKSDFACANAFNNSIIPEDTFFPSPESSCGTQSFGLLDPKLCYLLDGILFIYGVILTALFLRSKRSRLLHSDYMNMTPRRPGPTRKHYQPYAPPRDFAAYRSRVKFSRSADAPAYQQGQNQLYNELNLGRREEYDVLDKRRGRDPEMGGKPQRRKNPQEGLYNELQKDKMAEAYSEIGMKGERRRGKGHDGLYQGLSTATKDTYDALHMQALPPR

SEQ ID NO: 15504 - protein, 1239 aa, Artificial Sequence
  Synthetic Polypeptide
MALPVTALLLPLALLLHAARPGMRTEDLPKAVVFLEPQWYRVLEKDSVTLKCQGAYSPEDNSTQWFHNESLISSQASSYFIDAATVDDSGEYRCQTNLSTLSDPVQLEVHIGWLLLQAPRWVFKEEDPIHLRCHSWKNTALHKVTYLQNGKGRKYFHHNSDFYIPKATLKDSGSYFCRGLVGSKNVSSETVNITITQGLAVSTISSFFPPGYQGTGGGGSGGGGSGGGGSEFDIQMTQSPSSLSASVGDRVTITCKASDHINNWLAWYQQKPGQAPKLLIYGATTLETGVPSRFSGSGSGTDYTLTISSLQPEDFATYYCQQSWNTPWTFGQGTKLEIKRLEGKPIPNPLLGLDSTGSGEDLKNVFPPEVAVFEPSEAEISHTQKATLVCLATGFYPDHVELSWWVNGKEVHSGVSTDPQPLKEQPALNDSRYCLSSRLRVSATFWQNPRNHFRCQVQFYGLSENDEWTQDRAKPVTQIVSAEAWGRADCGSQSFGLLDPKLCYLLDGILFIYGVILTALFLRVKFSRSADAPAYQQGQNQLYNELNLGRREEYDVLDKRRGRDPEMGGKPQRRKNPQEGLYNELQKDKMAEAYSEIGMKGERRRGKGHDGLYQGLSTATKDTYDALHMQALPPRRAKRSGSGATNFSLLKQAGDVEENPGPTSMDWIWRILFLVGAATGAHSGPQVQLQESGGGLAQAGGSLRLSCAASGRTFSMGWFRQAPGKEREFVAAITYSGGSPYYASSVRGRFTISRDNAKNTVYLQMNSLKPEDTAVYYCAANPTYGSDWNAENWGQGTQVTVSSGSGGGGSGGGGSGGGGSFEQVQLQQPGAELVKPGASVKMSCKASGYAFSSYWINWMKQKPGQGLEWIGQIYPGDGDTNYNGKFKGRATLTADTSSSTAYMQLSSLTSEDSAVYFCARSITTVVGCAMDYWGQGTSVTVSSTREQKLISEEDLGSGIQNPDPAVYQLRDSKSSDKSVCLFTDFDSQTNVSQSKDSDVYITDKTVLDMRSMDFKSNSAVAWSNKSDFACANAFNNSIIPEDTFFPSPESSCGTQSFGLLDPKLCYLLDGILFIYGVILTALFLKRGRKKLLYIFKQPFMRPVQTTQEEDGCSCRFPEEEEGGCELRVKFSRSADAPAYQQGQNQLYNELNLGRREEYDVLDKRRGRDPEMGGKPQRRKNPQEGLYNELQKDKMAEAYSEIGMKGERRRGKGHDGLYQGLSTATKDTYDALHMQALPPR

SEQ ID NO: 15505 - protein, 1281 aa, Artificial Sequence
  Synthetic Polypeptide
MALPVTALLLPLALLLHAARPGMRTEDLPKAVVFLEPQWYRVLEKDSVTLKCQGAYSPEDNSTQWFHNESLISSQASSYFIDAATVDDSGEYRCQTNLSTLSDPVQLEVHIGWLLLQAPRWVFKEEDPIHLRCHSWKNTALHKVTYLQNGKGRKYFHHNSDFYIPKATLKDSGSYFCRGLVGSKNVSSETVNITITQGLAVSTISSFFPPGYQGTGGGGSGGGGSGGGGSEFDIQMTQSPSSLSASVGDRVTITCKASDHINNWLAWYQQKPGQAPKLLIYGATTLETGVPSRFSGSGSGTDYTLTISSLQPEDFATYYCQQSWNTPWTFGQGTKLEIKRLEGKPIPNPLLGLDSTGSGEDLKNVFPPEVAVFEPSEAEISHTQKATLVCLATGFYPDHVELSWWVNGKEVHSGVSTDPQPLKEQPALNDSRYCLSSRLRVSATFWQNPRNHFRCQVQFYGLSENDEWTQDRAKPVTQIVSAEAWGRADCGSQSFGLLDPKLCYLLDGILFIYGVILTALFLKRGRKKLLYIFKQPFMRPVQTTQEEDGCSCRFPEEEEGGCELRVKFSRSADAPAYQQGQNQLYNELNLGRREEYDVLDKRRGRDPEMGGKPQRRKNPQEGLYNELQKDKMAEAYSEIGMKGERRRGKGHDGLYQGLSTATKDTYDALHMQALPPRRAKRSGSGATNFSLLKQAGDVEENPGPTSMDWIWRILFLVGAATGAHSGPQVQLQESGGGLAQAGGSLRLSCAASGRTFSMGWFRQAPGKEREFVAAITYSGGSPYYASSVRGRFTISRDNAKNTVYLQMNSLKPEDTAVYYCAANPTYGSDWNAENWGQGTQVTVSSGSGGGGSGGGGSGGGGSFEQVQLQQPGAELVKPGASVKMSCKASGYAFSSYWINWMKQKPGQGLEWIGQIYPGDGDTNYNGKFKGRATLTADTSSSTAYMQLSSLTSEDSAVYFCARSITTVVGCAMDYWGQGTSVTVSSTREQKLISEEDLGSGIQNPDPAVYQLRDSKSSDKSVCLFTDFDSQTNVSQSKDSDVYITDKTVLDMRSMDFKSNSAVAWSNKSDFACANAFNNSIIPEDTFFPSPESSCGTQSFGLLDPKLCYLLDGILFIYGVILTALFLKRGRKKLLYIFKQPFMRPVQTTQEEDGCSCRFPEEEEGGCELRVKFSRSADAPAYQQGQNQLYNELNLGRREEYDVLDKRRGRDPEMGGKPQRRKNPQEGLYNELQKDKMAEAYSEIGMKGERRRGKGHDGLYQGLSTATKDTYDALHMQALPPR

SEQ ID NO: 15506 - protein, 1171 aa, Artificial Sequence
  Synthetic Polypeptide
MALPVTALLLPLALLLHAARPGMRTEDLPKAVVFLEPQWYRVLEKDSVTLKCQGAYSPEDNSTQWFHNESLISSQASSYFIDAATVDDSGEYRCQTNLSTLSDPVQLEVHIGWLLLQAPRWVFKEEDPIHLRCHSWKNTALHKVTYLQNGKGRKYFHHNSDFYIPKATLKDSGSYFCRGLVGSKNVSSETVNITITQGLAVSTISSFFPPGYQGTGGGGSGGGGSGGGGSEFDIQMTQSPSSLSASVGDRVTITCKASDHINNWLAWYQQKPGQAPKLLIYGATTLETGVPSRFSGSGSGTDYTLTISSLQPEDFATYYCQQSWNTPWTFGQGTKLEIKRLEQSFGLLDPKLCYLLDGILFIYGVILTALFLRVKFSRSADAPAYQQGQNQLYNELNLGRREEYDVLDKRRGRDPEMGGKPQRRKNPQEGLYNELQKDKMAEAYSEIGMKGERRRGKGHDGLYQGLSTATKDTYDALHMQALPPRRAKRSGSGATNFSLLKQAGDVEENPGPTSMDWIWRILFLVGAATGAHSGPQVQLQESGGGLAQAGGSLRLSCAASGRTFSMGWFRQAPGKEREFVAAITYSGGSPYYASSVRGRFTISRDNAKNTVYLQMNSLKPEDTAVYYCAANPTYGSDWNAENWGQGTQVTVSSGSGGGGSGGGGSGGGGSFEQVQLQQPGAELVKPGASVKMSCKASGYAFSSYWINWMKQKPGQGLEWIGQIYPGDGDTNYNGKFKGRATLTADTSSSTAYMQLSSLTSEDSAVYFCARSITTVVGCAMDYWGQGTSVTVSSTRQSFGLLDPKLCYLLDGILFIYGVILTALFLRVKFSRSADAPAYQQGQNQLYNELNLGRREEYDVLDKRRGRDPEMGGKPQRRKNPQEGLYNELQKDKMAEAYSEIGMKGERRRGKGHDGLYQGLSTATKDTYDALHMQALPPRRAKRSGSGVKQTLNFDLLKLAGDVESNPGPSRGHMTEYKPTVRLATRDDVPRAVRTLAAAFADYPATRHTVDPDRHIERVTELQELFLTRVGLDIGKVWVADDGAAVAVWTTPESVEAGAVFAEIGPRMAELSGSRLAAQQQMEGLLAPHRPKEPAWFLATVGVSPDHQGKGLGSAVVLPGVEAAERAGVPAFLETSAPRNLPFYERLGFTVTADVEVPEGPRTWCMTRKPGA

SEQ ID NO: 15507 - protein, 996 aa, Artificial Sequence
  Synthetic Polypeptide
MALPVTALLLPLALLLHAARPGMRTEDLPKAVVFLEPQWYRVLEKDSVTLKCQGAYSPEDNSTQWFHNESLISSQASSYFIDAATVDDSGEYRCQTNLSTLSDPVQLEVHIGWLLLQAPRWVFKEEDPIHLRCHSWKNTALHKVTYLQNGKGRKYFHHNSDFYIPKATLKDSGSYFCRGLVGSKNVSSETVNITITQGLAVSTISSFFPPGYQGTGGGGSGGGGSGGGGSEFDIQMTQSPSSLSASVGDRVTITCKASDHINNWLAWYQQKPGQAPKLLIYGATTLETGVPSRFSGSGSGTDYTLTISSLQPEDFATYYCQQSWNTPWTFGQGTKLEIKRLEGQPKANPTVTLFPPSSEELQANKATLVCLISDFYPGAVTVAWKADGSPVKAGVETTKPSKQSNNKYAASSYLSLTPEQWKSHRSYSCQVTHEGSTVEKTVAPTECSPIKTDVITMDPKDNCSKDANDTLLLQLTNTSAYYMYLLLLLKSVVYFAIITCCLLRRTAFCCNGEKSRAKRSGSGATNFSLLKQAGDVEENPGPTSMDWIWRILFLVGAATGAHSGPQVQLQESGGGLAQAGGSLRLSCAASGRTFSMGWFRQAPGKEREFVAAITYSGGSPYYASSVRGRFTISRDNAKNTVYLQMNSLKPEDTAVYYCAANPTYGSDWNAENWGQGTQVTVSSGSGGGGSGGGGSGGGGSFEQVQLQQPGAELVKPGASVKMSCKASGYAFSSYWINWMKQKPGQGLEWIGQIYPGDGDTNYNGKFKGRATLTADTSSSTAYMQLSSLTSEDSAVYFCARSITTVVGCAMDYWGQGTSVTVSSTRASTKGPSVFPLAPSSKSTSGGTAALGCLVKDYFPEPVTVSWNSGALTSGVHTFPAVLQSSGLYSLSSVVTVPSSSLGTQTYICNVNHKPSNTKVDKRVEPKSCEVKTDSTDHVKPKETENTKQPSKSCHKPKAIVHTEKVNMMSLTVLGLRMLFAKTVAVNFLLTAKLFFL

SEQ ID NO: 15508 - protein, 974 aa, Artificial Sequence
  Synthetic Polypeptide
MALPVTALLLPLALLLHAARPGMRTEDLPKAVVFLEPQWYRVLEKDSVTLKCQGAYSPEDNSTQWFHNESLISSQASSYFIDAATVDDSGEYRCQTNLSTLSDPVQLEVHIGWLLLQAPRWVFKEEDPIHLRCHSWKNTALHKVTYLQNGKGRKYFHHNSDFYIPKATLKDSGSYFCRGLVGSKNVSSETVNITITQGLAVSTISSFFPPGYQGTGGGGSGGGGSGGGGSEFDIQMTQSPSSLSASVGDRVTITCKASDHINNWLAWYQQKPGQAPKLLIYGATTLETGVPSRFSGSGSGTDYTLTISSLQPEDFATYYCQQSWNTPWTFGQGTKLEIKRLEGQPKANPTVTLFPPSSEELQANKATLVCLISDFYPGAVTVAWKADGSPVKAGVETTKPSKQSNNKYAASSYLSLTPEQWKSHRSYSCQVTHEGSTVEKTVAPTECSGRADCGITSASYHQGVLSATILYEILLGKATLYAVLVSALVLMAMVKRKDSRGRAKRSGSGATNFSLLKQAGDVEENPGPTSMDWIWRILFLVGAATGAHSGPQVQLQESGGGLAQAGGSLRLSCAASGRTFSMGWFRQAPGKEREFVAAITYSGGSPYYASSVRGRFTISRDNAKNTVYLQMNSLKPEDTAVYYCAANPTYGSDWNAENWGQGTQVTVSSGSGGGGSGGGGSGGGGSFEQVQLQQPGAELVKPGASVKMSCKASGYAFSSYWINWMKQKPGQGLEWIGQIYPGDGDTNYNGKFKGRATLTADTSSSTAYMQLSSLTSEDSAVYFCARSITTVVGCAMDYWGQGTSVTVSSTRASTKGPSVFPLAPSSKSTSGGTAALGCLVKDYFPEPVTVSWNSGALTSGVHTFPAVLQSSGLYSLSSVVTVPSSSLGTQTYICNVNHKPSNTKVDKRVEPKSCIPEDTFFPSSDVPCDVKLVEKSFETDTNLNFQNLSVIGFRILLLKVAGFNLLMTLRLWSS

SEQ ID NO: 15509 - protein, 974 aa, Artificial Sequence
  Synthetic Polypeptide
MALPVTALLLPLALLLHAARPGMRTEDLPKAVVFLEPQWYRVLEKDSVTLKCQGAYSPEDNSTQWFHNESLISSQASSYFIDAATVDDSGEYRCQTNLSTLSDPVQLEVHIGWLLLQAPRWVFKEEDPIHLRCHSWKNTALHKVTYLQNGKGRKYFHHNSDFYIPKATLKDSGSYFCRGLVGSKNVSSETVNITITQGLAVSTISSFFPPGYQGTGGGGSGGGGSGGGGSEFDIQMTQSPSSLSASVGDRVTITCKASDHINNWLAWYQQKPGQAPKLLIYGATTLETGVPSRFSGSGSGTDYTLTISSLQPEDFATYYCQQSWNTPWTFGQGTKLEIKRLEGQPKANPTVTLFPPSSEELQANKATLVCLISDFYPGAVTVAWKADGSPVKAGVETTKPSKQSNNKYAASSYLSLTPEQWKSHRSYSCQVTHEGSTVEKTVAPTECSGRADCGFTSESYQQGVLSATILYEILLGKATLYAVLVSALVLMAMVKRKDSRGRAKRSGSGATNFSLLKQAGDVEENPGPTSMDWIWRILFLVGAATGAHSGPQVQLQESGGGLAQAGGSLRLSCAASGRTFSMGWFRQAPGKEREFVAAITYSGGSPYYASSVRGRFTISRDNAKNTVYLQMNSLKPEDTAVYYCAANPTYGSDWNAENWGQGTQVTVSSGSGGGGSGGGGSGGGGSFEQVQLQQPGAELVKPGASVKMSCKASGYAFSSYWINWMKQKPGQGLEWIGQIYPGDGDTNYNGKFKGRATLTADTSSSTAYMQLSSLTSEDSAVYFCARSITTVVGCAMDYWGQGTSVTVSSTRASTKGPSVFPLAPSSKSTSGGTAALGCLVKDYFPEPVTVSWNSGALTSGVHTFPAVLQSSGLYSLSSVVTVPSSSLGTQTYICNVNHKPSNTKVDKRVEPKSCIPEDTFFPSPESSCDVKLVEKSFETDTNLNFQNLSVIGFRILLLKVAGFNLLMTLRLWSS

SEQ ID NO: 15510 - protein, 940 aa, Artificial Sequence
  Synthetic Polypeptide
MALPVTALLLPLALLLHAARPGMRTEDLPKAVVFLEPQWYRVLEKDSVTLKCQGAYSPEDNSTQWFHNESLISSQASSYFIDAATVDDSGEYRCQTNLSTLSDPVQLEVHIGWLLLQAPRWVFKEEDPIHLRCHSWKNTALHKVTYLQNGKGRKYFHHNSDFYIPKATLKDSGSYFCRGLVGSKNVSSETVNITITQGLAVSTISSFFPPGYQLEGQPKANPTVTLFPPSSEELQANKATLVCLISDFYPGAVTVAWKADGSPVKAGVETTKPSKQSNNKYAASSYLSLTPEQWKSHRSYSCQVTHEGSTVEKTVAPTECSGRADCGFTSESYQQGVLSATILYEILLGKATLYAVLVSALVLMAMVKRKDSRGRAKRSGSGATNFSLLKQAGDVEENPGPTSMDWIWRILFLVGAATGAHSGPQVQLQESGGGLAQAGGSLRLSCAASGRTFSMGWFRQAPGKEREFVAAITYSGGSPYYASSVRGRFTISRDNAKNTVYLQMNSLKPEDTAVYYCAANPTYGSDWNAENWGQGTQVTVSSTRASTKGPSVFPLAPSSKSTSGGTAALGCLVKDYFPEPVTVSWNSGALTSGVHTFPAVLQSSGLYSLSSVVTVPSSSLGTQTYICNVNHKPSNTKVDKRVEPKSCIPEDTFFPSPESSCDVKLVEKSFETDTNLNFQNLSVIGFRILLLKVAGFNLLMTLRLWSSRAKRSGSGVKQTLNFDLLKLAGDVESNPGPSRGHMTEYKPTVRLATRDDVPRAVRTLAAAFADYPATRHTVDPDRHIERVTELQELFLTRVGLDIGKVWVADDGAAVAVWTTPESVEAGAVFAEIGPRMAELSGSRLAAQQQMEGLLAPHRPKEPAWFLATVGVSPDHQGKGLGSAVVLPGVEAAERAGVPAFLETSAPRNLPFYERLGFTVTADVEVPEGPRTWCMTRKPGA

SEQ ID NO: 15511 - protein, 707 aa, Artificial Sequence
  Synthetic Polypeptide
MALPVTALLLPLALLLHAARPGMRTEDLPKAVVFLEPQWYRVLEKDSVTLKCQGAYSPEDNSTQWFHNESLISSQASSYFIDAATVDDSGEYRCQTNLSTLSDPVQLEVHIGWLLLQAPRWVFKEEDPIHLRCHSWKNTALHKVTYLQNGKGRKYFHHNSDFYIPKATLKDSGSYFCRGLVGSKNVSSETVNITITQGLAVSTISSFFPPGYQLEGQPKANPTVTLFPPSSEELQANKATLVCLISDFYPGAVTVAWKADGSPVKAGVETTKPSKQSNNKYAASSYLSLTPEQWKSHRSYSCQVTHEGSTVEKTVAPTECSGRADCGFTSESYQQGVLSATILYEILLGKATLYAVLVSALVLMAMVKRKDSRGRAKRSGSGATNFSLLKQAGDVEENPGPTSMDWIWRILFLVGAATGAHSGPQVQLQESGGGLAQAGGSLRLSCAASGRTFSMGWFRQAPGKEREFVAAITYSGGSPYYASSVRGRFTISRDNAKNTVYLQMNSLKPEDTAVYYCAANPTYGSDWNAENWGQGTQVTVSSTRASTKGPSVFPLAPSSKSTSGGTAALGCLVKDYFPEPVTVSWNSGALTSGVHTFPAVLQSSGLYSLSSVVTVPSSSLGTQTYICNVNHKPSNTKVDKRVEPKSCIPEDTFFPSPESSCDVKLVEKSFETDTNLNFQNLSVIGFRILLLKVAGFNLLMTLRLWSS

SEQ ID NO: 15512 - protein, 735 aa, Artificial Sequence
  Synthetic Polypeptide
MALPVTALLLPLALLLHAARPGMRTEDLPKAVVFLEPQWYRVLEKDSVTLKCQGAYSPEDNSTQWFHNESLISSQASSYFIDAATVDDSGEYRCQTNLSTLSDPVQLEVHIGWLLLQAPRWVFKEEDPIHLRCHSWKNTALHKVTYLQNGKGRKYFHHNSDFYIPKATLKDSGSYFCRGLVGSKNVSSETVNITITQGLAVSTISSFFPPGYQLEGSGRADCGFTSESYQQGVLSATILYEILLGKATLYAVLVSALVLMAMVKRKDSRGRAKRSGSGATNFSLLKQAGDVEENPGPTSMDWIWRILFLVGAATGAHSGPQVQLQESGGGLAQAGGSLRLSCAASGRTFSMGWFRQAPGKEREFVAAITYSGGSPYYASSVRGRFTISRDNAKNTVYLQMNSLKPEDTAVYYCAANPTYGSDWNAENWGQGTQVTVSSTRGSIPEDTFFPSPESSCDVKLVEKSFETDTNLNFQNLSVIGFRILLLKVAGFNLLMTLRLWSSRAKRSGSGVKQTLNFDLLKLAGDVESNPGPSRGHMTEYKPTVRLATRDDVPRAVRTLAAAFADYPATRHTVDPDRHIERVTELQELFLTRVGLDIGKVWVADDGAAVAVWTTPESVEAGAVFAEIGPRMAELSGSRLAAQQQMEGLLAPHRPKEPAWFLATVGVSPDHQGKGLGSAVVLPGVEAAERAGVPAFLETSAPRNLPFYERLGFTVTADVEVPEGPRTWCMTRKPGA

SEQ ID NO: 15513 - protein, 502 aa, Artificial Sequence
  Synthetic Polypeptide
MALPVTALLLPLALLLHAARPGMRTEDLPKAVVFLEPQWYRVLEKDSVTLKCQGAYSPEDNSTQWFHNESLISSQASSYFIDAATVDDSGEYRCQTNLSTLSDPVQLEVHIGWLLLQAPRWVFKEEDPIHLRCHSWKNTALHKVTYLQNGKGRKYFHHNSDFYIPKATLKDSGSYFCRGLVGSKNVSSETVNITITQGLAVSTISSFFPPGYQLEGSGRADCGFTSESYQQGVLSATILYEILLGKATLYAVLVSALVLMAMVKRKDSRGRAKRSGSGATNFSLLKQAGDVEENPGPTSMDWIWRILFLVGAATGAHSGPQVQLQESGGGLAQAGGSLRLSCAASGRTFSMGWFRQAPGKEREFVAAITYSGGSPYYASSVRGRFTISRDNAKNTVYLQMNSLKPEDTAVYYCAANPTYGSDWNAENWGQGTQVTVSSTRGSIPEDTFFPSPESSCDVKLVEKSFETDTNLNFQNLSVIGFRILLLKVAGFNLLMTLRLWSS

SEQ ID NO: 15514 - protein, 744 aa, Artificial Sequence
  Synthetic Polypeptide
MALPVTALLLPLALLLHAARPGMRTEDLPKAVVFLEPQWYRVLEKDSVTLKCQGAYSPEDNSTQWFHNESLISSQASSYFIDAATVDDSGEYRCQTNLSTLSDPVQLEVHIGWLLLQAPRWVFKEEDPIHLRCHSWKNTALHKVTYLQNGKGRKYFHHNSDFYIPKATLKDSGSYFCRGLVGSKNVSSETVNITITQGLAVSTISSFFPPGYQLEDKTHTCPPCPAGRADCGFTSESYQQGVLSATILYEILLGKATLYAVLVSALVLMAMVKRKDSRGRAKRSGSGATNFSLLKQAGDVEENPGPTSMDWIWRILFLVGAATGAHSGPQVQLQESGGGLAQAGGSLRLSCAASGRTFSMGWFRQAPGKEREFVAAITYSGGSPYYASSVRGRFTISRDNAKNTVYLQMNSLKPEDTAVYYCAANPTYGSDWNAENWGQGTQVTVSSTRGSIPEDTFFPSPESSCDVKLVEKSFETDTNLNFQNLSVIGFRILLLKVAGFNLLMTLRLWSSRAKRSGSGVKQTLNFDLLKLAGDVESNPGPSRGHMTEYKPTVRLATRDDVPRAVRTLAAAFADYPATRHTVDPDRHIERVTELQELFLTRVGLDIGKVWVADDGAAVAVWTTPESVEAGAVFAEIGPRMAELSGSRLAAQQQMEGLLAPHRPKEPAWFLATVGVSPDHQGKGLGSAVVLPGVEAAERAGVPAFLETSAPRNLPFYERLGFTVTADVEVPEGPRTWCMTRKPGA

SEQ ID NO: 15515 - protein, 744 aa, Artificial Sequence
  Synthetic Polypeptide
MALPVTALLLPLALLLHAARPGMRTEDLPKAVVFLEPQWYRVLEKDSVTLKCQGAYSPEDNSTQWFHNESLISSQASSYFIDAATVDDSGEYRCQTNLSTLSDPVQLEVHIGWLLLQAPRWVFKEEDPIHLRCHSWKNTALHKVTYLQNGKGRKYFHHNSDFYIPKATLKDSGSYFCRGLVGSKNVSSETVNITITQGLAVSTISSFFPPGYQLEGSGRADCGFTSESYQQGVLSATILYEILLGKATLYAVLVSALVLMAMVKRKDSRGRAKRSGSGATNFSLLKQAGDVEENPGPTSMDWIWRILFLVGAATGAHSGPQVQLQESGGGLAQAGGSLRLSCAASGRTFSMGWFRQAPGKEREFVAAITYSGGSPYYASSVRGRFTISRDNAKNTVYLQMNSLKPEDTAVYYCAANPTYGSDWNAENWGQGTQVTVSSTRDKTHTCPPCPAIPEDTFFPSPESSCDVKLVEKSFETDTNLNFQNLSVIGFRILLLKVAGFNLLMTLRLWSSRAKRSGSGVKQTLNFDLLKLAGDVESNPGPSRGHMTEYKPTVRLATRDDVPRAVRTLAAAFADYPATRHTVDPDRHIERVTELQELFLTRVGLDIGKVWVADDGAAVAVWTTPESVEAGAVFAEIGPRMAELSGSRLAAQQQMEGLLAPHRPKEPAWFLATVGVSPDHQGKGLGSAVVLPGVEAAERAGVPAFLETSAPRNLPFYERLGFTVTADVEVPEGPRTWCMTRKPGA

SEQ ID NO: 15516 - protein, 753 aa, Artificial Sequence
  Synthetic Polypeptide
MALPVTALLLPLALLLHAARPGMRTEDLPKAVVFLEPQWYRVLEKDSVTLKCQGAYSPEDNSTQWFHNESLISSQASSYFIDAATVDDSGEYRCQTNLSTLSDPVQLEVHIGWLLLQAPRWVFKEEDPIHLRCHSWKNTALHKVTYLQNGKGRKYFHHNSDFYIPKATLKDSGSYFCRGLVGSKNVSSETVNITITQGLAVSTISSFFPPGYQLEDKTHTCPPCPAGRADCGFTSESYQQGVLSATILYEILLGKATLYAVLVSALVLMAMVKRKDSRGRAKRSGSGATNFSLLKQAGDVEENPGPTSMDWIWRILFLVGAATGAHSGPQVQLQESGGGLAQAGGSLRLSCAASGRTFSMGWFRQAPGKEREFVAAITYSGGSPYYASSVRGRFTISRDNAKNTVYLQMNSLKPEDTAVYYCAANPTYGSDWNAENWGQGTQVTVSSTRDKTHTCPPCPAIPEDTFFPSPESSCDVKLVEKSFETDTNLNFQNLSVIGFRILLLKVAGFNLLMTLRLWSSRAKRSGSGVKQTLNFDLLKLAGDVESNPGPSRGHMTEYKPTVRLATRDDVPRAVRTLAAAFADYPATRHTVDPDRHIERVTELQELFLTRVGLDIGKVWVADDGAAVAVWTTPESVEAGAVFAEIGPRMAELSGSRLAAQQQMEGLLAPHRPKEPAWFLATVGVSPDHQGKGLGSAVVLPGVEAAERAGVPAFLETSAPRNLPFYERLGFTVTADVEVPEGPRTWCMTRKPGA

SEQ ID NO: 15517 - protein, 520 aa, Artificial Sequence
  Synthetic Polypeptide
MALPVTALLLPLALLLHAARPGMRTEDLPKAVVFLEPQWYRVLEKDSVTLKCQGAYSPEDNSTQWFHNESLISSQASSYFIDAATVDDSGEYRCQTNLSTLSDPVQLEVHIGWLLLQAPRWVFKEEDPIHLRCHSWKNTALHKVTYLQNGKGRKYFHHNSDFYIPKATLKDSGSYFCRGLVGSKNVSSETVNITITQGLAVSTISSFFPPGYQLEDKTHTCPPCPAGRADCGFTSESYQQGVLSATILYEILLGKATLYAVLVSALVLMAMVKRKDSRGRAKRSGSGATNFSLLKQAGDVEENPGPTSMDWIWRILFLVGAATGAHSGPQVQLQESGGGLAQAGGSLRLSCAASGRTFSMGWFRQAPGKEREFVAAITYSGGSPYYASSVRGRFTISRDNAKNTVYLQMNSLKPEDTAVYYCAANPTYGSDWNAENWGQGTQVTVSSTRDKTHTCPPCPAIPEDTFFPSPESSCDVKLVEKSFETDTNLNFQNLSVIGFRILLLKVAGFNLLMTLRLWSS

SEQ ID NO: 15518 - protein, 511 aa, Artificial Sequence
  Synthetic Polypeptide
MALPVTALLLPLALLLHAARPGMRTEDLPKAVVFLEPQWYRVLEKDSVTLKCQGAYSPEDNSTQWFHNESLISSQASSYFIDAATVDDSGEYRCQTNLSTLSDPVQLEVHIGWLLLQAPRWVFKEEDPIHLRCHSWKNTALHKVTYLQNGKGRKYFHHNSDFYIPKATLKDSGSYFCRGLVGSKNVSSETVNITITQGLAVSTISSFFPPGYQLEGSGRADCGFTSESYQQGVLSATILYEILLGKATLYAVLVSALVLMAMVKRKDSRGRAKRSGSGATNFSLLKQAGDVEENPGPTSMDWIWRILFLVGAATGAHSGPQVQLQESGGGLAQAGGSLRLSCAASGRTFSMGWFRQAPGKEREFVAAITYSGGSPYYASSVRGRFTISRDNAKNTVYLQMNSLKPEDTAVYYCAANPTYGSDWNAENWGQGTQVTVSSTRDKTHTCPPCPAIPEDTFFPSPESSCDVKLVEKSFETDTNLNFQNLSVIGFRILLLKVAGFNLLMTLRLWSS

SEQ ID NO: 15519 - protein, 962 aa, Artificial Sequence
  Synthetic Polypeptide
MALPVTALLLPLALLLHAARPGMRTEDLPKAVVFLEPQWYRVLEKDSVTLKCQGAYSPEDNSTQWFHNESLISSQASSYFIDAATVDDSGEYRCQTNLSTLSDPVQLEVHIGWLLLQAPRWVFKEEDPIHLRCHSWKNTALHKVTYLQNGKGRKYFHHNSDFYIPKATLKDSGSYFCRGLVGSKNVSSETVNITITQGLAVSTISSFFPPGYQLEGQPKANPTVTLFPPSSEELQANKATLVCLISDFYPGAVTVAWKADGSPVKAGVETTKPSKQSNNKYAASSYLSLTPEQWKSHRSYSCQVTHEGSTVEKTVAPTECSPIKTDVITMDPKDNCSKDANDTLLLQLTNTSAYYMYLLLLLKSVVYFAIITCCLLRRTAFCCNGEKSRAKRSGSGATNFSLLKQAGDVEENPGPTSMDWIWRILFLVGAATGAHSGPQVQLQESGGGLAQAGGSLRLSCAASGRTFSMGWFRQAPGKEREFVAAITYSGGSPYYASSVRGRFTISRDNAKNTVYLQMNSLKPEDTAVYYCAANPTYGSDWNAENWGQGTQVTVSSTRASTKGPSVFPLAPSSKSTSGGTAALGCLVKDYFPEPVTVSWNSGALTSGVHTFPAVLQSSGLYSLSSVVTVPSSSLGTQTYICNVNHKPSNTKVDKRVEPKSCEVKTDSTDHVKPKETENTKQPSKSCHKPKAIVHTEKVNMMSLTVLGLRMLFAKTVAVNFLLTAKLFFLRAKRSGSGVKQTLNFDLLKLAGDVESNPGPSRGHMTEYKPTVRLATRDDVPRAVRTLAAAFADYPATRHTVDPDRHIERVTELQELFLTRVGLDIGKVWVADDGAAVAVWTTPESVEAGAVFAEIGPRMAELSGSRLAAQQQMEGLLAPHRPKEPAWFLATVGVSPDHQGKGLGSAVVLPGVEAAERAGVPAFLETSAPRNLPFYERLGFTVTADVEVPEGPRTWCMTRKPGA

SEQ ID NO: 15520 - protein, 729 aa, Artificial Sequence
  Synthetic Polypeptide
MALPVTALLLPLALLLHAARPGMRTEDLPKAVVFLEPQWYRVLEKDSVTLKCQGAYSPEDNSTQWFHNESLISSQASSYFIDAATVDDSGEYRCQTNLSTLSDPVQLEVHIGWLLLQAPRWVFKEEDPIHLRCHSWKNTALHKVTYLQNGKGRKYFHHNSDFYIPKATLKDSGSYFCRGLVGSKNVSSETVNITITQGLAVSTISSFFPPGYQLEGQPKANPTVTLFPPSSEELQANKATLVCLISDFYPGAVTVAWKADGSPVKAGVETTKPSKQSNNKYAASSYLSLTPEQWKSHRSYSCQVTHEGSTVEKTVAPTECSPIKTDVITMDPKDNCSKDANDTLLLQLTNTSAYYMYLLLLLKSVVYFAIITCCLLRRTAFCCNGEKSRAKRSGSGATNFSLLKQAGDVEENPGPTSMDWIWRILFLVGAATGAHSGPQVQLQESGGGLAQAGGSLRLSCAASGRTFSMGWFRQAPGKEREFVAAITYSGGSPYYASSVRGRFTISRDNAKNTVYLQMNSLKPEDTAVYYCAANPTYGSDWNAENWGQGTQVTVSSTRASTKGPSVFPLAPSSKSTSGGTAALGCLVKDYFPEPVTVSWNSGALTSGVHTFPAVLQSSGLYSLSSVVTVPSSSLGTQTYICNVNHKPSNTKVDKRVEPKSCEVKTDSTDHVKPKETENTKQPSKSCHKPKAIVHTEKVNMMSLTVLGLRMLFAKTVAVNFLLTAKLFFL

SEQ ID NO: 15521 - protein, 757 aa, Artificial Sequence
  Synthetic Polypeptide
MALPVTALLLPLALLLHAARPGMRTEDLPKAVVFLEPQWYRVLEKDSVTLKCQGAYSPEDNSTQWFHNESLISSQASSYFIDAATVDDSGEYRCQTNLSTLSDPVQLEVHIGWLLLQAPRWVFKEEDPIHLRCHSWKNTALHKVTYLQNGKGRKYFHHNSDFYIPKATLKDSGSYFCRGLVGSKNVSSETVNITITQGLAVSTISSFFPPGYQLEGSPIKTDVITMDPKDNCSKDANDTLLLQLTNTSAYYMYLLLLLKSVVYFAIITCCLLRRTAFCCNGEKSRAKRSGSGATNFSLLKQAGDVEENPGPTSMDWIWRILFLVGAATGAHSGPQVQLQESGGGLAQAGGSLRLSCAASGRTFSMGWFRQAPGKEREFVAAITYSGGSPYYASSVRGRFTISRDNAKNTVYLQMNSLKPEDTAVYYCAANPTYGSDWNAENWGQGTQVTVSSTRGSEVKTDSTDHVKPKETENTKQPSKSCHKPKAIVHTEKVNMMSLTVLGLRMLFAKTVAVNFLLTAKLFFLRAKRSGSGVKQTLNFDLLKLAGDVESNPGPSRGHMTEYKPTVRLATRDDVPRAVRTLAAAFADYPATRHTVDPDRHIERVTELQELFLTRVGLDIGKVWVADDGAAVAVWTTPESVEAGAVFAEIGPRMAELSGSRLAAQQQMEGLLAPHRPKEPAWFLATVGVSPDHQGKGLGSAVVLPGVEAAERAGVPAFLETSAPRNLPFYERLGFTVTADVEVPEGPRTWCMTRKPGA

SEQ ID NO: 15522 - protein, 524 aa, Artificial Sequence
  Synthetic Polypeptide
MALPVTALLLPLALLLHAARPGMRTEDLPKAVVFLEPQWYRVLEKDSVTLKCQGAYSPEDNSTQWFHNESLISSQASSYFIDAATVDDSGEYRCQTNLSTLSDPVQLEVHIGWLLLQAPRWVFKEEDPIHLRCHSWKNTALHKVTYLQNGKGRKYFHHNSDFYIPKATLKDSGSYFCRGLVGSKNVSSETVNITITQGLAVSTISSFFPPGYQLEGSPIKTDVITMDPKDNCSKDANDTLLLQLTNTSAYYMYLLLLLKSVVYFAIITCCLLRRTAFCCNGEKSRAKRSGSGATNFSLLKQAGDVEENPGPTSMDWIWRILFLVGAATGAHSGPQVQLQESGGGLAQAGGSLRLSCAASGRTFSMGWFRQAPGKEREFVAAITYSGGSPYYASSVRGRFTISRDNAKNTVYLQMNSLKPEDTAVYYCAANPTYGSDWNAENWGQGTQVTVSSTRGSEVKTDSTDHVKPKETENTKQPSKSCHKPKAIVHTEKVNMMSLTVLGLRMLFAKTVAVNFLLTAKLFFL

SEQ ID NO: 15523 - protein, 766 aa, Artificial Sequence
  Synthetic Polypeptide
MALPVTALLLPLALLLHAARPGMRTEDLPKAVVFLEPQWYRVLEKDSVTLKCQGAYSPEDNSTQWFHNESLISSQASSYFIDAATVDDSGEYRCQTNLSTLSDPVQLEVHIGWLLLQAPRWVFKEEDPIHLRCHSWKNTALHKVTYLQNGKGRKYFHHNSDFYIPKATLKDSGSYFCRGLVGSKNVSSETVNITITQGLAVSTISSFFPPGYQLEDKTHTCPPCPAPIKTDVITMDPKDNCSKDANDTLLLQLTNTSAYYMYLLLLLKSVVYFAIITCCLLRRTAFCCNGEKSRAKRSGSGATNFSLLKQAGDVEENPGPTSMDWIWRILFLVGAATGAHSGPQVQLQESGGGLAQAGGSLRLSCAASGRTFSMGWFRQAPGKEREFVAAITYSGGSPYYASSVRGRFTISRDNAKNTVYLQMNSLKPEDTAVYYCAANPTYGSDWNAENWGQGTQVTVSSTRGSEVKTDSTDHVKPKETENTKQPSKSCHKPKAIVHTEKVNMMSLTVLGLRMLFAKTVAVNFLLTAKLFFLRAKRSGSGVKQTLNFDLLKLAGDVESNPGPSRGHMTEYKPTVRLATRDDVPRAVRTLAAAFADYPATRHTVDPDRHIERVTELQELFLTRVGLDIGKVWVADDGAAVAVWTTPESVEAGAVFAEIGPRMAELSGSRLAAQQQMEGLLAPHRPKEPAWFLATVGVSPDHQGKGLGSAVVLPGVEAAERAGVPAFLETSAPRNLPFYERLGFTVTADVEVPEGPRTWCMTRKPGA

SEQ ID NO: 15524 - protein, 766 aa, Artificial Sequence
  Synthetic Polypeptide
MALPVTALLLPLALLLHAARPGMRTEDLPKAVVFLEPQWYRVLEKDSVTLKCQGAYSPEDNSTQWFHNESLISSQASSYFIDAATVDDSGEYRCQTNLSTLSDPVQLEVHIGWLLLQAPRWVFKEEDPIHLRCHSWKNTALHKVTYLQNGKGRKYFHHNSDFYIPKATLKDSGSYFCRGLVGSKNVSSETVNITITQGLAVSTISSFFPPGYQLEGSPIKTDVITMDPKDNCSKDANDTLLLQLTNTSAYYMYLLLLLKSVVYFAIITCCLLRRTAFCCNGEKSRAKRSGSGATNFSLLKQAGDVEENPGPTSMDWIWRILFLVGAATGAHSGPQVQLQESGGGLAQAGGSLRLSCAASGRTFSMGWFRQAPGKEREFVAAITYSGGSPYYASSVRGRFTISRDNAKNTVYLQMNSLKPEDTAVYYCAANPTYGSDWNAENWGQGTQVTVSSTRDKTHTCPPCPAEVKTDSTDHVKPKETENTKQPSKSCHKPKAIVHTEKVNMMSLTVLGLRMLFAKTVAVNFLLTAKLFFLRAKRSGSGVKQTLNFDLLKLAGDVESNPGPSRGHMTEYKPTVRLATRDDVPRAVRTLAAAFADYPATRHTVDPDRHIERVTELQELFLTRVGLDIGKVWVADDGAAVAVWTTPESVEAGAVFAEIGPRMAELSGSRLAAQQQMEGLLAPHRPKEPAWFLATVGVSPDHQGKGLGSAVVLPGVEAAERAGVPAFLETSAPRNLPFYERLGFTVTADVEVPEGPRTWCMTRKPGA

SEQ ID NO: 15525 - protein, 775 aa, Artificial Sequence
  Synthetic Polypeptide
MALPVTALLLPLALLLHAARPGMRTEDLPKAVVFLEPQWYRVLEKDSVTLKCQGAYSPEDNSTQWFHNESLISSQASSYFIDAATVDDSGEYRCQTNLSTLSDPVQLEVHIGWLLLQAPRWVFKEEDPIHLRCHSWKNTALHKVTYLQNGKGRKYFHHNSDFYIPKATLKDSGSYFCRGLVGSKNVSSETVNITITQGLAVSTISSFFPPGYQLEDKTHTCPPCPAPIKTDVITMDPKDNCSKDANDTLLLQLTNTSAYYMYLLLLLKSVVYFAIITCCLLRRTAFCCNGEKSRAKRSGSGATNFSLLKQAGDVEENPGPTSMDWIWRILFLVGAATGAHSGPQVQLQESGGGLAQAGGSLRLSCAASGRTFSMGWFRQAPGKEREFVAAITYSGGSPYYASSVRGRFTISRDNAKNTVYLQMNSLKPEDTAVYYCAANPTYGSDWNAENWGQGTQVTVSSTRDKTHTCPPCPAEVKTDSTDHVKPKETENTKQPSKSCHKPKAIVHTEKVNMMSLTVLGLRMLFAKTVAVNFLLTAKLFFLRAKRSGSGVKQTLNFDLLKLAGDVESNPGPSRGHMTEYKPTVRLATRDDVPRAVRTLAAAFADYPATRHTVDPDRHIERVTELQELFLTRVGLDIGKVWVADDGAAVAVWTTPESVEAGAVFAEIGPRMAELSGSRLAAQQQMEGLLAPHRPKEPAWFLATVGVSPDHQGKGLGSAVVLPGVEAAERAGVPAFLETSAPRNLPFYERLGFTVTADVEVPEGPRTWCMTRKPGA

SEQ ID NO: 15526 - protein, 542 aa, Artificial Sequence
  Synthetic Polypeptide
MALPVTALLLPLALLLHAARPGMRTEDLPKAVVFLEPQWYRVLEKDSVTLKCQGAYSPEDNSTQWFHNESLISSQASSYFIDAATVDDSGEYRCQTNLSTLSDPVQLEVHIGWLLLQAPRWVFKEEDPIHLRCHSWKNTALHKVTYLQNGKGRKYFHHNSDFYIPKATLKDSGSYFCRGLVGSKNVSSETVNITITQGLAVSTISSFFPPGYQLEDKTHTCPPCPAPIKTDVITMDPKDNCSKDANDTLLLQLTNTSAYYMYLLLLLKSVVYFAIITCCLLRRTAFCCNGEKSRAKRSGSGATNFSLLKQAGDVEENPGPTSMDWIWRILFLVGAATGAHSGPQVQLQESGGGLAQAGGSLRLSCAASGRTFSMGWFRQAPGKEREFVAAITYSGGSPYYASSVRGRFTISRDNAKNTVYLQMNSLKPEDTAVYYCAANPTYGSDWNAENWGQGTQVTVSSTRDKTHTCPPCPAEVKTDSTDHVKPKETENTKQPSKSCHKPKAIVHTEKVNMMSLTVLGLRMLFAKTVAVNFLLTAKLFFL

SEQ ID NO: 15527 - protein, 533 aa, Artificial Sequence
  Synthetic Polypeptide
MALPVTALLLPLALLLHAARPGMRTEDLPKAVVFLEPQWYRVLEKDSVTLKCQGAYSPEDNSTQWFHNESLISSQASSYFIDAATVDDSGEYRCQTNLSTLSDPVQLEVHIGWLLLQAPRWVFKEEDPIHLRCHSWKNTALHKVTYLQNGKGRKYFHHNSDFYIPKATLKDSGSYFCRGLVGSKNVSSETVNITITQGLAVSTISSFFPPGYQLEGSPIKTDVITMDPKDNCSKDANDTLLLQLTNTSAYYMYLLLLLKSVVYFAIITCCLLRRTAFCCNGEKSRAKRSGSGATNFSLLKQAGDVEENPGPTSMDWIWRILFLVGAATGAHSGPQVQLQESGGGLAQAGGSLRLSCAASGRTFSMGWFRQAPGKEREFVAAITYSGGSPYYASSVRGRFTISRDNAKNTVYLQMNSLKPEDTAVYYCAANPTYGSDWNAENWGQGTQVTVSSTRDKTHTCPPCPAEVKTDSTDHVKPKETENTKQPSKSCHKPKAIVHTEKVNMMSLTVLGLRMLFAKTVAVNFLLTAKLFFL

SEQ ID NO: 15528 - protein, 749 aa, Artificial Sequence
  Synthetic Polypeptide
MALPVTALLLPLALLLHAARPGMRTEDLPKAVVFLEPQWYRVLEKDSVTLKCQGAYSPEDNSTQWFHNESLISSQASSYFIDAATVDDSGEYRCQTNLSTLSDPVQLEVHIGWLLLQAPRWVFKEEDPIHLRCHSWKNTALHKVTYLQNGKGRKYFHHNSDFYIPKATLKDSGSYFCRGLVGSKNVSSETVNITITQGLAVSTISSFFPPGYQLEGSMDPKDNCSKDANDTLLLQLTNTSAYYMYLLLLLKSVVYFAIITCCLLRRTAFCCNGEKSRAKRSGSGATNFSLLKQAGDVEENPGPTSMDWIWRILFLVGAATGAHSGPQVQLQESGGGLAQAGGSLRLSCAASGRTFSMGWFRQAPGKEREFVAAITYSGGSPYYASSVRGRFTISRDNAKNTVYLQMNSLKPEDTAVYYCAANPTYGSDWNAENWGQGTQVTVSSTRGSEVKTDSTDHVKPKETENTKQPSKSCHKPKAIVHTEKVNMMSLTVLGLRMLFAKTVAVNFLLTAKLFFLRAKRSGSGVKQTLNFDLLKLAGDVESNPGPSRGHMTEYKPTVRLATRDDVPRAVRTLAAAFADYPATRHTVDPDRHIERVTELQELFLTRVGLDIGKVWVADDGAAVAVWTTPESVEAGAVFAEIGPRMAELSGSRLAAQQQMEGLLAPHRPKEPAWFLATVGVSPDHQGKGLGSAVVLPGVEAAERAGVPAFLETSAPRNLPFYERLGFTVTADVEVPEGPRTWCMTRKPGA

SEQ ID NO: 15529 - protein, 750 aa, Artificial Sequence
  Synthetic Polypeptide
MALPVTALLLPLALLLHAARPGMRTEDLPKAVVFLEPQWYRVLEKDSVTLKCQGAYSPEDNSTQWFHNESLISSQASSYFIDAATVDDSGEYRCQTNLSTLSDPVQLEVHIGWLLLQAPRWVFKEEDPIHLRCHSWKNTALHKVTYLQNGKGRKYFHHNSDFYIPKATLKDSGSYFCRGLVGSKNVSSETVNITITQGLAVSTISSFFPPGYQLEGSPIKTDVITMDPKDNCSKDANDTLLLQLTNTSAYYMYLLLLLKSVVYFAIITCCLLRRTAFCCNGEKSRAKRSGSGATNFSLLKQAGDVEENPGPTSMDWIWRILFLVGAATGAHSGPQVQLQESGGGLAQAGGSLRLSCAASGRTFSMGWFRQAPGKEREFVAAITYSGGSPYYASSVRGRFTISRDNAKNTVYLQMNSLKPEDTAVYYCAANPTYGSDWNAENWGQGTQVTVSSTRGSDHVKPKETENTKQPSKSCHKPKAIVHTEKVNMMSLTVLGLRMLFAKTVAVNFLLTAKLFFLRAKRSGSGVKQTLNFDLLKLAGDVESNPGPSRGHMTEYKPTVRLATRDDVPRAVRTLAAAFADYPATRHTVDPDRHIERVTELQELFLTRVGLDIGKVWVADDGAAVAVWTTPESVEAGAVFAEIGPRMAELSGSRLAAQQQMEGLLAPHRPKEPAWFLATVGVSPDHQGKGLGSAVVLPGVEAAERAGVPAFLETSAPRNLPFYERLGFTVTADVEVPEGPRTWCMTRKPGA

SEQ ID NO: 15530 - protein, 742 aa, Artificial Sequence
  Synthetic Polypeptide
MALPVTALLLPLALLLHAARPGMRTEDLPKAVVFLEPQWYRVLEKDSVTLKCQGAYSPEDNSTQWFHNESLISSQASSYFIDAATVDDSGEYRCQTNLSTLSDPVQLEVHIGWLLLQAPRWVFKEEDPIHLRCHSWKNTALHKVTYLQNGKGRKYFHHNSDFYIPKATLKDSGSYFCRGLVGSKNVSSETVNITITQGLAVSTISSFFPPGYQLEGSMDPKDNCSKDANDTLLLQLTNTSAYYMYLLLLLKSVVYFAIITCCLLRRTAFCCNGEKSRAKRSGSGATNFSLLKQAGDVEENPGPTSMDWIWRILFLVGAATGAHSGPQVQLQESGGGLAQAGGSLRLSCAASGRTFSMGWFRQAPGKEREFVAAITYSGGSPYYASSVRGRFTISRDNAKNTVYLQMNSLKPEDTAVYYCAANPTYGSDWNAENWGQGTQVTVSSTRGSDHVKPKETENTKQPSKSCHKPKAIVHTEKVNMMSLTVLGLRMLFAKTVAVNFLLTAKLFFLRAKRSGSGVKQTLNFDLLKLAGDVESNPGPSRGHMTEYKPTVRLATRDDVPRAVRTLAAAFADYPATRHTVDPDRHIERVTELQELFLTRVGLDIGKVWVADDGAAVAVWTTPESVEAGAVFAEIGPRMAELSGSRLAAQQQMEGLLAPHRPKEPAWFLATVGVSPDHQGKGLGSAVVLPGVEAAERAGVPAFLETSAPRNLPFYERLGFTVTADVEVPEGPRTWCMTRKPGA

SEQ ID NO: 15531 - protein, 509 aa, Artificial Sequence
  Synthetic Polypeptide
MALPVTALLLPLALLLHAARPGMRTEDLPKAVVFLEPQWYRVLEKDSVTLKCQGAYSPEDNSTQWFHNESLISSQASSYFIDAATVDDSGEYRCQTNLSTLSDPVQLEVHIGWLLLQAPRWVFKEEDPIHLRCHSWKNTALHKVTYLQNGKGRKYFHHNSDFYIPKATLKDSGSYFCRGLVGSKNVSSETVNITITQGLAVSTISSFFPPGYQLEGSMDPKDNCSKDANDTLLLQLTNTSAYYMYLLLLLKSVVYFAIITCCLLRRTAFCCNGEKSRAKRSGSGATNFSLLKQAGDVEENPGPTSMDWIWRILFLVGAATGAHSGPQVQLQESGGGLAQAGGSLRLSCAASGRTFSMGWFRQAPGKEREFVAAITYSGGSPYYASSVRGRFTISRDNAKNTVYLQMNSLKPEDTAVYYCAANPTYGSDWNAENWGQGTQVTVSSTRGSDHVKPKETENTKQPSKSCHKPKAIVHTEKVNMMSLTVLGLRMLFAKTVAVNFLLTAKLFFL

SEQ ID NO: 15532 - protein, 751 aa, Artificial Sequence
  Synthetic Polypeptide
MALPVTALLLPLALLLHAARPGMRTEDLPKAVVFLEPQWYRVLEKDSVTLKCQGAYSPEDNSTQWFHNESLISSQASSYFIDAATVDDSGEYRCQTNLSTLSDPVQLEVHIGWLLLQAPRWVFKEEDPIHLRCHSWKNTALHKVTYLQNGKGRKYFHHNSDFYIPKATLKDSGSYFCRGLVGSKNVSSETVNITITQGLAVSTISSFFPPGYQLEDKTHTCPPCPAMDPKDNCSKDANDTLLLQLTNTSAYYMYLLLLLKSVVYFAIITCCLLRRTAFCCNGEKSRAKRSGSGATNFSLLKQAGDVEENPGPTSMDWIWRILFLVGAATGAHSGPQVQLQESGGGLAQAGGSLRLSCAASGRTFSMGWFRQAPGKEREFVAAITYSGGSPYYASSVRGRFTISRDNAKNTVYLQMNSLKPEDTAVYYCAANPTYGSDWNAENWGQGTQVTVSSTRGSDHVKPKETENTKQPSKSCHKPKAIVHTEKVNMMSLTVLGLRMLFAKTVAVNFLLTAKLFFLRAKRSGSGVKQTLNFDLLKLAGDVESNPGPSRGHMTEYKPTVRLATRDDVPRAVRTLAAAFADYPATRHTVDPDRHIERVTELQELFLTRVGLDIGKVWVADDGAAVAVWTTPESVEAGAVFAEIGPRMAELSGSRLAAQQQMEGLLAPHRPKEPAWFLATVGVSPDHQGKGLGSAVVLPGVEAAERAGVPAFLETSAPRNLPFYERLGFTVTADVEVPEGPRTWCMTRKPGA

SEQ ID NO: 15533 - protein, 760 aa, Artificial Sequence
  Synthetic Polypeptide
MALPVTALLLPLALLLHAARPGMRTEDLPKAVVFLEPQWYRVLEKDSVTLKCQGAYSPEDNSTQWFHNESLISSQASSYFIDAATVDDSGEYRCQTNLSTLSDPVQLEVHIGWLLLQAPRWVFKEEDPIHLRCHSWKNTALHKVTYLQNGKGRKYFHHNSDFYIPKATLKDSGSYFCRGLVGSKNVSSETVNITITQGLAVSTISSFFPPGYQLEDKTHTCPPCPAMDPKDNCSKDANDTLLLQLTNTSAYYMYLLLLLKSVVYFAIITCCLLRRTAFCCNGEKSRAKRSGSGATNFSLLKQAGDVEENPGPTSMDWIWRILFLVGAATGAHSGPQVQLQESGGGLAQAGGSLRLSCAASGRTFSMGWFRQAPGKEREFVAAITYSGGSPYYASSVRGRFTISRDNAKNTVYLQMNSLKPEDTAVYYCAANPTYGSDWNAENWGQGTQVTVSSTRDKTHTCPPCPADHVKPKETENTKQPSKSCHKPKAIVHTEKVNMMSLTVLGLRMLFAKTVAVNFLLTAKLFFLRAKRSGSGVKQTLNFDLLKLAGDVESNPGPSRGHMTEYKPTVRLATRDDVPRAVRTLAAAFADYPATRHTVDPDRHIERVTELQELFLTRVGLDIGKVWVADDGAAVAVWTTPESVEAGAVFAEIGPRMAELSGSRLAAQQQMEGLLAPHRPKEPAWFLATVGVSPDHQGKGLGSAVVLPGVEAAERAGVPAFLETSAPRNLPFYERLGFTVTADVEVPEGPRTWCMTRKPGA

SEQ ID NO: 15534 - protein, 527 aa, Artificial Sequence
  Synthetic Polypeptide
MALPVTALLLPLALLLHAARPGMRTEDLPKAVVFLEPQWYRVLEKDSVTLKCQGAYSPEDNSTQWFHNESLISSQASSYFIDAATVDDSGEYRCQTNLSTLSDPVQLEVHIGWLLLQAPRWVFKEEDPIHLRCHSWKNTALHKVTYLQNGKGRKYFHHNSDFYIPKATLKDSGSYFCRGLVGSKNVSSETVNITITQGLAVSTISSFFPPGYQLEDKTHTCPPCPAMDPKDNCSKDANDTLLLQLTNTSAYYMYLLLLLKSVVYFAIITCCLLRRTAFCCNGEKSRAKRSGSGATNFSLLKQAGDVEENPGPTSMDWIWRILFLVGAATGAHSGPQVQLQESGGGLAQAGGSLRLSCAASGRTFSMGWFRQAPGKEREFVAAITYSGGSPYYASSVRGRFTISRDNAKNTVYLQMNSLKPEDTAVYYCAANPTYGSDWNAENWGQGTQVTVSSTRDKTHTCPPCPADHVKPKETENTKQPSKSCHKPKAIVHTEKVNMMSLTVLGLRMLFAKTVAVNFLLTAKLFFL

SEQ ID NO: 15535 - protein, 374 aa, Artificial Sequence
  Synthetic Polypeptide
MALPVTALLLPLALLLHAARPGMRTEDLPKAVVFLEPQWYRVLEKDSVTLKCQGAYSPEDNSTQWFHNESLISSQASSYFIDAATVDDSGEYRCQTNLSTLSDPVQLEVHIGWLLLQAPRWVFKEEDPIHLRCHSWKNTALHKVTYLQNGKGRKYFHHNSDFYIPKATLKDSGSYFCRGLVGSKNVSSETVNITITQGLAVSTISSFFPPGYQLEGQPKANPTVTLFPPSSEELQANKATLVCLISDFYPGAVTVAWKADGSPVKAGVETTKPSKQSNNKYAASSYLSLTPEQWKSHRSYSCQVTHEGSTVEKTVAPTECSGRADCGFTSESYQQGVLSATILYEILLGKATLYAVLVSALVLMAMVKRKDSRG

SEQ ID NO: 15536 - protein, 304 aa, Artificial Sequence; identical to SEQ ID NO: 14901
  Synthetic Polypeptide

SEQ ID NO: 15537 - protein, 388 aa, Artificial Sequence
  Synthetic Polypeptide
MALPVTALLLPLALLLHAARPGMRTEDLPKAVVFLEPQWYRVLEKDSVTLKCQGAYSPEDNSTQWFHNESLISSQASSYFIDAATVDDSGEYRCQTNLSTLSDPVQLEVHIGWLLLQAPRWVFKEEDPIHLRCHSWKNTALHKVTYLQNGKGRKYFHHNSDFYIPKATLKDSGSYFCRGLVGSKNVSSETVNITITQGLAVSTISSFFPPGYQLEGQPKANPTVTLFPPSSEELQANKATLVCLISDFYPGAVTVAWKADGSPVKAGVETTKPSKQSNNKYAASSYLSLTPEQWKSHRSYSCQVTHEGSTVEKTVAPTECSPIKTDVITMDPKDNCSKDANDTLLLQLTNTSAYYMYLLLLLKSVVYFAIITCCLLRRTAFCCNGEKS

SEQ ID NO: 15538 - protein, 312 aa, Artificial Sequence; identical to SEQ ID NO: 14903
  Synthetic Polypeptide

SEQ ID NO: 15539 - protein, 714 aa, Artificial Sequence
  Synthetic Polypeptide
MDWIWRILFLVGAATGAHSGPGMRTEDLPKAVVFLEPQWYRVLEKDSVTLKCQGAYSPEDNSTQWFHNESLISSQASSYFIDAATVDDSGEYRCQTNLSTLSDPVQLEVHIGWLLLQAPRWVFKEEDPIHLRCHSWKNTALHKVTYLQNGKGRKYFHHNSDFYIPKATLKDSGSYFCRGLVGSKNVSSETVNITITQGLAVSTISSFFPPGYQGSGGGGSGGGGSGGGGSFEQVQLQQPGAELVKPGASVKMSCKASGYAFSSYWINWMKQKPGQGLEWIGQIYPGDGDTNYNGKFKGRATLTADTSSSTAYMQLSSLTSEDSAVYFCARSITTVVGCAMDYWGQGTSVTVSSGGGGSGGGGSGGGGSDIQMTQSPSSLSASVGDRVTITCKASDHINNWLAWYQQKPGQAPKLLIYGATTLETGVPSRFSGSGSGTDYTLTISSLQPEDFATYYCQQSWNTPWTFGQGTKLEIKRTREQKLISEEDLAKPTTTPAPRPPTPAPTIASQPLSLRPEACRPAAGGAVHTRGLDFACDIYIWAPLAGTCGVLLLSLVITLYCKRGRKKLLYIFKQPFMRPVQTTQEEDGCSCRFPEEEEGGCELRVKFSRSADAPAYQQGQNQLYNELNLGRREEYDVLDKRRGRDPEMGGKPRRKNPQEGLYNELQKDKMAEAYSEIGMKGERRRGKGHDGLYQGLSTATKDTYDALHMQALPPR

SEQ ID NO: 15540 - protein, 1067 aa, Artificial Sequence
  Synthetic Polypeptide
MALPVTALLLPLALLLHAARPDIQMTQSPSSLSASVGDRVTITCKASDHINNWLAWYQQKPGQAPKLLIYGATTLETGVPSRFSGSGSGTDYTLTISSLQPEDFATYYCQQSWNTPWTFGQGTKLEIKRLEIQNPDPAVYQLRDSKSSDKSVCLFTDFDSQTNVSQSKDSDVYITDKCVLDMRSMDFKSNSAVAWSNKSDFACANAFNNSIIPEDTFFPSSDVPCDVKLVEKSFETDTNLNFQNLSVIGFRILLLKVAGFNLLMTLRLWSSRAKRSGSGVKQTLNFDLLKLAGDVESNPGPTSMDWIWRILFLVGAATGAHSGPGMRTEDLPKAVVFLEPQWYRVLEKDSVTLKCQGAYSPEDNSTQWFHNESLISSQASSYFIDAATVDDSGEYRCQTNLSTLSDPVQLEVHIGWLLLQAPRWVFKEEDPIHLRCHSWKNTALHKVTYLQNGKGRKYFHHNSDFYIPKATLKDSGSYFCRGLVGSKNVSSETVNITITQGLAVSTISSFFPPGYQGSGGGGSGGGGSGGGGSFEQVQLQQPGAELVKPGASVKMSCKASGYAFSSYWINWMKQKPGQGLEWIGQIYPGDGDTNYNGKFKGRATLTADTSSSTAYMQLSSLTSEDSAVYFCARSITTVVGCAMDYWGQGTSVTVSSTREDLKNVFPPEVAVFEPSKAEIAHTQKATLVCLATGFYPDHVELSWWVNGKEVHSGVCTDPQPLKEQPALNDSRYCLSSRLRVSATFWQNPRNHFRCQVQFYGLSENDEWTQDRAKPVTQIVSAEAWGRADCGITSASYHQGVLSATILYEILLGKATLYAVLVSALVLMAMVKRKDSRGRAKRSGSGATNFSLLKQAGDVEENPGPSRGHMTEYKPTVRLATRDDVPRAVRTLAAAFADYPATRHTVDPDRHIERVTELQELFLTRVGLDIGKVWVADDGAAVAVWTTPESVEAGAVFAEIGPRMAELSGSRLAAQQQMEGLLAPHRPKEPAWFLATVGVSPDHQGKGLGSAVVLPGVEAAERAGVPAFLETSAPRNLPFYERLGFTVTADVEVPEGPRTWCMTRKPGA

SEQ ID NO: 15541 - protein, 1066 aa, Artificial Sequence
  Synthetic Polypeptide
MALPVTALLLPLALLLHAARPDIQMTQSPSSLSASVGDRVTITCKASDHINNWLAWYQQKPGQAPKLLIYGATTLETGVPSRFSGSGSGTDYTLTISSLQPEDFATYYCQQSWNTPWTFGQGTKLEIKRLEDLKNVFPPEVAVFEPSKAEIAHTQKATLVCLATGFYPDHVELSWWVNGKEVHSGVCTDPQPLKEQPALNDSRYCLSSRLRVSATFWQNPRNHFRCQVQFYGLSENDEWTQDRAKPVTQIVSAEAWGRADCGITSASYHQGVLSATILYEILLGKATLYAVLVSALVLMAMVKRKDSRGRAKRSGSGATNFSLLKQAGDVEENPGPTSMDWIWRILFLVGAATGAHSGPGMRTEDLPKAVVFLEPQWYRVLEKDSVTLKCQGAYSPEDNSTQWFHNESLISSQASSYFIDAATVDDSGEYRCQTNLSTLSDPVQLEVHIGWLLLQAPRWVFKEEDPIHLRCHSWKNTALHKVTYLQNGKGRKYFHHNSDFYIPKATLKDSGSYFCRGLVGSKNVSSETVNITITQGLAVSTISSFFPPGYQGSGGGGSGGGGSGGGGSFEQVQLQQPGAELVKPGASVKMSCKASGYAFSSYWINWMKQKPGQGLEWIGQIYPGDGDTNYNGKFKGRATLTADTSSSTAYMQLSSLTSEDSAVYFCARSITTVVGCAMDYWGQGTSVTVSSTRIQNPDPAVYQLRDSKSSDKSVCLFTDFDSQTNVSQSKDSDVYITDKCVLDMRSMDFKSNSAVAWSNKSDFACANAFNNSIIPEDTFFPSSDVPCDVKLVEKSFETDTNLNFQNLSVIGFRILLLKVAGFNLLMTLRLWSSRAKRSGSGVKQTLNFDLLKLAGDVESNPGPSRGHMTEYKPTVRLATRDDVPRAVRTLAAAFADYPATRHTVDPDRHIERVTELQELFLTRVGLDIGKVWVADDGAAVAVWTTPESVEAGAVFAEIGPRMAELSGSRLAAQQQMEGLLAPHRPKEPAWFLATVGVSPDHQGKGLGSAVVLPGVEAAERAGVPAFLETSAPRNLPFYERLGFTVTADVEVPEGPRTWCMTRKPGA

SEQ ID NO: 15542 - protein, 1066 aa, Artificial Sequence
  Synthetic Polypeptide
MALPVTALLLPLALLLHAARPDIQMTQSPSSLSASVGDRVTITCKASDHINNWLAWYQQKPGQAPKLLIYGATTLETGVPSRFSGSGSGTDYTLTISSLQPEDFATYYCQQSWNTPWTFGQGTKLEIKRLEDLKNVFPPEVAVFEPSEAEISHTQKATLVCLATGFYPDHVELSWWVNGKEVHSGVCTDPQPLKEQPALNDSRYCLSSRLRVSATFWQNPRNHFRCQVQFYGLSENDEWTQDRAKPVTQIVSAEAWGRADCGFTSESYQQGVLSATILYEILLGKATLYAVLVSALVLMAMVKRKDSRGRAKRSGSGATNFSLLKQAGDVEENPGPTSMDWIWRILFLVGAATGAHSGPGMRTEDLPKAVVFLEPQWYRVLEKDSVTLKCQGAYSPEDNSTQWFHNESLISSQASSYFIDAATVDDSGEYRCQTNLSTLSDPVQLEVHIGWLLLQAPRWVFKEEDPIHLRCHSWKNTALHKVTYLQNGKGRKYFHHNSDFYIPKATLKDSGSYFCRGLVGSKNVSSETVNITITQGLAVSTISSFFPPGYQGSGGGGSGGGGSGGGGSFEQVQLQQPGAELVKPGASVKMSCKASGYAFSSYWINWMKQKPGQGLEWIGQIYPGDGDTNYNGKFKGRATLTADTSSSTAYMQLSSLTSEDSAVYFCARSITTVVGCAMDYWGQGTSVTVSSTRIQNPDPAVYQLRDSKSSDKSVCLFTDFDSQTNVSQSKDSDVYITDKCVLDMRSMDFKSNSAVAWSNKSDFACANAFNNSIIPEDTFFPSPESSCDVKLVEKSFETDTNLNFQNLSVIGFRILLLKVAGFNLLMTLRLWSSRAKRSGSGVKQTLNFDLLKLAGDVESNPGPSRGHMTEYKPTVRLATRDDVPRAVRTLAAAFADYPATRHTVDPDRHIERVTELQELFLTRVGLDIGKVWVADDGAAVAVWTTPESVEAGAVFAEIGPRMAELSGSRLAAQQQMEGLLAPHRPKEPAWFLATVGVSPDHQGKGLGSAVVLPGVEAAERAGVPAFLETSAPRNLPFYERLGFTVTADVEVPEGPRTWCMTRKPGA

SEQ ID NO: 15543 - protein, 833 aa, Artificial Sequence
  Synthetic Polypeptide
MALPVTALLLPLALLLHAARPDIQMTQSPSSLSASVGDRVTITCKASDHINNWLAWYQQKPGQAPKLLIYGATTLETGVPSRFSGSGSGTDYTLTISSLQPEDFATYYCQQSWNTPWTFGQGTKLEIKRLEDLKNVFPPEVAVFEPSEAEISHTQKATLVCLATGFYPDHVELSWWVNGKEVHSGVCTDPQPLKEQPALNDSRYCLSSRLRVSATFWQNPRNHFRCQVQFYGLSENDEWTQDRAKPVTQIVSAEAWGRADCGFTSESYQQGVLSATILYEILLGKATLYAVLVSALVLMAMVKRKDSRGRAKRSGSGATNFSLLKQAGDVEENPGPTSMDWIWRILFLVGAATGAHSGPGMRTEDLPKAVVFLEPQWYRVLEKDSVTLKCQGAYSPEDNSTQWFHNESLISSQASSYFIDAATVDDSGEYRCQTNLSTLSDPVQLEVHIGWLLLQAPRWVFKEEDPIHLRCHSWKNTALHKVTYLQNGKGRKYFHHNSDFYIPKATLKDSGSYFCRGLVGSKNVSSETVNITITQGLAVSTISSFFPPGYQGSGGGGSGGGGSGGGGSFEQVQLQQPGAELVKPGASVKMSCKASGYAFSSYWINWMKQKPGQGLEWIGQIYPGDGDTNYNGKFKGRATLTADTSSSTAYMQLSSLTSEDSAVYFCARSITTVVGCAMDYWGQGTSVTVSSTRIQNPDPAVYQLRDSKSSDKSVCLFTDFDSQTNVSQSKDSDVYITDKCVLDMRSMDFKSNSAVAWSNKSDFACANAFNNSIIPEDTFFPSPESSCDVKLVEKSFETDTNLNFQNLSVIGFRILLLKVAGFNLLMTLRLWSS

SEQ ID NO: 15544 - protein, 1058 aa, Artificial Sequence
  Synthetic Polypeptide
MALPVTALLLPLALLLHAARPDIQMTQSPSSLSASVGDRVTITCKASDHINNWLAWYQQKPGQAPKLLIYGATTLETGVPSRFSGSGSGTDYTLTISSLQPEDFATYYCQQSWNTPWTFGQGTKLEIKRLEDLKNVFPPEVAVFEPSEAEISHTQKATLVCLATGFYPDHVELSWWVNGKEVHSGVCTDPQPLKEQPALNDSRYCLSSRLRVSATFWQNPRNHFRCQVQFYGLSENDEWTQDRAKPVTQIVSAEAWGRADCGFTSESYQQGVLSATILYEILLGKATLYAVLVSALVLMAMVKRKDSRGRAKRSGSGATNFSLLKQAGDVEENPGPTSMDWIWRILFLVGAATGAHSGPGMRTEDLPKAVVFLEPQWYRVLEKDSVTLKCQGAYSPEDNSTQWFHNESLISSQASSYFIDAATVDDSGEYRCQTNLSTLSDPVQLEVHIGWLLLQAPRWVFKEEDPIHLRCHSWKNTALHKVTYLQNGKGRKYFHHNSDFYIPKATLKDSGSYFCRGLVGSKNVSSETVNITITQGLAVSTISSFFPPGYQGSGGGGSGGGGSGGGGSFEQVQLQQPGAELVKPGASVKMSCKASGYAFSSYWINWMKQKPGQGLEWIGQIYPGDGDTNYNGKFKGRATLTADTSSSTAYMQLSSLTSEDSAVYFCARSITTVVGCAMDYWGQGTSVTVSSTRIQNPDPAVYQLRDSKSSDKSVCLFTDFDSQTNVSQSKDSDVYITDKCVLDMRSMDFKSNSAVAWSNKSDFACANAFNNSIIPEDTFFPSPESSCDVKLVEKSFETDTNLNFQNLSVIGFRILLLKVAGFNLLMTLRLWSSRAKRSGSGVKQTLNFDLLKLAGDVESNPGPSRGGIHTMATYEVLCEVARKLGTDDREVVLFLLNVFIPQPTLAQLIGALRALKEEGRLTFPLLAECLFRAGRRDLLRDLLHLDPRFLERHLAGTMSYFSPYQLTVLHVDGELCARDIRSLIFLSKDTIGSRSTPQTFLHWVYCMENLDLLGPTDVDALMSMLRSLSRVDLQRQVQTLMGLHLSGPSHSQHYRHTP

SEQ ID NO: 15545 - protein, 837 aa, Artificial Sequence
  Synthetic Polypeptide
MALPVTALLLPLALLLHAARPDIQMTQSPSSLSASVGDRVTITCKASDHINNWLAWYQQKPGQAPKLLIYGATTLETGVPSRFSGSGSGTDYTLTISSLQPEDFATYYCQQSWNTPWTFGQGTKLEIKRLEIQNPDPAVYQLRDSKSSDKSVCLFTDFDSQTNVSQSKDSDVYITDKCVLDMRSMDFKSNSAVAWSNKSDFACANAFNNSIIPEDTFFPSPESSCDVKLVEKSFETDTNLNFQNLSVIGFRILLLKVAGFNLLMTLRLWSSRAKRSGSGVKQTLNFDLLKLAGDVESNPGPTSMDWIWRILFLVGAATGAHSGPGMRTEDLPKAVVFLEPQWYRVLEKDSVTLKCQGAYSPEDNSTQWFHNESLISSQASSYFIDAATVDDSGEYRCQTNLSTLSDPVQLEVHIGWLLLQAPRWVFKEEDPIHLRCHSWKNTALHKVTYLQNGKGRKYFHHNSDFYIPKATLKDSGSYFCRGLVGSKNVSSETVNITITQGLAVSTISSFFPPGYQGSGGGGSGGGGSGGGGSFEQVQLQQPGAELVKPGASVKMSCKASGYAFSSYWINWMKQKPGQGLEWIGQIYPGDGDTNYNGKFKGRATLTADTSSSTAYMQLSSLTSEDSAVYFCARSITTVVGCAMDYWGQGTSVTVSSTREDLKNVFPPEVAVFEPSEAEISHTQKATLVCLATGFYPDHVELSWWVNGKEVHSGVCTDPQPLKEQPALNDSRYCLSSRLRVSATFWQNPRNHFRCQVQFYGLSENDEWTQDRAKPVTQIVSAEAWGRADCGFTSESYQQGVLSATILYEILLGKATLYAVLVSALVLMAMVKRKDSRG

SEQ ID NO: 15546 - protein, 1059 aa, Artificial Sequence
  Synthetic Polypeptide
MALPVTALLLPLALLLHAARPDIQMTQSPSSLSASVGDRVTITCKASDHINNWLAWYQQKPGQAPKLLIYGATTLETGVPSRFSGSGSGTDYTLTISSLQPEDFATYYCQQSWNTPWTFGQGTKLEIKRLEIQNPDPAVYQLRDSKSSDKSVCLFTDFDSQTNVSQSKDSDVYITDKCVLDMRSMDFKSNSAVAWSNKSDFACANAFNNSIIPEDTFFPSPESSCDVKLVEKSFETDTNLNFQNLSVIGFRILLLKVAGFNLLMTLRLWSSRAKRSGSGVKQTLNFDLLKLAGDVESNPGPTSMDWIWRILFLVGAATGAHSGPGMRTEDLPKAVVFLEPQWYRVLEKDSVTLKCQGAYSPEDNSTQWFHNESLISSQASSYFIDAATVDDSGEYRCQTNLSTLSDPVQLEVHIGWLLLQAPRWVFKEEDPIHLRCHSWKNTALHKVTYLQNGKGRKYFHHNSDFYIPKATLKDSGSYFCRGLVGSKNVSSETVNITITQGLAVSTISSFFPPGYQGSGGGGSGGGGSGGGGSFEQVQLQQPGAELVKPGASVKMSCKASGYAFSSYWINWMKQKPGQGLEWIGQIYPGDGDTNYNGKFKGRATLTADTSSSTAYMQLSSLTSEDSAVYFCARSITTVVGCAMDYWGQGTSVTVSSTREDLKNVFPPEVAVFEPSEAEISHTQKATLVCLATGFYPDHVELSWWVNGKEVHSGVCTDPQPLKEQPALNDSRYCLSSRLRVSATFWQNPRNHFRCQVQFYGLSENDEWTQDRAKPVTQIVSAEAWGRADCGFTSESYQQGVLSATILYEILLGKATLYAVLVSALVLMAMVKRKDSRGRAKRSGSGATNFSLLKQAGDVEENPGPSRGGIHTMATYEVLCEVARKLGTDDREVVLFLLNVFIPQPTLAQLIGALRALKEEGRLTFPLLAECLFRAGRRDLLRDLLHLDPRFLERHLAGTMSYFSPYQLTVLHVDGELCARDIRSLIFLSKDTIGSRSTPQTFLHWVYCMENLDLLGPTDVDALMSMLRSLSRVDLQRQVQTLMGLHLSGPSHSQHYRHTP

SEQ ID NO: 15547 - protein, 1066 aa, Artificial Sequence
  Synthetic Polypeptide
MALPVTALLLPLALLLHAARPDIQMTQSPSSLSASVGDRVTITCKASDHINNWLAWYQQKPGQAPKLLIYGATTLETGVPSRFSGSGSGTDYTLTISSLQPEDFATYYCQQSWNTPWTFGQGTKLEIKRLEDLKNVFPPEVAVFEPSEAEISHTQKATLVCLATGFYPDHVELSWWVNGKEVHSGVSTDPQPLKEQPALNDSRYCLSSRLRVSATFWQNPRNHFRCQVQFYGLSENDEWTQDRAKPVTQIVSAEAWGRADCGFTSESYQQGVLSATILYEILLGKATLYAVLVSALVLMAMVKRKDSRGRAKRSGSGATNFSLLKQAGDVEENPGPTSMDWIWRILFLVGAATGAHSGPGMRTEDLPKAVVFLEPQWYRVLEKDSVTLKCQGAYSPEDNSTQWFHNESLISSQASSYFIDAATVDDSGEYRCQTNLSTLSDPVQLEVHIGWLLLQAPRWVFKEEDPIHLRCHSWKNTALHKVTYLQNGKGRKYFHHNSDFYIPKATLKDSGSYFCRGLVGSKNVSSETVNITITQGLAVSTISSFFPPGYQGSGGGGSGGGGSGGGGSFEQVQLQQPGAELVKPGASVKMSCKASGYAFSSYWINWMKQKPGQGLEWIGQIYPGDGDTNYNGKFKGRATLTADTSSSTAYMQLSSLTSEDSAVYFCARSITTVVGCAMDYWGQGTSVTVSSTRIQNPDPAVYQLRDSKSSDKSVCLFTDFDSQTNVSQSKDSDVYITDKTVLDMRSMDFKSNSAVAWSNKSDFACANAFNNSIIPEDTFFPSPESSCDVKLVEKSFETDTNLNFQNLSVIGFRILLLKVAGFNLLMTLRLWSSRAKRSGSGVKQTLNFDLLKLAGDVESNPGPSRGHMTEYKPTVRLATRDDVPRAVRTLAAAFADYPATRHTVDPDRHIERVTELQELFLTRVGLDIGKVWVADDGAAVAVWTTPESVEAGAVFAEIGPRMAELSGSRLAAQQQMEGLLAPHRPKEPAWFLATVGVSPDHQGKGLGSAVVLPGVEAAERAGVPAFLETSAPRNLPFYERLGFTVTADVEVPEGPRTWCMTRKPGA

SEQ ID NO: 15548 - protein, 1148 aa, Artificial Sequence
  Synthetic Polypeptide
MALPVTALLLPLALLLHAARPDIQMTQSPSSLSASVGDRVTITCKASDHINNWLAWYQQKPGQAPKLLIYGATTLETGVPSRFSGSGSGTDYTLTISSLQPEDFATYYCQQSWNTPWTFGQGTKLEIKRLEDLKNVFPPEVAVFEPSEAEISHTQKATLVCLATGFYPDHVELSWWVNGKEVHSGVSTDPQPLKEQPALNDSRYCLSSRLRVSATFWQNPRNHFRCQVQFYGLSENDEWTQDRAKPVTQIVSAEAWGRADCGFTSESYQQGVLSATILYEILLGKATLYAVLVSALVLMAMVKRKDSRGRAKRSGSGATNFSLLKQAGDVEENPGPTSMDWIWRILFLVGAATGAHSGPGMRTEDLPKAVVFLEPQWYRVLEKDSVTLKCQGAYSPEDNSTQWFHNESLISSQASSYFIDAATVDDSGEYRCQTNLSTLSDPVQLEVHIGWLLLQAPRWVFKEEDPIHLRCHSWKNTALHKVTYLQNGKGRKYFHHNSDFYIPKATLKDSGSYFCRGLVGSKNVSSETVNITITQGLAVSTISSFFPPGYQGSGGGGSGGGGSGGGGSFEQVQLQQPGAELVKPGASVKMSCKASGYAFSSYWINWMKQKPGQGLEWIGQIYPGDGDTNYNGKFKGRATLTADTSSSTAYMQLSSLTSEDSAVYFCARSITTVVGCAMDYWGQGTSVTVSSTREQKLISEEDGSGTPFPSLAPPIMLLVDGKQQMVVVCLVLDVAPPGLDSPIWFSAGNGSALDAFTYGPSPATDGTWTNLAHLSLPSEELASWEPLVCHTGPGAEGHSRSTQPMHLSGEASTARTCPQEPLRGTPGGALWLGVLRLLLFKLLLFDLLLTCSCLCDPAGPLPSPATTTRLRALGSHRLHPATETGGREATSSPRPQPRDRRWGDTPPGRKPGSPVRAKRSGSGVKQTLNFDLLKLAGDVESNPGPSRGHMTEYKPTVRLATRDDVPRAVRTLAAAFADYPATRHTVDPDRHIERVTELQELFLTRVGLDIGKVWVADDGAAVAVWTTPESVEAGAVFAEIGPRMAELSGSRLAAQQQMEGLLAPHRPKEPAWFLATVGVSPDHQGKGLGSAVVLPGVEAAERAGVPAFLETSAPRNLPFYERLGFTVTADVEVPEGPRTWCMTRKPGA

SEQ ID NO: 15549 - protein, 1103 aa, Artificial Sequence
  Synthetic Polypeptide
MALPVTALLLPLALLLHAARPDIQMTQSPSSLSASVGDRVTITCKASDHINNWLAWYQQKPGQAPKLLIYGATTLETGVPSRFSGSGSGTDYTLTISSLQPEDFATYYCQQSWNTPWTFGQGTKLEIKRLEGKPIPNPLLGLDSTGSGDKQLDADVSPKPTIFLPSIAETKLQKAGTYLCLLEKFFPDVIKIHWQEKKSNTILGSQEGNTMKTNDTYMKFSWLTVPEKSLDKEHRCIVRHENNKNGVDQEIIFPPIKTDVITMDPKDNCSKDANDTLLLQLTNTSAYYMYLLLLLKSVVYFAIITCCLLRRTAFCCNGEKSRAKRSGSGATNFSLLKQAGDVEENPGPTSMDWIWRILFLVGAATGAHSGPGMRTEDLPKAVVFLEPQWYRVLEKDSVTLKCQGAYSPEDNSTQWFHNESLISSQASSYFIDAATVDDSGEYRCQTNLSTLSDPVQLEVHIGWLLLQAPRWVFKEEDPIHLRCHSWKNTALHKVTYLQNGKGRKYFHHNSDFYIPKATLKDSGSYFCRGLVGSKNVSSETVNITITQGLAVSTISSFFPPGYQGSGGGGSGGGGSGGGGSFEQVQLQQPGAELVKPGASVKMSCKASGYAFSSYWINWMKQKPGQGLEWIGQIYPGDGDTNYNGKFKGRATLTADTSSSTAYMQLSSLTSEDSAVYFCARSITTVVGCAMDYWGQGTSVTVSSTREQKLISEEDGSGSQPHTKPSVFVMKNGTNVACLVKEFYPKDIRINLVSSKKITEFDPAIVISPSGKYNAVKLGKYEDSNSVTCSVQHDNKTVHSTDFEVKTDSTDHVKPKETENTKQPSKSCHKPKAIVHTEKVNMMSLTVLGLRMLFAKTVAVNFLLTAKLFFLRAKRSGSGVKQTLNFDLLKLAGDVESNPGPSRGHMTEYKPTVRLATRDDVPRAVRTLAAAFADYPATRHTVDPDRHIERVTELQELFLTRVGLDIGKVWVADDGAAVAVWTTPESVEAGAVFAEIGPRMAELSGSRLAAQQQMEGLLAPHRPKEPAWFLATVGVSPDHQGKGLGSAVVLPGVEAAERAGVPAFLETSAPRNLPFYERLGFTVTADVEVPEGPRTWCMTRKPGA

SEQ ID NO: 15550 - protein, 841 aa, Artificial Sequence
  Synthetic Polypeptide
MALPVTALLLPLALLLHAARPDIQMTQSPSSLSASVGDRVTITCKASDHINNWLAWYQQKPGQAPKLLIYGATTLETGVPSRFSGSGSGTDYTLTISSLQPEDFATYYCQQSWNTPWTFGQGTKLEIKRLESQPHTKPSVFVMKNGTNVACLVKEFYPKDIRINLVSSKKITEFDPAIVISPSGKYNAVKLGKYEDSNSVTCSVQHDNKTVHSTDFEVKTDSTDHVKPKETENTKQPSKSCHKPKAIVHTEKVNMMSLTVLGLRMLFAKTVAVNFLLTAKLFFLRAKRSGSGATNFSLLKQAGDVEENPGPTSMDWIWRILFLVGAATGAHSGPGMRTEDLPKAVVFLEPQWYRVLEKDSVTLKCQGAYSPEDNSTQWFHNESLISSQASSYFIDAATVDDSGEYRCQTNLSTLSDPVQLEVHIGWLLLQAPRWVFKEEDPIHLRCHSWKNTALHKVTYLQNGKGRKYFHHNSDFYIPKATLKDSGSYFCRGLVGSKNVSSETVNITITQGLAVSTISSFFPPGYQGSGGGGSGGGGSGGGGSFEQVQLQQPGAELVKPGASVKMSCKASGYAFSSYWINWMKQKPGQGLEWIGQIYPGDGDTNYNGKFKGRATLTADTSSSTAYMQLSSLTSEDSAVYFCARSITTVVGCAMDYWGQGTSVTVSSTRDKQLDADVSPKPTIFLPSIAETKLQKAGTYLCLLEKFFPDVIKIHWQEKKSNTILGSQEGNTMKTNDTYMKFSWLTVPEKSLDKEHRCIVRHENNKNGVDQEIIFPPIKTDVITMDPKDNCSKDANDTLLLQLTNTSAYYMYLLLLLKSVVYFAIITCCLLRRTAFCCNGEKS

SEQ ID NO: 15551 - protein, 1243 aa, Artificial Sequence
  Synthetic Polypeptide
MALPVTALLLPLALLLHAARPDIQMTQSPSSLSASVGDRVTITCKASDHINNWLAWYQQKPGQAPKLLIYGATTLETGVPSRFSGSGSGTDYTLTISSLQPEDFATYYCQQSWNTPWTFGQGTKLEIKRGQPKANPTVTLFPPSSEELQANKATLVCLISDFYPGAVTVAWKADGSPVKAGVETTKPSKQSNNKYAASSYLSLTPEQWKSHRSYSCQVTHEGSTVEKTVAPTECSGSQSFGLLDPKLCYLLDGILFIYGVILTALFLRVKFSRSADAPAYQQGQNQLYNELNLGRREEYDVLDKRRGRDPEMGGKPQRRKNPQEGLYNELQKDKMAEAYSEIGMKGERRRGKGHDGLYQGLSTATKDTYDALHMQALPPRRAKRSGSGATNFSLLKQAGDVEENPGPTSMDWIWRILFLVGAATGAHSGPGMRTEDLPKAVVFLEPQWYRVLEKDSVTLKCQGAYSPEDNSTQWFHNESLISSQASSYFIDAATVDDSGEYRCQTNLSTLSDPVQLEVHIGWLLLQAPRWVFKEEDPIHLRCHSWKNTALHKVTYLQNGKGRKYFHHNSDFYIPKATLKDSGSYFCRGLVGSKNVSSETVNITITQGLAVSTISSFFPPGYQGSGGGGSGGGGSGGGGSFEQVQLQQPGAELVKPGASVKMSCKASGYAFSSYWINWMKQKPGQGLEWIGQIYPGDGDTNYNGKFKGRATLTADTSSSTAYMQLSSLTSEDSAVYFCARSITTVVGCAMDYWGQGTSVTVSSASTKGPSVFPLAPSSKSTSGGTAALGCLVKDYFPEPVTVSWNSGALTSGVHTFPAVLQSSGLYSLSSVVTVPSSSLGTQTYICNVNHKPSNTKVDKRVEPKSCGTQSFGLLDPKLCYLLDGILFIYGVILTALFLRVKFSRSADAPAYQQGQNQLYNELNLGRREEYDVLDKRRGRDPEMGGKPQRRKNPQEGLYNELQKDKMAEAYSEIGMKGERRRGKGHDGLYQGLSTATKDTYDALHMQALPPRRAKRSGSGVKQTLNFDLLKLAGDVESNPGPSRGHMTEYKPTVRLATRDDVPRAVRTLAAAFADYPATRHTVDPDRHIERVTELQELFLTRVGLDIGKVWVADDGAAVAVWTTPESVEAGAVFAEIGPRMAELSGSRLAAQQQMEGLLAPHRPKEPAWFLATVGVSPDHQGKGLGSAVVLPGVEAAERAGVPAFLETSAPRNLPFYERLGFTVTADVEVPEGPRTWCMTRKPGA

SEQ ID NO: 15552 - protein, 1029 aa, Artificial Sequence
  Synthetic Polypeptide
MALPVTALLLPLALLLHAARPDIQMTQSPSSLSASVGDRVTITCKASDHINNWLAWYQQKPGQAPKLLIYGATTLETGVPSRFSGSGSGTDYTLTISSLQPEDFATYYCQQSWNTPWTFGQGTKLEIKRLEDLKNVFPPEVAVFEPSEAEISHTQKATLVCLATGFYPDHVELSWWVNGKEVHSGVSTDPQPLKEQPALNDSRYCLSSRLRVSATFWQNPRNHFRCQVQFYGLSENDEWTQDRAKPVTQIVSAEAWGRADCGSQSFGLLDPKLCYLLDGILFIYGVILTALFLRVKFSRSADAPAYQQGQNQLYNELNLGRREEYDVLDKRRGRDPEMGGKPQRRKNPQEGLYNELQKDKMAEAYSEIGMKGERRRGKGHDGLYQGLSTATKDTYDALHMQALPPRRAKRSGSGATNFSLLKQAGDVEENPGPTSMDWIWRILFLVGAATGAHSGPGMRTEDLPKAVVFLEPQWYRVLEKDSVTLKCQGAYSPEDNSTQWFHNESLISSQASSYFIDAATVDDSGEYRCQTNLSTLSDPVQLEVHIGWLLLQAPRWVFKEEDPIHLRCHSWKNTALHKVTYLQNGKGRKYFHHNSDFYIPKATLKDSGSYFCRGLVGSKNVSSETVNITITQGLAVSTISSFFPPGYQGSGGGGSGGGGSGGGGSFEQVQLQQPGAELVKPGASVKMSCKASGYAFSSYWINWMKQKPGQGLEWIGQIYPGDGDTNYNGKFKGRATLTADTSSSTAYMQLSSLTSEDSAVYFCARSITTVVGCAMDYWGQGTSVTVSSTRIQNPDPAVYQLRDSKSSDKSVCLFTDFDSQTNVSQSKDSDVYITDKTVLDMRSMDFKSNSAVAWSNKSDFACANAFNNSIIPEDTFFPSPESSCGTQSFGLLDPKLCYLLDGILFIYGVILTALFLRVKFSRSADAPAYQQGQNQLYNELNLGRREEYDVLDKRRGRDPEMGGKPQRRKNPQEGLYNELQKDKMAEAYSEIGMKGERRRGKGHDGLYQGLSTATKDTYDALHMQALPPR

SEQ ID NO: 15553 - protein, 1029 aa, Artificial Sequence
  Synthetic Polypeptide
MALPVTALLLPLALLLHAARPDIQMTQSPSSLSASVGDRVTITCKASDHINNWLAWYQQKPGQAPKLLIYGATTLETGVPSRFSGSGSGTDYTLTISSLQPEDFATYYCQQSWNTPWTFGQGTKLEIKRLEDLKNVFPPEVAVFEPSKAEIAHTQKATLVCLATGFYPDHVELSWWVNGKEVHSGVCTDPQPLKEQPALNDSRYCLSSRLRVSATFWQNPRNHFRCQVQFYGLSENDEWTQDRAKPVTQIVSAEAWGRADCGSQSFGLLDPKLCYLLDGILFIYGVILTALFLRVKFSRSADAPAYQQGQNQLYNELNLGRREEYDVLDKRRGRDPEMGGKPQRRKNPQEGLYNELQKDKMAEAYSEIGMKGERRRGKGHDGLYQGLSTATKDTYDALHMQALPPRRAKRSGSGATNFSLLKQAGDVEENPGPTSMDWIWRILFLVGAATGAHSGPGMRTEDLPKAVVFLEPQWYRVLEKDSVTLKCQGAYSPEDNSTQWFHNESLISSQASSYFIDAATVDDSGEYRCQTNLSTLSDPVQLEVHIGWLLLQAPRWVFKEEDPIHLRCHSWKNTALHKVTYLQNGKGRKYFHHNSDFYIPKATLKDSGSYFCRGLVGSKNVSSETVNITITQGLAVSTISSFFPPGYQGSGGGGSGGGGSGGGGSFEQVQLQQPGAELVKPGASVKMSCKASGYAFSSYWINWMKQKPGQGLEWIGQIYPGDGDTNYNGKFKGRATLTADTSSSTAYMQLSSLTSEDSAVYFCARSITTVVGCAMDYWGQGTSVTVSSTRIQNPDPAVYQLRDSKSSDKSVCLFTDFDSQTNVSQSKDSDVYITDKCVLDMRSMDFKSNSAVAWSNKSDFACANAFNNSIIPEDTFFPSSDVPCGTQSFGLLDPKLCYLLDGILFIYGVILTALFLRVKFSRSADAPAYQQGQNQLYNELNLGRREEYDVLDKRRGRDPEMGGKPQRRKNPQEGLYNELQKDKMAEAYSEIGMKGERRRGKGHDGLYQGLSTATKDTYDALHMQALPPR

SEQ ID NO: 15554 - protein, 1100 aa, Artificial Sequence
  Synthetic Polypeptide
MALPVTALLLPLALLLHAARPDIQMTQSPSSLSASVGDRVTITCKASDHINNWLAWYQQKPGQAPKLLIYGATTLETGVPSRFSGSGSGTDYTLTISSLQPEDFATYYCQQSWNTPWTFGQGTKLEIKRLEGKPIPNPLLGLDSTGSGEDLKNVFPPEVAVFEPSEAEISHTQKATLVCLATGFYPDHVELSWWVNGKEVHSGVSTDPQPLKEQPALNDSRYCLSSRLRVSATFWQNPRNHFRCQVQFYGLSENDEWTQDRAKPVTQIVSAEAWGRADCGSQSFGLLDPKLCYLLDGILFIYGVILTALFLRVKFSRSADAPAYQQGQNQLYNELNLGRREEYDVLDKRRGRDPEMGGKPQRRKNPQEGLYNELQKDKMAEAYSEIGMKGERRRGKGHDGLYQGLSTATKDTYDALHMQALPPRRAKRSGSGATNFSLLKQAGDVEENPGPTSMDWIWRILFLVGAATGAHSGPGMRTEDLPKAVVFLEPQWYRVLEKDSVTLKCQGAYSPEDNSTQWFHNESLISSQASSYFIDAATVDDSGEYRCQTNLSTLSDPVQLEVHIGWLLLQAPRWVFKEEDPIHLRCHSWKNTALHKVTYLQNGKGRKYFHHNSDFYIPKATLKDSGSYFCRGLVGSKNVSSETVNITITQGLAVSTISSFFPPGYQGSGGGGSGGGGSGGGGSFEQVQLQQPGAELVKPGASVKMSCKASGYAFSSYWINWMKQKPGQGLEWIGQIYPGDGDTNYNGKFKGRATLTADTSSSTAYMQLSSLTSEDSAVYFCARSITTVVGCAMDYWGQGTSVTVSSTREQKLISEEDGSGIQNPDPAVYQLRDSKSSDKSVCLFTDFDSQTNVSQSKDSDVYITDKTVLDMRSMDFKSNSAVAWSNKSDFACANAFNNSIIPEDTFFPSPESSCGTQSFGLLDPKLCYLLDGILFIYGVILTALFLRSKRSRLLHSDYMNMTPRRPGPTRKHYQPYAPPRDFAAYRSRVKFSRSADAPAYQQGQNQLYNELNLGRREEYDVLDKRRGRDPEMGGKPQRRKNPQEGLYNELQKDKMAEAYSEIGMKGERRRGKGHDGLYQGLSTATKDTYDALHMQALPPR

SEQ ID NO: 15555 - protein, 1141 aa, Artificial Sequence
  Synthetic Polypeptide
MALPVTALLLPLALLLHAARPDIQMTQSPSSLSASVGDRVTITCKASDHINNWLAWYQQKPGQAPKLLIYGATTLETGVPSRFSGSGSGTDYTLTISSLQPEDFATYYCQQSWNTPWTFGQGTKLEIKRLEGKPIPNPLLGLDSTGSGEDLKNVFPPEVAVFEPSEAEISHTQKATLVCLATGFYPDHVELSWWVNGKEVHSGVSTDPQPLKEQPALNDSRYCLSSRLRVSATFWQNPRNHFRCQVQFYGLSENDEWTQDRAKPVTQIVSAEAWGRADCGSQSFGLLDPKLCYLLDGILFIYGVILTALFLRSKRSRLLHSDYMNMTPRRPGPTRKHYQPYAPPRDFAAYRSRVKFSRSADAPAYQQGQNQLYNELNLGRREEYDVLDKRRGRDPEMGGKPQRRKNPQEGLYNELQKDKMAEAYSEIGMKGERRRGKGHDGLYQGLSTATKDTYDALHMQALPPRRAKRSGSGATNFSLLKQAGDVEENPGPTSMDWIWRILFLVGAATGAHSGPGMRTEDLPKAVVFLEPQWYRVLEKDSVTLKCQGAYSPEDNSTQWFHNESLISSQASSYFIDAATVDDSGEYRCQTNLSTLSDPVQLEVHIGWLLLQAPRWVFKEEDPIHLRCHSWKNTALHKVTYLQNGKGRKYFHHNSDFYIPKATLKDSGSYFCRGLVGSKNVSSETVNITITQGLAVSTISSFFPPGYQGSGGGGSGGGGSGGGGSFEQVQLQQPGAELVKPGASVKMSCKASGYAFSSYWINWMKQKPGQGLEWIGQIYPGDGDTNYNGKFKGRATLTADTSSSTAYMQLSSLTSEDSAVYFCARSITTVVGCAMDYWGQGTSVTVSSTREQKLISEEDGSGIQNPDPAVYQLRDSKSSDKSVCLFTDFDSQTNVSQSKDSDVYITDKTVLDMRSMDFKSNSAVAWSNKSDFACANAFNNSIIPEDTFFPSPESSCGTQSFGLLDPKLCYLLDGILFIYGVILTALFLRSKRSRLLHSDYMNMTPRRPGPTRKHYQPYAPPRDFAAYRSRVKFSRSADAPAYQQGQNQLYNELNLGRREEYDVLDKRRGRDPEMGGKPQRRKNPQEGLYNELQKDKMAEAYSEIGMKGERRRGKGHDGLYQGLSTATKDTYDALHMQALPPR

SEQ ID NO: 15556 - protein, 1102 aa, Artificial Sequence
  Synthetic Polypeptide
MALPVTALLLPLALLLHAARPDIQMTQSPSSLSASVGDRVTITCKASDHINNWLAWYQQKPGQAPKLLIYGATTLETGVPSRFSGSGSGTDYTLTISSLQPEDFATYYCQQSWNTPWTFGQGTKLEIKRLEGKPIPNPLLGLDSTGSGEDLKNVFPPEVAVFEPSEAEISHTQKATLVCLATGFYPDHVELSWWVNGKEVHSGVSTDPQPLKEQPALNDSRYCLSSRLRVSATFWQNPRNHFRCQVQFYGLSENDEWTQDRAKPVTQIVSAEAWGRADCGSQSFGLLDPKLCYLLDGILFIYGVILTALFLRVKFSRSADAPAYQQGQNQLYNELNLGRREEYDVLDKRRGRDPEMGGKPQRRKNPQEGLYNELQKDKMAEAYSEIGMKGERRRGKGHDGLYQGLSTATKDTYDALHMQALPPRRAKRSGSGATNFSLLKQAGDVEENPGPTSMDWIWRILFLVGAATGAHSGPGMRTEDLPKAVVFLEPQWYRVLEKDSVTLKCQGAYSPEDNSTQWFHNESLISSQASSYFIDAATVDDSGEYRCQTNLSTLSDPVQLEVHIGWLLLQAPRWVFKEEDPIHLRCHSWKNTALHKVTYLQNGKGRKYFHHNSDFYIPKATLKDSGSYFCRGLVGSKNVSSETVNITITQGLAVSTISSFFPPGYQGSGGGGSGGGGSGGGGSFEQVQLQQPGAELVKPGASVKMSCKASGYAFSSYWINWMKQKPGQGLEWIGQIYPGDGDTNYNGKFKGRATLTADTSSSTAYMQLSSLTSEDSAVYFCARSITTVVGCAMDYWGQGTSVTVSSTREQKLISEEDLGSGIQNPDPAVYQLRDSKSSDKSVCLFTDFDSQTNVSQSKDSDVYITDKTVLDMRSMDFKSNSAVAWSNKSDFACANAFNNSIIPEDTFFPSPESSCGTQSFGLLDPKLCYLLDGILFIYGVILTALFLKRGRKKLLYIFKQPFMRPVQTTQEEDGCSCRFPEEEEGGCELRVKFSRSADAPAYQQGQNQLYNELNLGRREEYDVLDKRRGRDPEMGGKPQRRKNPQEGLYNELQKDKMAEAYSEIGMKGERRRGKGHDGLYQGLSTATKDTYDALHMQALPPR

SEQ ID NO: 15557 - protein, 1144 aa, Artificial Sequence
  Synthetic Polypeptide
MALPVTALLLPLALLLHAARPDIQMTQSPSSLSASVGDRVTITCKASDHINNWLAWYQQKPGQAPKLLIYGATTLETGVPSRFSGSGSGTDYTLTISSLQPEDFATYYCQQSWNTPWTFGQGTKLEIKRLEGKPIPNPLLGLDSTGSGEDLKNVFPPEVAVFEPSEAEISHTQKATLVCLATGFYPDHVELSWWVNGKEVHSGVSTDPQPLKEQPALNDSRYCLSSRLRVSATFWQNPRNHFRCQVQFYGLSENDEWTQDRAKPVTQIVSAEAWGRADCGSQSFGLLDPKLCYLLDGILFIYGVILTALFLKRGRKKLLYIFKQPFMRPVQTTQEEDGCSCRFPEEEEGGCELRVKFSRSADAPAYQQGQNQLYNELNLGRREEYDVLDKRRGRDPEMGGKPQRRKNPQEGLYNELQKDKMAEAYSEIGMKGERRRGKGHDGLYQGLSTATKDTYDALHMQALPPRRAKRSGSGATNFSLLKQAGDVEENPGPTSMDWIWRILFLVGAATGAHSGPGMRTEDLPKAVVFLEPQWYRVLEKDSVTLKCQGAYSPEDNSTQWFHNESLISSQASSYFIDAATVDDSGEYRCQTNLSTLSDPVQLEVHIGWLLLQAPRWVFKEEDPIHLRCHSWKNTALHKVTYLQNGKGRKYFHHNSDFYIPKATLKDSGSYFCRGLVGSKNVSSETVNITITQGLAVSTISSFFPPGYQGSGGGGSGGGGSGGGGSFEQVQLQQPGAELVKPGASVKMSCKASGYAFSSYWINWMKQKPGQGLEWIGQIYPGDGDTNYNGKFKGRATLTADTSSSTAYMQLSSLTSEDSAVYFCARSITTVVGCAMDYWGQGTSVTVSSTREQKLISEEDLGSGIQNPDPAVYQLRDSKSSDKSVCLFTDFDSQTNVSQSKDSDVYITDKTVLDMRSMDFKSNSAVAWSNKSDFACANAFNNSIIPEDTFFPSPESSCGTQSFGLLDPKLCYLLDGILFIYGVILTALFLKRGRKKLLYIFKQPFMRPVQTTQEEDGCSCRFPEEEEGGCELRVKFSRSADAPAYQQGQNQLYNELNLGRREEYDVLDKRRGRDPEMGGKPQRRKNPQEGLYNELQKDKMAEAYSEIGMKGERRRGKGHDGLYQGLSTATKDTYDALHMQALPPR

SEQ ID NO: 15558 - protein, 1034 aa, Artificial Sequence
  Synthetic Polypeptide
MALPVTALLLPLALLLHAARPDIQMTQSPSSLSASVGDRVTITCKASDHINNWLAWYQQKPGQAPKLLIYGATTLETGVPSRFSGSGSGTDYTLTISSLQPEDFATYYCQQSWNTPWTFGQGTKLEIKRLEQSFGLLDPKLCYLLDGILFIYGVILTALFLRVKFSRSADAPAYQQGQNQLYNELNLGRREEYDVLDKRRGRDPEMGGKPQRRKNPQEGLYNELQKDKMAEAYSEIGMKGERRRGKGHDGLYQGLSTATKDTYDALHMQALPPRRAKRSGSGATNFSLLKQAGDVEENPGPTSMDWIWRILFLVGAATGAHSGPGMRTEDLPKAVVFLEPQWYRVLEKDSVTLKCQGAYSPEDNSTQWFHNESLISSQASSYFIDAATVDDSGEYRCQTNLSTLSDPVQLEVHIGWLLLQAPRWVFKEEDPIHLRCHSWKNTALHKVTYLQNGKGRKYFHHNSDFYIPKATLKDSGSYFCRGLVGSKNVSSETVNITITQGLAVSTISSFFPPGYQGSGGGGSGGGGSGGGGSFEQVQLQQPGAELVKPGASVKMSCKASGYAFSSYWINWMKQKPGQGLEWIGQIYPGDGDTNYNGKFKGRATLTADTSSSTAYMQLSSLTSEDSAVYFCARSITTVVGCAMDYWGQGTSVTVSSTRQSFGLLDPKLCYLLDGILFIYGVILTALFLRVKFSRSADAPAYQQGQNQLYNELNLGRREEYDVLDKRRGRDPEMGGKPQRRKNPQEGLYNELQKDKMAEAYSEIGMKGERRRGKGHDGLYQGLSTATKDTYDALHMQALPPRRAKRSGSGVKQTLNFDLLKLAGDVESNPGPSRGHMTEYKPTVRLATRDDVPRAVRTLAAAFADYPATRHTVDPDRHIERVTELQELFLTRVGLDIGKVWVADDGAAVAVWTTPESVEAGAVFAEIGPRMAELSGSRLAAQQQMEGLLAPHRPKEPAWFLATVGVSPDHQGKGLGSAVVLPGVEAAERAGVPAFLETSAPRNLPFYERLGFTVTADVEVPEGPRTWCMTRKPGA

SEQ ID NO: 15559 - protein, 859 aa, Artificial Sequence
  Synthetic Polypeptide
MALPVTALLLPLALLLHAARPDIQMTQSPSSLSASVGDRVTITCKASDHINNWLAWYQQKPGQAPKLLIYGATTLETGVPSRFSGSGSGTDYTLTISSLQPEDFATYYCQQSWNTPWTFGQGTKLEIKRLEGQPKANPTVTLFPPSSEELQANKATLVCLISDFYPGAVTVAWKADGSPVKAGVETTKPSKQSNNKYAASSYLSLTPEQWKSHRSYSCQVTHEGSTVEKTVAPTECSPIKTDVITMDPKDNCSKDANDTLLLQLTNTSAYYMYLLLLLKSVVYFAIITCCLLRRTAFCCNGEKSRAKRSGSGATNFSLLKQAGDVEENPGPTSMDWIWRILFLVGAATGAHSGPGMRTEDLPKAVVFLEPQWYRVLEKDSVTLKCQGAYSPEDNSTQWFHNESLISSQASSYFIDAATVDDSGEYRCQTNLSTLSDPVQLEVHIGWLLLQAPRWVFKEEDPIHLRCHSWKNTALHKVTYLQNGKGRKYFHHNSDFYIPKATLKDSGSYFCRGLVGSKNVSSETVNITITQGLAVSTISSFFPPGYQGSGGGGSGGGGSGGGGSFEQVQLQQPGAELVKPGASVKMSCKASGYAFSSYWINWMKQKPGQGLEWIGQIYPGDGDTNYNGKFKGRATLTADTSSSTAYMQLSSLTSEDSAVYFCARSITTVVGCAMDYWGQGTSVTVSSTRASTKGPSVFPLAPSSKSTSGGTAALGCLVKDYFPEPVTVSWNSGALTSGVHTFPAVLQSSGLYSLSSVVTVPSSSLGTQTYICNVNHKPSNTKVDKRVEPKSCEVKTDSTDHVKPKETENTKQPSKSCHKPKAIVHTEKVNMMSLTVLGLRMLFAKTVAVNFLLTAKLFFL

SEQ ID NO: 15560 - protein, 837 aa, Artificial Sequence
  Synthetic Polypeptide
MALPVTALLLPLALLLHAARPDIQMTQSPSSLSASVGDRVTITCKASDHINNWLAWYQQKPGQAPKLLIYGATTLETGVPSRFSGSGSGTDYTLTISSLQPEDFATYYCQQSWNTPWTFGQGTKLEIKRLEGQPKANPTVTLFPPSSEELQANKATLVCLISDFYPGAVTVAWKADGSPVKAGVETTKPSKQSNNKYAASSYLSLTPEQWKSHRSYSCQVTHEGSTVEKTVAPTECSGRADCGITSASYHQGVLSATILYEILLGKATLYAVLVSALVLMAMVKRKDSRGRAKRSGSGATNFSLLKQAGDVEENPGPTSMDWIWRILFLVGAATGAHSGPGMRTEDLPKAVVFLEPQWYRVLEKDSVTLKCQGAYSPEDNSTQWFHNESLISSQASSYFIDAATVDDSGEYRCQTNLSTLSDPVQLEVHIGWLLLQAPRWVFKEEDPIHLRCHSWKNTALHKVTYLQNGKGRKYFHHNSDFYIPKATLKDSGSYFCRGLVGSKNVSSETVNITITQGLAVSTISSFFPPGYQGSGGGGSGGGGSGGGGSFEQVQLQQPGAELVKPGASVKMSCKASGYAFSSYWINWMKQKPGQGLEWIGQIYPGDGDTNYNGKFKGRATLTADTSSSTAYMQLSSLTSEDSAVYFCARSITTVVGCAMDYWGQGTSVTVSSTRASTKGPSVFPLAPSSKSTSGGTAALGCLVKDYFPEPVTVSWNSGALTSGVHTFPAVLQSSGLYSLSSVVTVPSSSLGTQTYICNVNHKPSNTKVDKRVEPKSCIPEDTFFPSSDVPCDVKLVEKSFETDTNLNFQNLSVIGFRILLLKVAGFNLLMTLRLWSS

SEQ ID NO: 15561 - protein, 837 aa, Artificial Sequence
  Synthetic Polypeptide
MALPVTALLLPLALLLHAARPDIQMTQSPSSLSASVGDRVTITCKASDHINNWLAWYQQKPGQAPKLLIYGATTLETGVPSRFSGSGSGTDYTLTISSLQPEDFATYYCQQSWNTPWTFGQGTKLEIKRLEGQPKANPTVTLFPPSSEELQANKATLVCLISDFYPGAVTVAWKADGSPVKAGVETTKPSKQSNNKYAASSYLSLTPEQWKSHRSYSCQVTHEGSTVEKTVAPTECSGRADCGFTSESYQQGVLSATILYEILLGKATLYAVLVSALVLMAMVKRKDSRGRAKRSGSGATNFSLLKQAGDVEENPGPTSMDWIWRILFLVGAATGAHSGPGMRTEDLPKAVVFLEPQWYRVLEKDSVTLKCQGAYSPEDNSTQWFHNESLISSQASSYFIDAATVDDSGEYRCQTNLSTLSDPVQLEVHIGWLLLQAPRWVFKEEDPIHLRCHSWKNTALHKVTYLQNGKGRKYFHHNSDFYIPKATLKDSGSYFCRGLVGSKNVSSETVNITITQGLAVSTISSFFPPGYQGSGGGGSGGGGSGGGGSFEQVQLQQPGAELVKPGASVKMSCKASGYAFSSYWINWMKQKPGQGLEWIGQIYPGDGDTNYNGKFKGRATLTADTSSSTAYMQLSSLTSEDSAVYFCARSITTVVGCAMDYWGQGTSVTVSSTRASTKGPSVFPLAPSSKSTSGGTAALGCLVKDYFPEPVTVSWNSGALTSGVHTFPAVLQSSGLYSLSSVVTVPSSSLGTQTYICNVNHKPSNTKVDKRVEPKSCIPEDTFFPSPESSCDVKLVEKSFETDTNLNFQNLSVIGFRILLLKVAGFNLLMTLRLWSS

SEQ ID NO: 15562 - protein, 667 aa, Artificial Sequence
  Synthetic Polypeptide
MDWIWRILFLVGAATGAHSGPGMRTEDLPKAVVFLEPQWYRVLEKDSVTLKCQGAYSPEDNSTQWFHNESLISSQASSYFIDAATVDDSGEYRCQTNLSTLSDPVQLEVHIGWLLLQAPRWVFKEEDPIHLRCHSWKNTALHKVTYLQNGKGRKYFHHNSDFYIPKATLKDSGSYFCRGLVGSKNVSSETVNITITQGLAVSTISSFFPPGYQGSGGGGSGGGGSGGGGSFEQVQLQQPGAELVKPGASVKMSCKASGYAFSSYWINWMKQKPGQGLEWIGQIYPGDGDTNYNGKFKGRATLTADTSSSTAYMQLSSLTSEDSAVYFCARSITTVVGCAMDYWGQGTSVTVSSGGGGSGGGGSGGGGSDIQMTQSPSSLSASVGDRVTITCKASDHINNWLAWYQQKPGQAPKLLIYGATTLETGVPSRFSGSGSGTDYTLTISSLQPEDFATYYCQQSWNTPWTFGQGTKLEIKRTRGGGSDGNEEMGGITQTPYKVSISGTTVILTCPQYPGSEILWQHNDKNIGGDEDDKNIGSDEDHLSLKEFSELEQSGYYVCYPRGSKPEDANFYLYLRARVCENCMEMDVMSVATIVIVDICITGGLLLLVYYWSKNRKAKAKPVTRGAGAGGRQRGQNKERPPPVPNPDYEPIRKGQRDLYSGLNQRRI

SEQ ID NO: 15563 - protein, 632 aa, Artificial Sequence
  Synthetic Polypeptide
MDWIWRILFLVGAATGAHSGPGMRTEDLPKAVVFLEPQWYRVLEKDSVTLKCQGAYSPEDNSTQWFHNESLISSQASSYFIDAATVDDSGEYRCQTNLSTLSDPVQLEVHIGWLLLQAPRWVFKEEDPIHLRCHSWKNTALHKVTYLQNGKGRKYFHHNSDFYIPKATLKDSGSYFCRGLVGSKNVSSETVNITITQGLAVSTISSFFPPGYQGSGGGGSGGGGSGGGGSFEQVQLQQPGAELVKPGASVKMSCKASGYAFSSYWINWMKQKPGQGLEWIGQIYPGDGDTNYNGKFKGRATLTADTSSSTAYMQLSSLTSEDSAVYFCARSITTVVGCAMDYWGQGTSVTVSSGGGGSGGGGSGGGGSDIQMTQSPSSLSASVGDRVTITCKASDHINNWLAWYQQKPGQAPKLLIYGATTLETGVPSRFSGSGSGTDYTLTISSLQPEDFATYYCQQSWNTPWTFGQGTKLEIKRTRGGGSFKIPIEELEDRVFVNCNTSITWVEGTVGTLLSDITRLDLGKRILDPRGIYRCNGTDIYKDKESTVQVHYRMCQSCVELDPATVAGIIVTDVIATLLLALGVFCFAGHETGRLSGAADTQALLRNDQVYQPLRDRDDAQYSHLGGNWARNK

SEQ ID NO: 15564 - protein, 642 aa, Artificial Sequence
  Synthetic Polypeptide
MDWIWRILFLVGAATGAHSGPGMRTEDLPKAVVFLEPQWYRVLEKDSVTLKCQGAYSPEDNSTQWFHNESLISSQASSYFIDAATVDDSGEYRCQTNLSTLSDPVQLEVHIGWLLLQAPRWVFKEEDPIHLRCHSWKNTALHKVTYLQNGKGRKYFHHNSDFYIPKATLKDSGSYFCRGLVGSKNVSSETVNITITQGLAVSTISSFFPPGYQGSGGGGSGGGGSGGGGSFEQVQLQQPGAELVKPGASVKMSCKASGYAFSSYWINWMKQKPGQGLEWIGQIYPGDGDTNYNGKFKGRATLTADTSSSTAYMQLSSLTSEDSAVYFCARSITTVVGCAMDYWGQGTSVTVSSGGGGSGGGGSGGGGSDIQMTQSPSSLSASVGDRVTITCKASDHINNWLAWYQQKPGQAPKLLIYGATTLETGVPSRFSGSGSGTDYTLTISSLQPEDFATYYCQQSWNTPWTFGQGTKLEIKRTRGGGSQSIKGNHLVKVYDYQEDGSVLLTCDAEAKNITWFKDGKMIGFLTEDKKKWNLGSNAKDPRGMYQCKGSQNKSKPLQVYYRMCQNCIELNAATISGFLFAEIVSIFVLAVGVYFIAGQDGVRQSRASDKQTLLPNDQLYQPLKDREDDQYSHLQGNQLRRN

SEQ ID NO: 15565 - protein, 625 aa, Artificial Sequence
  Synthetic Polypeptide
MDWIWRILFLVGAATGAHSGPGMRTEDLPKAVVFLEPQWYRVLEKDSVTLKCQGAYSPEDNSTQWFHNESLISSQASSYFIDAATVDDSGEYRCQTNLSTLSDPVQLEVHIGWLLLQAPRWVFKEEDPIHLRCHSWKNTALHKVTYLQNGKGRKYFHHNSDFYIPKATLKDSGSYFCRGLVGSKNVSSETVNITITQGLAVSTISSFFPPGYQGSGGGGSGGGGSGGGGSFEQVQLQQPGAELVKPGASVKMSCKASGYAFSSYWINWMKQKPGQGLEWIGQIYPGDGDTNYNGKFKGRATLTADTSSSTAYMQLSSLTSEDSAVYFCARSITTVVGCAMDYWGQGTSVTVSSGGGGSGGGGSGGGGSDIQMTQSPSSLSASVGDRVTITCKASDHINNWLAWYQQKPGQAPKLLIYGATTLETGVPSRFSGSGSGTDYTLTISSLQPEDFATYYCQQSWNTPWTFGQGTKLEIKRTRGGGSQSFGLLDPKLCYLLDGILFIYGVILTALFLRVKFSRSADAPAYQQGQNQLYNELNLGRREEYDVLDKRRGRDPEMGGKPQRRKNPQEGLYNELQKDKMAEAYSEIGMKGERRRGKGHDGLYQGLSTATKDTYDALHMQALPPR

SEQ ID NO: 15566 - protein, 661 aa, Artificial Sequence
  Synthetic Polypeptide
MDWIWRILFLVGAATGAHSGPGMRTEDLPKAVVFLEPQWYRVLEKDSVTLKCQGAYSPEDNSTQWFHNESLISSQASSYFIDAATVDDSGEYRCQTNLSTLSDPVQLEVHIGWLLLQAPRWVFKEEDPIHLRCHSWKNTALHKVTYLQNGKGRKYFHHNSDFYIPKATLKDSGSYFCRGLVGSKNVSSETVNITITQGLAVSTISSFFPPGYQGSGGGGSGGGGSGGGGSFEQVQLQQPGAELVKPGASVKMSCKASGYAFSSYWINWMKQKPGQGLEWIGQIYPGDGDTNYNGKFKGRATLTADTSSSTAYMQLSSLTSEDSAVYFCARSITTVVGCAMDYWGQGTSVTVSSTRIQNPDPAVYQLRDSKSSDKSVCLFTDFDSQTNVSQSKDSDVYITDKTVLDMRSMDFKSNSAVAWSNKSDFACANAFNNSIIPEDTFFPSPESSCDVKLVEKSFETDTNLNFQNLSVIGFRILLLKVAGFNLLMTLRLWSSRAKRSGSGVKQTLNFDLLKLAGDVESNPGPSRGHMAKPLSQEESTLIERATATINSIPISEDYSVASAALSSDGRIFTGVNVYHFTGGPCAELVVLGTAAAAAAGNLTCIVAIGNENRGILSPCGRCRQVLLDLHPGIKAIVKDSDGQPTAVGIRELLPSGYVWEG

SEQ ID NO: 15567 - protein, 495 aa, Artificial Sequence
  Synthetic Polypeptide
MDWIWRILFLVGAATGAHSGPGMRTEDLPKAVVFLEPQWYRVLEKDSVTLKCQGAYSPEDNSTQWFHNESLISSQASSYFIDAATVDDSGEYRCQTNLSTLSDPVQLEVHIGWLLLQAPRWVFKEEDPIHLRCHSWKNTALHKVTYLQNGKGRKYFHHNSDFYIPKATLKDSGSYFCRGLVGSKNVSSETVNITITQGLAVSTISSFFPPGYQGSGGGGSGGGGSGGGGSFEQVQLQQPGAELVKPGASVKMSCKASGYAFSSYWINWMKQKPGQGLEWIGQIYPGDGDTNYNGKFKGRATLTADTSSSTAYMQLSSLTSEDSAVYFCARSITTVVGCAMDYWGQGTSVTVSSTRIQNPDPAVYQLRDSKSSDKSVCLFTDFDSQTNVSQSKDSDVYITDKTVLDMRSMDFKSNSAVAWSNKSDFACANAFNNSIIPEDTFFPSPESSCDVKLVEKSFETDTNLNFQNLSVIGFRILLLKVAGFNLLMTLRLWSS

SEQ ID NO: 15568 - protein, 673 aa, Artificial Sequence
  Synthetic Polypeptide
MDWIWRILFLVGAATGAHSGPGMRTEDLPKAVVFLEPQWYRVLEKDSVTLKCQGAYSPEDNSTQWFHNESLISSQASSYFIDAATVDDSGEYRCQTNLSTLSDPVQLEVHIGWLLLQAPRWVFKEEDPIHLRCHSWKNTALHKVTYLQNGKGRKYFHHNSDFYIPKATLKDSGSYFCRGLVGSKNVSSETVNITITQGLAVSTISSFFPPGYQGSGGGGSGGGGSGGGGSFEQVQLQQPGAELVKPGASVKMSCKASGYAFSSYWINWMKQKPGQGLEWIGQIYPGDGDTNYNGKFKGRATLTADTSSSTAYMQLSSLTSEDSAVYFCARSITTVVGCAMDYWGQGTSVTVSSTREQKLISEEDGSGIQNPDPAVYQLRDSKSSDKSVCLFTDFDSQTNVSQSKDSDVYITDKCVLDMRSMDFKSNSAVAWSNKSDFACANAFNNSIIPEDTFFPSPESSCDVKLVEKSFETDTNLNFQNLSVIGFRILLLKVAGFNLLMTLRLWSSRAKRSGSGVKQTLNFDLLKLAGDVESNPGPSRGHMAKPLSQEESTLIERATATINSIPISEDYSVASAALSSDGRIFTGVNVYHFTGGPCAELVVLGTAAAAAAGNLTCIVAIGNENRGILSPCGRCRQVLLDLHPGIKAIVKDSDGQPTAVGIRELLPSGYVWEG

SEQ ID NO: 15569 - protein, 507 aa, Artificial Sequence
  Synthetic Polypeptide
MDWIWRILFLVGAATGAHSGPGMRTEDLPKAVVFLEPQWYRVLEKDSVTLKCQGAYSPEDNSTQWFHNESLISSQASSYFIDAATVDDSGEYRCQTNLSTLSDPVQLEVHIGWLLLQAPRWVFKEEDPIHLRCHSWKNTALHKVTYLQNGKGRKYFHHNSDFYIPKATLKDSGSYFCRGLVGSKNVSSETVNITITQGLAVSTISSFFPPGYQGSGGGGSGGGGSGGGGSFEQVQLQQPGAELVKPGASVKMSCKASGYAFSSYWINWMKQKPGQGLEWIGQIYPGDGDTNYNGKFKGRATLTADTSSSTAYMQLSSLTSEDSAVYFCARSITTVVGCAMDYWGQGTSVTVSSTREQKLISEEDGSGIQNPDPAVYQLRDSKSSDKSVCLFTDFDSQTNVSQSKDSDVYITDKCVLDMRSMDFKSNSAVAWSNKSDFACANAFNNSIIPEDTFFPSPESSCDVKLVEKSFETDTNLNFQNLSVIGFRILLLKVAGFNLLMTLRLWSS

SEQ ID NO: 15570 - protein, 708 aa, Artificial Sequence; identical to SEQ ID NO: 15443
  Synthetic Polypeptide

SEQ ID NO: 15571 - protein, 714 aa, Artificial Sequence; identical to SEQ ID NO: 15444
  Synthetic Polypeptide

SEQ ID NO: 15572 - protein, 1127 aa, Artificial Sequence; identical to SEQ ID NO: 15445
  Synthetic Polypeptide

SEQ ID NO: 15573 - protein, 1067 aa, Artificial Sequence; identical to SEQ ID NO: 15446
  Synthetic Polypeptide

SEQ ID NO: 15574 - protein, 1066 aa, Artificial Sequence; identical to SEQ ID NO: 15447
  Synthetic Polypeptide

SEQ ID NO: 15575 - protein, 833 aa, Artificial Sequence; identical to SEQ ID NO: 15448
  Synthetic Polypeptide

SEQ ID NO: 15576 - protein, 1058 aa, Artificial Sequence; identical to SEQ ID NO: 15449
  Synthetic Polypeptide

SEQ ID NO: 15577 - protein, 837 aa, Artificial Sequence; identical to SEQ ID NO: 15450
  Synthetic Polypeptide

SEQ ID NO: 15578 - protein, 1059 aa, Artificial Sequence; identical to SEQ ID NO: 15451
  Synthetic Polypeptide

SEQ ID NO: 15579 - protein, 1111 aa, Artificial Sequence; identical to SEQ ID NO: 15452
  Synthetic Polypeptide

SEQ ID NO: 15580 - protein, 1112 aa, Artificial Sequence; identical to SEQ ID NO: 15453
  Synthetic Polypeptide

SEQ ID NO: 15581 - protein, 1066 aa, Artificial Sequence; identical to SEQ ID NO: 15454
  Synthetic Polypeptide

SEQ ID NO: 15582 - protein, 1148 aa, Artificial Sequence; identical to SEQ ID NO: 15455
  Synthetic Polypeptide

SEQ ID NO: 15583 - protein, 1166 aa, Artificial Sequence; identical to SEQ ID NO: 15456
  Synthetic Polypeptide

SEQ ID NO: 15584 - protein, 1103 aa, Artificial Sequence; identical to SEQ ID NO: 15457
  Synthetic Polypeptide

SEQ ID NO: 15585 - protein, 841 aa, Artificial Sequence; identical to SEQ ID NO: 15458
  Synthetic Polypeptide

SEQ ID NO: 15586 - protein, 1118 aa, Artificial Sequence; identical to SEQ ID NO: 15459
  Synthetic Polypeptide

SEQ ID NO: 15587 - protein, 1243 aa, Artificial Sequence; identical to SEQ ID NO: 15460
  Synthetic Polypeptide

SEQ ID NO: 15588 - protein, 1029 aa, Artificial Sequence; identical to SEQ ID NO: 15461
  Synthetic Polypeptide

SEQ ID NO: 15589 - protein, 1029 aa, Artificial Sequence; identical to SEQ ID NO: 15462
  Synthetic Polypeptide

SEQ ID NO: 15590 - protein, 1100 aa, Artificial Sequence; identical to SEQ ID NO: 15463
  Synthetic Polypeptide

SEQ ID NO: 15591 - protein, 1141 aa, Artificial Sequence; identical to SEQ ID NO: 15464
  Synthetic Polypeptide

SEQ ID NO: 15592 - protein, 1102 aa, Artificial Sequence; identical to SEQ ID NO: 15465
  Synthetic Polypeptide

SEQ ID NO: 15593 - protein, 1144 aa, Artificial Sequence; identical to SEQ ID NO: 15466
  Synthetic Polypeptide

SEQ ID NO: 15594 - protein, 1034 aa, Artificial Sequence; identical to SEQ ID NO: 15467
  Synthetic Polypeptide

SEQ ID NO: 15595 - protein, 859 aa, Artificial Sequence; identical to SEQ ID NO: 15468
  Synthetic Polypeptide

SEQ ID NO: 15596 - protein, 837 aa, Artificial Sequence; identical to SEQ ID NO: 15469
  Synthetic Polypeptide

SEQ ID NO: 15597 - protein, 837 aa, Artificial Sequence; identical to SEQ ID NO: 15470
  Synthetic Polypeptide

SEQ ID NO: 15598 - protein, 663 aa, Artificial Sequence; identical to SEQ ID NO: 15471
  Synthetic Polypeptide

SEQ ID NO: 15599 - protein, 628 aa, Artificial Sequence; identical to SEQ ID NO: 15472
  Synthetic Polypeptide

SEQ ID NO: 15600 - protein, 638 aa, Artificial Sequence; identical to SEQ ID NO: 15473
  Synthetic Polypeptide

SEQ ID NO: 15601 - protein, 621 aa, Artificial Sequence; identical to SEQ ID NO: 15474
  Synthetic Polypeptide

SEQ ID NO: 15602 - protein, 854 aa, Artificial Sequence; identical to SEQ ID NO: 15475
  Synthetic Polypeptide

SEQ ID NO: 15603 - protein, 886 aa, Artificial Sequence; identical to SEQ ID NO: 15476
  Synthetic Polypeptide

SEQ ID NO: 15604 - protein, 936 aa, Artificial Sequence; identical to SEQ ID NO: 15477
  Synthetic Polypeptide

SEQ ID NO: 15605 - protein, 750 aa, Artificial Sequence; identical to SEQ ID NO: 15478
  Synthetic Polypeptide

SEQ ID NO: 15606 - protein, 520 aa, Artificial Sequence; identical to SEQ ID NO: 15479
  Synthetic Polypeptide

SEQ ID NO: 15607 - protein, 450 aa, Artificial Sequence; identical to SEQ ID NO: 14845
  Synthetic Polypeptide

SEQ ID NO: 15608 - protein, 284 aa, Artificial Sequence; identical to SEQ ID NO: 14846
  Synthetic Polypeptide

SEQ ID NO: 15609 - protein, 768 aa, Artificial Sequence; identical to SEQ ID NO: 15482
  Synthetic Polypeptide

SEQ ID NO: 15610 - protein, 538 aa, Artificial Sequence; identical to SEQ ID NO: 15483
  Synthetic Polypeptide

SEQ ID NO: 15611 - protein, 462 aa, Artificial Sequence; identical to SEQ ID NO: 14849
  Synthetic Polypeptide

SEQ ID NO: 15612 - protein, 296 aa, Artificial Sequence; identical to SEQ ID NO: 14850
  Synthetic Polypeptide

SEQ ID NO: 15613 - protein, 854 aa, Artificial Sequence; identical to SEQ ID NO: 15486
  Synthetic Polypeptide

SEQ ID NO: 15614 - protein, 886 aa, Artificial Sequence; identical to SEQ ID NO: 15487
  Synthetic Polypeptide

SEQ ID NO: 15615 - protein, 1278 aa, Artificial Sequence
  Synthetic Polypeptide
MALPVTALLLPLALLLHAARPGMRTEDLPKAVVFLEPQWYRVLEKDSVTLKCQGAYSPEDNSTQWFHNESLISSQASSYFIDAATVDDSGEYRCQTNLSTLSDPVQLEVHIGWLLLQAPRWVFKEEDPIHLRCHSWKNTALHKVTYLQNGKGRKYFHHNSDFYIPKATLKDSGSYFCRGLVGSKNVSSETVNITITQGLAVSTISSFFPPGYQGTGGGGSGGGGSGGGGSEFDIQMTQSPSSLSASVGDRVTITCKASDHINNWLAWYQQKPGQAPKLLIYGATTLETGVPSRFSGSGSGTDYTLTISSLQPEDFATYYCQQSWNTPWTFGQGTKLEIKRLEIQNPDPAVYQLRDSKSSDKSVCLFTDFDSQTNVSQSKDSDVYITDKCVLDMRSMDFKSNSAVAWSNKSDFACANAFNNSIIPEDTFFPSSDVPCDVKLVEKSFETDTNLNFQNLSVIGFRILLLKVAGFNLLMTLRLWSSRAKRSGSGVKQTLNFDLLKLAGDVESNPGPTSMDWIWRILFLVGAATGAHSGPGMRTEDLPKAVVFLEPQWYRVLEKDSVTLKCQGAYSPEDNSTQWFHNESLISSQASSYFIDAATVDDSGEYRCQTNLSTLSDPVQLEVHIGWLLLQAPRWVFKEEDPIHLRCHSWKNTALHKVTYLQNGKGRKYFHHNSDFYIPKATLKDSGSYFCRGLVGSKNVSSETVNITITQGLAVSTISSFFPPGYQGSGGGGSGGGGSGGGGSFEQVQLQQPGAELVKPGASVKMSCKASGYAFSSYWINWMKQKPGQGLEWIGQIYPGDGDTNYNGKFKGRATLTADTSSSTAYMQLSSLTSEDSAVYFCARSITTVVGCAMDYWGQGTSVTVSSTREDLKNVFPPEVAVFEPSKAEIAHTQKATLVCLATGFYPDHVELSWWVNGKEVHSGVCTDPQPLKEQPALNDSRYCLSSRLRVSATFWQNPRNHFRCQVQFYGLSENDEWTQDRAKPVTQIVSAEAWGRADCGITSASYHQGVLSATILYEILLGKATLYAVLVSALVLMAMVKRKDSRGRAKRSGSGATNFSLLKQAGDVEENPGPSRGHMTEYKPTVRLATRDDVPRAVRTLAAAFADYPATRHTVDPDRHIERVTELQELFLTRVGLDIGKVWVADDGAAVAVWTTPESVEAGAVFAEIGPRMAELSGSRLAAQQQMEGLLAPHRPKEPAWFLATVGVSPDHQGKGLGSAVVLPGVEAAERAGVPAFLETSAPRNLPFYERLGFTVTADVEVPEGPRTWCMTRKPGA

SEQ ID NO: 15616 - protein, 1277 aa, Artificial Sequence
  Synthetic Polypeptide
MALPVTALLLPLALLLHAARPGMRTEDLPKAVVFLEPQWYRVLEKDSVTLKCQGAYSPEDNSTQWFHNESLISSQASSYFIDAATVDDSGEYRCQTNLSTLSDPVQLEVHIGWLLLQAPRWVFKEEDPIHLRCHSWKNTALHKVTYLQNGKGRKYFHHNSDFYIPKATLKDSGSYFCRGLVGSKNVSSETVNITITQGLAVSTISSFFPPGYQGTGGGGSGGGGSGGGGSEFDIQMTQSPSSLSASVGDRVTITCKASDHINNWLAWYQQKPGQAPKLLIYGATTLETGVPSRFSGSGSGTDYTLTISSLQPEDFATYYCQQSWNTPWTFGQGTKLEIKRLEDLKNVFPPEVAVFEPSKAEIAHTQKATLVCLATGFYPDHVELSWWVNGKEVHSGVCTDPQPLKEQPALNDSRYCLSSRLRVSATFWQNPRNHFRCQVQFYGLSENDEWTQDRAKPVTQIVSAEAWGRADCGITSASYHQGVLSATILYEILLGKATLYAVLVSALVLMAMVKRKDSRGRAKRSGSGATNFSLLKQAGDVEENPGPTSMDWIWRILFLVGAATGAHSGPGMRTEDLPKAVVFLEPQWYRVLEKDSVTLKCQGAYSPEDNSTQWFHNESLISSQASSYFIDAATVDDSGEYRCQTNLSTLSDPVQLEVHIGWLLLQAPRWVFKEEDPIHLRCHSWKNTALHKVTYLQNGKGRKYFHHNSDFYIPKATLKDSGSYFCRGLVGSKNVSSETVNITITQGLAVSTISSFFPPGYQGSGGGGSGGGGSGGGGSFEQVQLQQPGAELVKPGASVKMSCKASGYAFSSYWINWMKQKPGQGLEWIGQIYPGDGDTNYNGKFKGRATLTADTSSSTAYMQLSSLTSEDSAVYFCARSITTVVGCAMDYWGQGTSVTVSSTRIQNPDPAVYQLRDSKSSDKSVCLFTDFDSQTNVSQSKDSDVYITDKCVLDMRSMDFKSNSAVAWSNKSDFACANAFNNSIIPEDTFFPSSDVPCDVKLVEKSFETDTNLNFQNLSVIGFRILLLKVAGFNLLMTLRLWSSRAKRSGSGVKQTLNFDLLKLAGDVESNPGPSRGHMTEYKPTVRLATRDDVPRAVRTLAAAFADYPATRHTVDPDRHIERVTELQELFLTRVGLDIGKVWVADDGAAVAVWTTPESVEAGAVFAEIGPRMAELSGSRLAAQQQMEGLLAPHRPKEPAWFLATVGVSPDHQGKGLGSAVVLPGVEAAERAGVPAFLETSAPRNLPFYERLGFTVTADVEVPEGPRTWCMTRKPGA

SEQ ID NO: 15617 - protein, 1277 aa, Artificial Sequence
  Synthetic Polypeptide
MALPVTALLLPLALLLHAARPGMRTEDLPKAVVFLEPQWYRVLEKDSVTLKCQGAYSPEDNSTQWFHNESLISSQASSYFIDAATVDDSGEYRCQTNLSTLSDPVQLEVHIGWLLLQAPRWVFKEEDPIHLRCHSWKNTALHKVTYLQNGKGRKYFHHNSDFYIPKATLKDSGSYFCRGLVGSKNVSSETVNITITQGLAVSTISSFFPPGYQGTGGGGSGGGGSGGGGSEFDIQMTQSPSSLSASVGDRVTITCKASDHINNWLAWYQQKPGQAPKLLIYGATTLETGVPSRFSGSGSGTDYTLTISSLQPEDFATYYCQQSWNTPWTFGQGTKLEIKRLEDLKNVFPPEVAVFEPSEAEISHTQKATLVCLATGFYPDHVELSWWVNGKEVHSGVCTDPQPLKEQPALNDSRYCLSSRLRVSATFWQNPRNHFRCQVQFYGLSENDEWTQDRAKPVTQIVSAEAWGRADCGFTSESYQQGVLSATILYEILLGKATLYAVLVSALVLMAMVKRKDSRGRAKRSGSGATNFSLLKQAGDVEENPGPTSMDWIWRILFLVGAATGAHSGPGMRTEDLPKAVVFLEPQWYRVLEKDSVTLKCQGAYSPEDNSTQWFHNESLISSQASSYFIDAATVDDSGEYRCQTNLSTLSDPVQLEVHIGWLLLQAPRWVFKEEDPIHLRCHSWKNTALHKVTYLQNGKGRKYFHHNSDFYIPKATLKDSGSYFCRGLVGSKNVSSETVNITITQGLAVSTISSFFPPGYQGSGGGGSGGGGSGGGGSFEQVQLQQPGAELVKPGASVKMSCKASGYAFSSYWINWMKQKPGQGLEWIGQIYPGDGDTNYNGKFKGRATLTADTSSSTAYMQLSSLTSEDSAVYFCARSITTVVGCAMDYWGQGTSVTVSSTRIQNPDPAVYQLRDSKSSDKSVCLFTDFDSQTNVSQSKDSDVYITDKCVLDMRSMDFKSNSAVAWSNKSDFACANAFNNSIIPEDTFFPSPESSCDVKLVEKSFETDTNLNFQNLSVIGFRILLLKVAGFNLLMTLRLWSSRAKRSGSGVKQTLNFDLLKLAGDVESNPGPSRGHMTEYKPTVRLATRDDVPRAVRTLAAAFADYPATRHTVDPDRHIERVTELQELFLTRVGLDIGKVWVADDGAAVAVWTTPESVEAGAVFAEIGPRMAELSGSRLAAQQQMEGLLAPHRPKEPAWFLATVGVSPDHQGKGLGSAVVLPGVEAAERAGVPAFLETSAPRNLPFYERLGFTVTADVEVPEGPRTWCMTRKPGA

SEQ ID NO: 15618 - protein, 1044 aa, Artificial Sequence
  Synthetic Polypeptide
MALPVTALLLPLALLLHAARPGMRTEDLPKAVVFLEPQWYRVLEKDSVTLKCQGAYSPEDNSTQWFHNESLISSQASSYFIDAATVDDSGEYRCQTNLSTLSDPVQLEVHIGWLLLQAPRWVFKEEDPIHLRCHSWKNTALHKVTYLQNGKGRKYFHHNSDFYIPKATLKDSGSYFCRGLVGSKNVSSETVNITITQGLAVSTISSFFPPGYQGTGGGGSGGGGSGGGGSEFDIQMTQSPSSLSASVGDRVTITCKASDHINNWLAWYQQKPGQAPKLLIYGATTLETGVPSRFSGSGSGTDYTLTISSLQPEDFATYYCQQSWNTPWTFGQGTKLEIKRLEDLKNVFPPEVAVFEPSEAEISHTQKATLVCLATGFYPDHVELSWWVNGKEVHSGVCTDPQPLKEQPALNDSRYCLSSRLRVSATFWQNPRNHFRCQVQFYGLSENDEWTQDRAKPVTQIVSAEAWGRADCGFTSESYQQGVLSATILYEILLGKATLYAVLVSALVLMAMVKRKDSRGRAKRSGSGATNFSLLKQAGDVEENPGPTSMDWIWRILFLVGAATGAHSGPGMRTEDLPKAVVFLEPQWYRVLEKDSVTLKCQGAYSPEDNSTQWFHNESLISSQASSYFIDAATVDDSGEYRCQTNLSTLSDPVQLEVHIGWLLLQAPRWVFKEEDPIHLRCHSWKNTALHKVTYLQNGKGRKYFHHNSDFYIPKATLKDSGSYFCRGLVGSKNVSSETVNITITQGLAVSTISSFFPPGYQGSGGGGSGGGGSGGGGSFEQVQLQQPGAELVKPGASVKMSCKASGYAFSSYWINWMKQKPGQGLEWIGQIYPGDGDTNYNGKFKGRATLTADTSSSTAYMQLSSLTSEDSAVYFCARSITTVVGCAMDYWGQGTSVTVSSTRIQNPDPAVYQLRDSKSSDKSVCLFTDFDSQTNVSQSKDSDVYITDKCVLDMRSMDFKSNSAVAWSNKSDFACANAFNNSIIPEDTFFPSPESSCDVKLVEKSFETDTNLNFQNLSVIGFRILLLKVAGFNLLMTLRLWSS

SEQ ID NO: 15619 - protein, 1269 aa, Artificial Sequence
  Synthetic Polypeptide
MALPVTALLLPLALLLHAARPGMRTEDLPKAVVFLEPQWYRVLEKDSVTLKCQGAYSPEDNSTQWFHNESLISSQASSYFIDAATVDDSGEYRCQTNLSTLSDPVQLEVHIGWLLLQAPRWVFKEEDPIHLRCHSWKNTALHKVTYLQNGKGRKYFHHNSDFYIPKATLKDSGSYFCRGLVGSKNVSSETVNITITQGLAVSTISSFFPPGYQGTGGGGSGGGGSGGGGSEFDIQMTQSPSSLSASVGDRVTITCKASDHINNWLAWYQQKPGQAPKLLIYGATTLETGVPSRFSGSGSGTDYTLTISSLQPEDFATYYCQQSWNTPWTFGQGTKLEIKRLEDLKNVFPPEVAVFEPSEAEISHTQKATLVCLATGFYPDHVELSWWVNGKEVHSGVCTDPQPLKEQPALNDSRYCLSSRLRVSATFWQNPRNHFRCQVQFYGLSENDEWTQDRAKPVTQIVSAEAWGRADCGFTSESYQQGVLSATILYEILLGKATLYAVLVSALVLMAMVKRKDSRGRAKRSGSGATNFSLLKQAGDVEENPGPTSMDWIWRILFLVGAATGAHSGPGMRTEDLPKAVVFLEPQWYRVLEKDSVTLKCQGAYSPEDNSTQWFHNESLISSQASSYFIDAATVDDSGEYRCQTNLSTLSDPVQLEVHIGWLLLQAPRWVFKEEDPIHLRCHSWKNTALHKVTYLQNGKGRKYFHHNSDFYIPKATLKDSGSYFCRGLVGSKNVSSETVNITITQGLAVSTISSFFPPGYQGSGGGGSGGGGSGGGGSFEQVQLQQPGAELVKPGASVKMSCKASGYAFSSYWINWMKQKPGQGLEWIGQIYPGDGDTNYNGKFKGRATLTADTSSSTAYMQLSSLTSEDSAVYFCARSITTVVGCAMDYWGQGTSVTVSSTRIQNPDPAVYQLRDSKSSDKSVCLFTDFDSQTNVSQSKDSDVYITDKCVLDMRSMDFKSNSAVAWSNKSDFACANAFNNSIIPEDTFFPSPESSCDVKLVEKSFETDTNLNFQNLSVIGFRILLLKVAGFNLLMTLRLWSSRAKRSGSGVKQTLNFDLLKLAGDVESNPGPSRGGIHTMATYEVLCEVARKLGTDDREVVLFLLNVFIPQPTLAQLIGALRALKEEGRLTFPLLAECLFRAGRRDLLRDLLHLDPRFLERHLAGTMSYFSPYQLTVLHVDGELCARDIRSLIFLSKDTIGSRSTPQTFLHWVYCMENLDLLGPTDVDALMSMLRSLSRVDLQRQVQTLMGLHLSGPSHSQHYRHTP

SEQ ID NO: 15620 - protein, 1048 aa, Artificial Sequence
  Synthetic Polypeptide
MALPVTALLLPLALLLHAARPGMRTEDLPKAVVFLEPQWYRVLEKDSVTLKCQGAYSPEDNSTQWFHNESLISSQASSYFIDAATVDDSGEYRCQTNLSTLSDPVQLEVHIGWLLLQAPRWVFKEEDPIHLRCHSWKNTALHKVTYLQNGKGRKYFHHNSDFYIPKATLKDSGSYFCRGLVGSKNVSSETVNITITQGLAVSTISSFFPPGYQGTGGGGSGGGGSGGGGSEFDIQMTQSPSSLSASVGDRVTITCKASDHINNWLAWYQQKPGQAPKLLIYGATTLETGVPSRFSGSGSGTDYTLTISSLQPEDFATYYCQQSWNTPWTFGQGTKLEIKRLEIQNPDPAVYQLRDSKSSDKSVCLFTDFDSQTNVSQSKDSDVYITDKCVLDMRSMDFKSNSAVAWSNKSDFACANAFNNSIIPEDTFFPSPESSCDVKLVEKSFETDTNLNFQNLSVIGFRILLLKVAGFNLLMTLRLWSSRAKRSGSGVKQTLNFDLLKLAGDVESNPGPTSMDWIWRILFLVGAATGAHSGPGMRTEDLPKAVVFLEPQWYRVLEKDSVTLKCQGAYSPEDNSTQWFHNESLISSQASSYFIDAATVDDSGEYRCQTNLSTLSDPVQLEVHIGWLLLQAPRWVFKEEDPIHLRCHSWKNTALHKVTYLQNGKGRKYFHHNSDFYIPKATLKDSGSYFCRGLVGSKNVSSETVNITITQGLAVSTISSFFPPGYQGSGGGGSGGGGSGGGGSFEQVQLQQPGAELVKPGASVKMSCKASGYAFSSYWINWMKQKPGQGLEWIGQIYPGDGDTNYNGKFKGRATLTADTSSSTAYMQLSSLTSEDSAVYFCARSITTVVGCAMDYWGQGTSVTVSSTREDLKNVFPPEVAVFEPSEAEISHTQKATLVCLATGFYPDHVELSWWVNGKEVHSGVCTDPQPLKEQPALNDSRYCLSSRLRVSATFWQNPRNHFRCQVQFYGLSENDEWTQDRAKPVTQIVSAEAWGRADCGFTSESYQQGVLSATILYEILLGKATLYAVLVSALVLMAMVKRKDSRG

SEQ ID NO: 15621 - protein, 1270 aa, Artificial Sequence
  Synthetic Polypeptide
MALPVTALLLPLALLLHAARPGMRTEDLPKAVVFLEPQWYRVLEKDSVTLKCQGAYSPEDNSTQWFHNESLISSQASSYFIDAATVDDSGEYRCQTNLSTLSDPVQLEVHIGWLLLQAPRWVFKEEDPIHLRCHSWKNTALHKVTYLQNGKGRKYFHHNSDFYIPKATLKDSGSYFCRGLVGSKNVSSETVNITITQGLAVSTISSFFPPGYQGTGGGGSGGGGSGGGGSEFDIQMTQSPSSLSASVGDRVTITCKASDHINNWLAWYQQKPGQAPKLLIYGATTLETGVPSRFSGSGSGTDYTLTISSLQPEDFATYYCQQSWNTPWTFGQGTKLEIKRLEIQNPDPAVYQLRDSKSSDKSVCLFTDFDSQTNVSQSKDSDVYITDKCVLDMRSMDFKSNSAVAWSNKSDFACANAFNNSIIPEDTFFPSPESSCDVKLVEKSFETDTNLNFQNLSVIGFRILLLKVAGFNLLMTLRLWSSRAKRSGSGVKQTLNFDLLKLAGDVESNPGPTSMDWIWRILFLVGAATGAHSGPGMRTEDLPKAVVFLEPQWYRVLEKDSVTLKCQGAYSPEDNSTQWFHNESLISSQASSYFIDAATVDDSGEYRCQTNLSTLSDPVQLEVHIGWLLLQAPRWVFKEEDPIHLRCHSWKNTALHKVTYLQNGKGRKYFHHNSDFYIPKATLKDSGSYFCRGLVGSKNVSSETVNITITQGLAVSTISSFFPPGYQGSGGGGSGGGGSGGGGSFEQVQLQQPGAELVKPGASVKMSCKASGYAFSSYWINWMKQKPGQGLEWIGQIYPGDGDTNYNGKFKGRATLTADTSSSTAYMQLSSLTSEDSAVYFCARSITTVVGCAMDYWGQGTSVTVSSTREDLKNVFPPEVAVFEPSEAEISHTQKATLVCLATGFYPDHVELSWWVNGKEVHSGVCTDPQPLKEQPALNDSRYCLSSRLRVSATFWQNPRNHFRCQVQFYGLSENDEWTQDRAKPVTQIVSAEAWGRADCGFTSESYQQGVLSATILYEILLGKATLYAVLVSALVLMAMVKRKDSRGRAKRSGSGATNFSLLKQAGDVEENPGPSRGGIHTMATYEVLCEVARKLGTDDREVVLFLLNVFIPQPTLAQLIGALRALKEEGRLTFPLLAECLFRAGRRDLLRDLLHLDPRFLERHLAGTMSYFSPYQLTVLHVDGELCARDIRSLIFLSKDTIGSRSTPQTFLHWVYCMENLDLLGPTDVDALMSMLRSLSRVDLQRQVQTLMGLHLSGPSHSQHYRHTP

SEQ ID NO: 15622 - protein, 1277 aa, Artificial Sequence
  Synthetic Polypeptide
MALPVTALLLPLALLLHAARPGMRTEDLPKAVVFLEPQWYRVLEKDSVTLKCQGAYSPEDNSTQWFHNESLISSQASSYFIDAATVDDSGEYRCQTNLSTLSDPVQLEVHIGWLLLQAPRWVFKEEDPIHLRCHSWKNTALHKVTYLQNGKGRKYFHHNSDFYIPKATLKDSGSYFCRGLVGSKNVSSETVNITITQGLAVSTISSFFPPGYQGTGGGGSGGGGSGGGGSEFDIQMTQSPSSLSASVGDRVTITCKASDHINNWLAWYQQKPGQAPKLLIYGATTLETGVPSRFSGSGSGTDYTLTISSLQPEDFATYYCQQSWNTPWTFGQGTKLEIKRLEDLKNVFPPEVAVFEPSEAEISHTQKATLVCLATGFYPDHVELSWWVNGKEVHSGVSTDPQPLKEQPALNDSRYCLSSRLRVSATFWQNPRNHFRCQVQFYGLSENDEWTQDRAKPVTQIVSAEAWGRADCGFTSESYQQGVLSATILYEILLGKATLYAVLVSALVLMAMVKRKDSRGRAKRSGSGATNFSLLKQAGDVEENPGPTSMDWIWRILFLVGAATGAHSGPGMRTEDLPKAVVFLEPQWYRVLEKDSVTLKCQGAYSPEDNSTQWFHNESLISSQASSYFIDAATVDDSGEYRCQTNLSTLSDPVQLEVHIGWLLLQAPRWVFKEEDPIHLRCHSWKNTALHKVTYLQNGKGRKYFHHNSDFYIPKATLKDSGSYFCRGLVGSKNVSSETVNITITQGLAVSTISSFFPPGYQGSGGGGSGGGGSGGGGSFEQVQLQQPGAELVKPGASVKMSCKASGYAFSSYWINWMKQKPGQGLEWIGQIYPGDGDTNYNGKFKGRATLTADTSSSTAYMQLSSLTSEDSAVYFCARSITTVVGCAMDYWGQGTSVTVSSTRIQNPDPAVYQLRDSKSSDKSVCLFTDFDSQTNVSQSKDSDVYITDKTVLDMRSMDFKSNSAVAWSNKSDFACANAFNNSIIPEDTFFPSPESSCDVKLVEKSFETDTNLNFQNLSVIGFRILLLKVAGFNLLMTLRLWSSRAKRSGSGVKQTLNFDLLKLAGDVESNPGPSRGHMTEYKPTVRLATRDDVPRAVRTLAAAFADYPATRHTVDPDRHIERVTELQELFLTRVGLDIGKVWVADDGAAVAVWTTPESVEAGAVFAEIGPRMAELSGSRLAAQQQMEGLLAPHRPKEPAWFLATVGVSPDHQGKGLGSAVVLPGVEAAERAGVPAFLETSAPRNLPFYERLGFTVTADVEVPEGPRTWCMTRKPGA

SEQ ID NO: 15623 - protein, 1359 aa, Artificial Sequence
  Synthetic Polypeptide
MALPVTALLLPLALLLHAARPGMRTEDLPKAVVFLEPQWYRVLEKDSVTLKCQGAYSPEDNSTQWFHNESLISSQASSYFIDAATVDDSGEYRCQTNLSTLSDPVQLEVHIGWLLLQAPRWVFKEEDPIHLRCHSWKNTALHKVTYLQNGKGRKYFHHNSDFYIPKATLKDSGSYFCRGLVGSKNVSSETVNITITQGLAVSTISSFFPPGYQGTGGGGSGGGGSGGGGSEFDIQMTQSPSSLSASVGDRVTITCKASDHINNWLAWYQQKPGQAPKLLIYGATTLETGVPSRFSGSGSGTDYTLTISSLQPEDFATYYCQQSWNTPWTFGQGTKLEIKRLEDLKNVFPPEVAVFEPSEAEISHTQKATLVCLATGFYPDHVELSWWVNGKEVHSGVSTDPQPLKEQPALNDSRYCLSSRLRVSATFWQNPRNHFRCQVQFYGLSENDEWTQDRAKPVTQIVSAEAWGRADCGFTSESYQQGVLSATILYEILLGKATLYAVLVSALVLMAMVKRKDSRGRAKRSGSGATNFSLLKQAGDVEENPGPTSMDWIWRILFLVGAATGAHSGPGMRTEDLPKAVVFLEPQWYRVLEKDSVTLKCQGAYSPEDNSTQWFHNESLISSQASSYFIDAATVDDSGEYRCQTNLSTLSDPVQLEVHIGWLLLQAPRWVFKEEDPIHLRCHSWKNTALHKVTYLQNGKGRKYFHHNSDFYIPKATLKDSGSYFCRGLVGSKNVSSETVNITITQGLAVSTISSFFPPGYQGSGGGGSGGGGSGGGGSFEQVQLQQPGAELVKPGASVKMSCKASGYAFSSYWINWMKQKPGQGLEWIGQIYPGDGDTNYNGKFKGRATLTADTSSSTAYMQLSSLTSEDSAVYFCARSITTVVGCAMDYWGQGTSVTVSSTREQKLISEEDGSGTPFPSLAPPIMLLVDGKQQMVVVCLVLDVAPPGLDSPIWFSAGNGSALDAFTYGPSPATDGTWTNLAHLSLPSEELASWEPLVCHTGPGAEGHSRSTQPMHLSGEASTARTCPQEPLRGTPGGALWLGVLRLLLFKLLLFDLLLTCSCLCDPAGPLPSPATTTRLRALGSHRLHPATETGGREATSSPRPQPRDRRWGDTPPGRKPGSPVRAKRSGSGVKQTLNFDLLKLAGDVESNPGPSRGHMTEYKPTVRLATRDDVPRAVRTLAAAFADYPATRHTVDPDRHIERVTELQELFLTRVGLDIGKVWVADDGAAVAVWTTPESVEAGAVFAEIGPRMAELSGSRLAAQQQMEGLLAPHRPKEPAWFLATVGVSPDHQGKGLGSAVVLPGVEAAERAGVPAFLETSAPRNLPFYERLGFTVTADVEVPEGPRTWCMTRKPGA

SEQ ID NO: 15624 - protein, 1314 aa, Artificial Sequence
  Synthetic Polypeptide
MALPVTALLLPLALLLHAARPGMRTEDLPKAVVFLEPQWYRVLEKDSVTLKCQGAYSPEDNSTQWFHNESLISSQASSYFIDAATVDDSGEYRCQTNLSTLSDPVQLEVHIGWLLLQAPRWVFKEEDPIHLRCHSWKNTALHKVTYLQNGKGRKYFHHNSDFYIPKATLKDSGSYFCRGLVGSKNVSSETVNITITQGLAVSTISSFFPPGYQGTGGGGSGGGGSGGGGSEFDIQMTQSPSSLSASVGDRVTITCKASDHINNWLAWYQQKPGQAPKLLIYGATTLETGVPSRFSGSGSGTDYTLTISSLQPEDFATYYCQQSWNTPWTFGQGTKLEIKRLEGKPIPNPLLGLDSTGSGDKQLDADVSPKPTIFLPSIAETKLQKAGTYLCLLEKFFPDVIKIHWQEKKSNTILGSQEGNTMKTNDTYMKFSWLTVPEKSLDKEHRCIVRHENNKNGVDQEIIFPPIKTDVITMDPKDNCSKDANDTLLLQLTNTSAYYMYLLLLLKSVVYFAIITCCLLRRTAFCCNGEKSRAKRSGSGATNFSLLKQAGDVEENPGPTSMDWIWRILFLVGAATGAHSGPGMRTEDLPKAVVFLEPQWYRVLEKDSVTLKCQGAYSPEDNSTQWFHNESLISSQASSYFIDAATVDDSGEYRCQTNLSTLSDPVQLEVHIGWLLLQAPRWVFKEEDPIHLRCHSWKNTALHKVTYLQNGKGRKYFHHNSDFYIPKATLKDSGSYFCRGLVGSKNVSSETVNITITQGLAVSTISSFFPPGYQGSGGGGSGGGGSGGGGSFEQVQLQQPGAELVKPGASVKMSCKASGYAFSSYWINWMKQKPGQGLEWIGQIYPGDGDTNYNGKFKGRATLTADTSSSTAYMQLSSLTSEDSAVYFCARSITTVVGCAMDYWGQGTSVTVSSTREQKLISEEDGSGSQPHTKPSVFVMKNGTNVACLVKEFYPKDIRINLVSSKKITEFDPAIVISPSGKYNAVKLGKYEDSNSVTCSVQHDNKTVHSTDFEVKTDSTDHVKPKETENTKQPSKSCHKPKAIVHTEKVNMMSLTVLGLRMLFAKTVAVNFLLTAKLFFLRAKRSGSGVKQTLNFDLLKLAGDVESNPGPSRGHMTEYKPTVRLATRDDVPRAVRTLAAAFADYPATRHTVDPDRHIERVTELQELFLTRVGLDIGKVWVADDGAAVAVWTTPESVEAGAVFAEIGPRMAELSGSRLAAQQQMEGLLAPHRPKEPAWFLATVGVSPDHQGKGLGSAVVLPGVEAAERAGVPAFLETSAPRNLPFYERLGFTVTADVEVPEGPRTWCMTRKPGA

SEQ ID NO: 15625 - protein, 1052 aa, Artificial Sequence
  Synthetic Polypeptide
MALPVTALLLPLALLLHAARPGMRTEDLPKAVVFLEPQWYRVLEKDSVTLKCQGAYSPEDNSTQWFHNESLISSQASSYFIDAATVDDSGEYRCQTNLSTLSDPVQLEVHIGWLLLQAPRWVFKEEDPIHLRCHSWKNTALHKVTYLQNGKGRKYFHHNSDFYIPKATLKDSGSYFCRGLVGSKNVSSETVNITITQGLAVSTISSFFPPGYQGTGGGGSGGGGSGGGGSEFDIQMTQSPSSLSASVGDRVTITCKASDHINNWLAWYQQKPGQAPKLLIYGATTLETGVPSRFSGSGSGTDYTLTISSLQPEDFATYYCQQSWNTPWTFGQGTKLEIKRLESQPHTKPSVFVMKNGTNVACLVKEFYPKDIRINLVSSKKITEFDPAIVISPSGKYNAVKLGKYEDSNSVTCSVQHDNKTVHSTDFEVKTDSTDHVKPKETENTKQPSKSCHKPKAIVHTEKVNMMSLTVLGLRMLFAKTVAVNFLLTAKLFFLRAKRSGSGATNFSLLKQAGDVEENPGPTSMDWIWRILFLVGAATGAHSGPGMRTEDLPKAVVFLEPQWYRVLEKDSVTLKCQGAYSPEDNSTQWFHNESLISSQASSYFIDAATVDDSGEYRCQTNLSTLSDPVQLEVHIGWLLLQAPRWVFKEEDPIHLRCHSWKNTALHKVTYLQNGKGRKYFHHNSDFYIPKATLKDSGSYFCRGLVGSKNVSSETVNITITQGLAVSTISSFFPPGYQGSGGGGSGGGGSGGGGSFEQVQLQQPGAELVKPGASVKMSCKASGYAFSSYWINWMKQKPGQGLEWIGQIYPGDGDTNYNGKFKGRATLTADTSSSTAYMQLSSLTSEDSAVYFCARSITTVVGCAMDYWGQGTSVTVSSTRDKQLDADVSPKPTIFLPSIAETKLQKAGTYLCLLEKFFPDVIKIHWQEKKSNTILGSQEGNTMKTNDTYMKFSWLTVPEKSLDKEHRCIVRHENNKNGVDQEIIFPPIKTDVITMDPKDNCSKDANDTLLLQLTNTSAYYMYLLLLLKSVVYFAIITCCLLRRTAFCCNGEKS

SEQ ID NO: 15626 - protein, 1454 aa, Artificial Sequence
  Synthetic Polypeptide
MALPVTALLLPLALLLHAARPGMRTEDLPKAVVFLEPQWYRVLEKDSVTLKCQGAYSPEDNSTQWFHNESLISSQASSYFIDAATVDDSGEYRCQTNLSTLSDPVQLEVHIGWLLLQAPRWVFKEEDPIHLRCHSWKNTALHKVTYLQNGKGRKYFHHNSDFYIPKATLKDSGSYFCRGLVGSKNVSSETVNITITQGLAVSTISSFFPPGYQGTGGGGSGGGGSGGGGSEFDIQMTQSPSSLSASVGDRVTITCKASDHINNWLAWYQQKPGQAPKLLIYGATTLETGVPSRFSGSGSGTDYTLTISSLQPEDFATYYCQQSWNTPWTFGQGTKLEIKRGQPKANPTVTLFPPSSEELQANKATLVCLISDFYPGAVTVAWKADGSPVKAGVETTKPSKQSNNKYAASSYLSLTPEQWKSHRSYSCQVTHEGSTVEKTVAPTECSGSQSFGLLDPKLCYLLDGILFIYGVILTALFLRVKFSRSADAPAYQQGQNQLYNELNLGRREEYDVLDKRRGRDPEMGGKPQRRKNPQEGLYNELQKDKMAEAYSEIGMKGERRRGKGHDGLYQGLSTATKDTYDALHMQALPPRRAKRSGSGATNFSLLKQAGDVEENPGPTSMDWIWRILFLVGAATGAHSGPGMRTEDLPKAVVFLEPQWYRVLEKDSVTLKCQGAYSPEDNSTQWFHNESLISSQASSYFIDAATVDDSGEYRCQTNLSTLSDPVQLEVHIGWLLLQAPRWVFKEEDPIHLRCHSWKNTALHKVTYLQNGKGRKYFHHNSDFYIPKATLKDSGSYFCRGLVGSKNVSSETVNITITQGLAVSTISSFFPPGYQGSGGGGSGGGGSGGGGSFEQVQLQQPGAELVKPGASVKMSCKASGYAFSSYWINWMKQKPGQGLEWIGQIYPGDGDTNYNGKFKGRATLTADTSSSTAYMQLSSLTSEDSAVYFCARSITTVVGCAMDYWGQGTSVTVSSASTKGPSVFPLAPSSKSTSGGTAALGCLVKDYFPEPVTVSWNSGALTSGVHTFPAVLQSSGLYSLSSVVTVPSSSLGTQTYICNVNHKPSNTKVDKRVEPKSCGTQSFGLLDPKLCYLLDGILFIYGVILTALFLRVKFSRSADAPAYQQGQNQLYNELNLGRREEYDVLDKRRGRDPEMGGKPQRRKNPQEGLYNELQKDKMAEAYSEIGMKGERRRGKGHDGLYQGLSTATKDTYDALHMQALPPRRAKRSGSGVKQTLNFDLLKLAGDVESNPGPSRGHMTEYKPTVRLATRDDVPRAVRTLAAAFADYPATRHTVDPDRHIERVTELQELFLTRVGLDIGKVWVADDGAAVAVWTTPESVEAGAVFAEIGPRMAELSGSRLAAQQQMEGLLAPHRPKEPAWFLATVGVSPDHQGKGLGSAVVLPGVEAAERAGVPAFLETSAPRNLPFYERLGFTVTADVEVPEGPRTWCMTRKPGA

SEQ ID NO: 15627 - protein, 1240 aa, Artificial Sequence
  Synthetic Polypeptide
MALPVTALLLPLALLLHAARPGMRTEDLPKAVVFLEPQWYRVLEKDSVTLKCQGAYSPEDNSTQWFHNESLISSQASSYFIDAATVDDSGEYRCQTNLSTLSDPVQLEVHIGWLLLQAPRWVFKEEDPIHLRCHSWKNTALHKVTYLQNGKGRKYFHHNSDFYIPKATLKDSGSYFCRGLVGSKNVSSETVNITITQGLAVSTISSFFPPGYQGTGGGGSGGGGSGGGGSEFDIQMTQSPSSLSASVGDRVTITCKASDHINNWLAWYQQKPGQAPKLLIYGATTLETGVPSRFSGSGSGTDYTLTISSLQPEDFATYYCQQSWNTPWTFGQGTKLEIKRLEDLKNVFPPEVAVFEPSEAEISHTQKATLVCLATGFYPDHVELSWWVNGKEVHSGVSTDPQPLKEQPALNDSRYCLSSRLRVSATFWQNPRNHFRCQVQFYGLSENDEWTQDRAKPVTQIVSAEAWGRADCGSQSFGLLDPKLCYLLDGILFIYGVILTALFLRVKFSRSADAPAYQQGQNQLYNELNLGRREEYDVLDKRRGRDPEMGGKPQRRKNPQEGLYNELQKDKMAEAYSEIGMKGERRRGKGHDGLYQGLSTATKDTYDALHMQALPPRRAKRSGSGATNFSLLKQAGDVEENPGPTSMDWIWRILFLVGAATGAHSGPGMRTEDLPKAVVFLEPQWYRVLEKDSVTLKCQGAYSPEDNSTQWFHNESLISSQASSYFIDAATVDDSGEYRCQTNLSTLSDPVQLEVHIGWLLLQAPRWVFKEEDPIHLRCHSWKNTALHKVTYLQNGKGRKYFHHNSDFYIPKATLKDSGSYFCRGLVGSKNVSSETVNITITQGLAVSTISSFFPPGYQGSGGGGSGGGGSGGGGSFEQVQLQQPGAELVKPGASVKMSCKASGYAFSSYWINWMKQKPGQGLEWIGQIYPGDGDTNYNGKFKGRATLTADTSSSTAYMQLSSLTSEDSAVYFCARSITTVVGCAMDYWGQGTSVTVSSTRIQNPDPAVYQLRDSKSSDKSVCLFTDFDSQTNVSQSKDSDVYITDKTVLDMRSMDFKSNSAVAWSNKSDFACANAFNNSIIPEDTFFPSPESSCGTQSFGLLDPKLCYLLDGILFIYGVILTALFLRVKFSRSADAPAYQQGQNQLYNELNLGRREEYDVLDKRRGRDPEMGGKPQRRKNPQEGLYNELQKDKMAEAYSEIGMKGERRRGKGHDGLYQGLSTATKDTYDALHMQALPPR

SEQ ID NO: 15628 - protein, 1240 aa, Artificial Sequence
  Synthetic Polypeptide
MALPVTALLLPLALLLHAARPGMRTEDLPKAVVFLEPQWYRVLEKDSVTLKCQGAYSPEDNSTQWFHNESLISSQASSYFIDAATVDDSGEYRCQTNLSTLSDPVQLEVHIGWLLLQAPRWVFKEEDPIHLRCHSWKNTALHKVTYLQNGKGRKYFHHNSDFYIPKATLKDSGSYFCRGLVGSKNVSSETVNITITQGLAVSTISSFFPPGYQGTGGGGSGGGGSGGGGSEFDIQMTQSPSSLSASVGDRVTITCKASDHINNWLAWYQQKPGQAPKLLIYGATTLETGVPSRFSGSGSGTDYTLTISSLQPEDFATYYCQQSWNTPWTFGQGTKLEIKRLEDLKNVFPPEVAVFEPSKAEIAHTQKATLVCLATGFYPDHVELSWWVNGKEVHSGVCTDPQPLKEQPALNDSRYCLSSRLRVSATFWQNPRNHFRCQVQFYGLSENDEWTQDRAKPVTQIVSAEAWGRADCGSQSFGLLDPKLCYLLDGILFIYGVILTALFLRVKFSRSADAPAYQQGQNQLYNELNLGRREEYDVLDKRRGRDPEMGGKPQRRKNPQEGLYNELQKDKMAEAYSEIGMKGERRRGKGHDGLYQGLSTATKDTYDALHMQALPPRRAKRSGSGATNFSLLKQAGDVEENPGPTSMDWIWRILFLVGAATGAHSGPGMRTEDLPKAVVFLEPQWYRVLEKDSVTLKCQGAYSPEDNSTQWFHNESLISSQASSYFIDAATVDDSGEYRCQTNLSTLSDPVQLEVHIGWLLLQAPRWVFKEEDPIHLRCHSWKNTALHKVTYLQNGKGRKYFHHNSDFYIPKATLKDSGSYFCRGLVGSKNVSSETVNITITQGLAVSTISSFFPPGYQGSGGGGSGGGGSGGGGSFEQVQLQQPGAELVKPGASVKMSCKASGYAFSSYWINWMKQKPGQGLEWIGQIYPGDGDTNYNGKFKGRATLTADTSSSTAYMQLSSLTSEDSAVYFCARSITTVVGCAMDYWGQGTSVTVSSTRIQNPDPAVYQLRDSKSSDKSVCLFTDFDSQTNVSQSKDSDVYITDKCVLDMRSMDFKSNSAVAWSNKSDFACANAFNNSIIPEDTFFPSSDVPCGTQSFGLLDPKLCYLLDGILFIYGVILTALFLRVKFSRSADAPAYQQGQNQLYNELNLGRREEYDVLDKRRGRDPEMGGKPQRRKNPQEGLYNELQKDKMAEAYSEIGMKGERRRGKGHDGLYQGLSTATKDTYDALHMQALPPR

SEQ ID NO: 15629 - protein, 1311 aa, Artificial Sequence
  Synthetic Polypeptide
MALPVTALLLPLALLLHAARPGMRTEDLPKAVVFLEPQWYRVLEKDSVTLKCQGAYSPEDNSTQWFHNESLISSQASSYFIDAATVDDSGEYRCQTNLSTLSDPVQLEVHIGWLLLQAPRWVFKEEDPIHLRCHSWKNTALHKVTYLQNGKGRKYFHHNSDFYIPKATLKDSGSYFCRGLVGSKNVSSETVNITITQGLAVSTISSFFPPGYQGTGGGGSGGGGSGGGGSEFDIQMTQSPSSLSASVGDRVTITCKASDHINNWLAWYQQKPGQAPKLLIYGATTLETGVPSRFSGSGSGTDYTLTISSLQPEDFATYYCQQSWNTPWTFGQGTKLEIKRLEGKPIPNPLLGLDSTGSGEDLKNVFPPEVAVFEPSEAEISHTQKATLVCLATGFYPDHVELSWWVNGKEVHSGVSTDPQPLKEQPALNDSRYCLSSRLRVSATFWQNPRNHFRCQVQFYGLSENDEWTQDRAKPVTQIVSAEAWGRADCGSQSFGLLDPKLCYLLDGILFIYGVILTALFLRVKFSRSADAPAYQQGQNQLYNELNLGRREEYDVLDKRRGRDPEMGGKPQRRKNPQEGLYNELQKDKMAEAYSEIGMKGERRRGKGHDGLYQGLSTATKDTYDALHMQALPPRRAKRSGSGATNFSLLKQAGDVEENPGPTSMDWIWRILFLVGAATGAHSGPGMRTEDLPKAVVFLEPQWYRVLEKDSVTLKCQGAYSPEDNSTQWFHNESLISSQASSYFIDAATVDDSGEYRCQTNLSTLSDPVQLEVHIGWLLLQAPRWVFKEEDPIHLRCHSWKNTALHKVTYLQNGKGRKYFHHNSDFYIPKATLKDSGSYFCRGLVGSKNVSSETVNITITQGLAVSTISSFFPPGYQGSGGGGSGGGGSGGGGSFEQVQLQQPGAELVKPGASVKMSCKASGYAFSSYWINWMKQKPGQGLEWIGQIYPGDGDTNYNGKFKGRATLTADTSSSTAYMQLSSLTSEDSAVYFCARSITTVVGCAMDYWGQGTSVTVSSTREQKLISEEDGSGIQNPDPAVYQLRDSKSSDKSVCLFTDFDSQTNVSQSKDSDVYITDKTVLDMRSMDFKSNSAVAWSNKSDFACANAFNNSIIPEDTFFPSPESSCGTQSFGLLDPKLCYLLDGILFIYGVILTALFLRSKRSRLLHSDYMNMTPRRPGPTRKHYQPYAPPRDFAAYRSRVKFSRSADAPAYQQGQNQLYNELNLGRREEYDVLDKRRGRDPEMGGKPQRRKNPQEGLYNELQKDKMAEAYSEIGMKGERRRGKGHDGLYQGLSTATKDTYDALHMQALPPR

SEQ ID NO: 15630 - protein, 1352 aa, Artificial Sequence
  Synthetic Polypeptide
MALPVTALLLPLALLLHAARPGMRTEDLPKAVVFLEPQWYRVLEKDSVTLKCQGAYSPEDNSTQWFHNESLISSQASSYFIDAATVDDSGEYRCQTNLSTLSDPVQLEVHIGWLLLQAPRWVFKEEDPIHLRCHSWKNTALHKVTYLQNGKGRKYFHHNSDFYIPKATLKDSGSYFCRGLVGSKNVSSETVNITITQGLAVSTISSFFPPGYQGTGGGGSGGGGSGGGGSEFDIQMTQSPSSLSASVGDRVTITCKASDHINNWLAWYQQKPGQAPKLLIYGATTLETGVPSRFSGSGSGTDYTLTISSLQPEDFATYYCQQSWNTPWTFGQGTKLEIKRLEGKPIPNPLLGLDSTGSGEDLKNVFPPEVAVFEPSEAEISHTQKATLVCLATGFYPDHVELSWWVNGKEVHSGVSTDPQPLKEQPALNDSRYCLSSRLRVSATFWQNPRNHFRCQVQFYGLSENDEWTQDRAKPVTQIVSAEAWGRADCGSQSFGLLDPKLCYLLDGILFIYGVILTALFLRSKRSRLLHSDYMNMTPRRPGPTRKHYQPYAPPRDFAAYRSRVKFSRSADAPAYQQGQNQLYNELNLGRREEYDVLDKRRGRDPEMGGKPQRRKNPQEGLYNELQKDKMAEAYSEIGMKGERRRGKGHDGLYQGLSTATKDTYDALHMQALPPRRAKRSGSGATNFSLLKQAGDVEENPGPTSMDWIWRILFLVGAATGAHSGPGMRTEDLPKAVVFLEPQWYRVLEKDSVTLKCQGAYSPEDNSTQWFHNESLISSQASSYFIDAATVDDSGEYRCQTNLSTLSDPVQLEVHIGWLLLQAPRWVFKEEDPIHLRCHSWKNTALHKVTYLQNGKGRKYFHHNSDFYIPKATLKDSGSYFCRGLVGSKNVSSETVNITITQGLAVSTISSFFPPGYQGSGGGGSGGGGSGGGGSFEQVQLQQPGAELVKPGASVKMSCKASGYAFSSYWINWMKQKPGQGLEWIGQIYPGDGDTNYNGKFKGRATLTADTSSSTAYMQLSSLTSEDSAVYFCARSITTVVGCAMDYWGQGTSVTVSSTREQKLISEEDGSGIQNPDPAVYQLRDSKSSDKSVCLFTDFDSQTNVSQSKDSDVYITDKTVLDMRSMDFKSNSAVAWSNKSDFACANAFNNSIIPEDTFFPSPESSCGTQSFGLLDPKLCYLLDGILFIYGVILTALFLRSKRSRLLHSDYMNMTPRRPGPTRKHYQPYAPPRDFAAYRSRVKFSRSADAPAYQQGQNQLYNELNLGRREEYDVLDKRRGRDPEMGGKPQRRKNPQEGLYNELQKDKMAEAYSEIGMKGERRRGKGHDGLYQGLSTATKDTYDALHMQALPPR

SEQ ID NO: 15631 - protein, 1313 aa, Artificial Sequence
  Synthetic Polypeptide
MALPVTALLLPLALLLHAARPGMRTEDLPKAVVFLEPQWYRVLEKDSVTLKCQGAYSPEDNSTQWFHNESLISSQASSYFIDAATVDDSGEYRCQTNLSTLSDPVQLEVHIGWLLLQAPRWVFKEEDPIHLRCHSWKNTALHKVTYLQNGKGRKYFHHNSDFYIPKATLKDSGSYFCRGLVGSKNVSSETVNITITQGLAVSTISSFFPPGYQGTGGGGSGGGGSGGGGSEFDIQMTQSPSSLSASVGDRVTITCKASDHINNWLAWYQQKPGQAPKLLIYGATTLETGVPSRFSGSGSGTDYTLTISSLQPEDFATYYCQQSWNTPWTFGQGTKLEIKRLEGKPIPNPLLGLDSTGSGEDLKNVFPPEVAVFEPSEAEISHTQKATLVCLATGFYPDHVELSWWVNGKEVHSGVSTDPQPLKEQPALNDSRYCLSSRLRVSATFWQNPRNHFRCQVQFYGLSENDEWTQDRAKPVTQIVSAEAWGRADCGSQSFGLLDPKLCYLLDGILFIYGVILTALFLRVKFSRSADAPAYQQGQNQLYNELNLGRREEYDVLDKRRGRDPEMGGKPQRRKNPQEGLYNELQKDKMAEAYSEIGMKGERRRGKGHDGLYQGLSTATKDTYDALHMQALPPRRAKRSGSGATNFSLLKQAGDVEENPGPTSMDWIWRILFLVGAATGAHSGPGMRTEDLPKAVVFLEPQWYRVLEKDSVTLKCQGAYSPEDNSTQWFHNESLISSQASSYFIDAATVDDSGEYRCQTNLSTLSDPVQLEVHIGWLLLQAPRWVFKEEDPIHLRCHSWKNTALHKVTYLQNGKGRKYFHHNSDFYIPKATLKDSGSYFCRGLVGSKNVSSETVNITITQGLAVSTISSFFPPGYQGSGGGGSGGGGSGGGGSFEQVQLQQPGAELVKPGASVKMSCKASGYAFSSYWINWMKQKPGQGLEWIGQIYPGDGDTNYNGKFKGRATLTADTSSSTAYMQLSSLTSEDSAVYFCARSITTVVGCAMDYWGQGTSVTVSSTREQKLISEEDLGSGIQNPDPAVYQLRDSKSSDKSVCLFTDFDSQTNVSQSKDSDVYITDKTVLDMRSMDFKSNSAVAWSNKSDFACANAFNNSIIPEDTFFPSPESSCGTQSFGLLDPKLCYLLDGILFIYGVILTALFLKRGRKKLLYIFKQPFMRPVQTTQEEDGCSCRFPEEEEGGCELRVKFSRSADAPAYQQGQNQLYNELNLGRREEYDVLDKRRGRDPEMGGKPQRRKNPQEGLYNELQKDKMAEAYSEIGMKGERRRGKGHDGLYQGLSTATKDTYDALHMQALPPR

SEQ ID NO: 15632 - protein, 1355 aa, Artificial Sequence
  Synthetic Polypeptide
MALPVTALLLPLALLLHAARPGMRTEDLPKAVVFLEPQWYRVLEKDSVTLKCQGAYSPEDNSTQWFHNESLISSQASSYFIDAATVDDSGEYRCQTNLSTLSDPVQLEVHIGWLLLQAPRWVFKEEDPIHLRCHSWKNTALHKVTYLQNGKGRKYFHHNSDFYIPKATLKDSGSYFCRGLVGSKNVSSETVNITITQGLAVSTISSFFPPGYQGTGGGGSGGGGSGGGGSEFDIQMTQSPSSLSASVGDRVTITCKASDHINNWLAWYQQKPGQAPKLLIYGATTLETGVPSRFSGSGSGTDYTLTISSLQPEDFATYYCQQSWNTPWTFGQGTKLEIKRLEGKPIPNPLLGLDSTGSGEDLKNVFPPEVAVFEPSEAEISHTQKATLVCLATGFYPDHVELSWWVNGKEVHSGVSTDPQPLKEQPALNDSRYCLSSRLRVSATFWQNPRNHFRCQVQFYGLSENDEWTQDRAKPVTQIVSAEAWGRADCGSQSFGLLDPKLCYLLDGILFIYGVILTALFLKRGRKKLLYIFKQPFMRPVQTTQEEDGCSCRFPEEEEGGCELRVKFSRSADAPAYQQGQNQLYNELNLGRREEYDVLDKRRGRDPEMGGKPQRRKNPQEGLYNELQKDKMAEAYSEIGMKGERRRGKGHDGLYQGLSTATKDTYDALHMQALPPRRAKRSGSGATNFSLLKQAGDVEENPGPTSMDWIWRILFLVGAATGAHSGPGMRTEDLPKAVVFLEPQWYRVLEKDSVTLKCQGAYSPEDNSTQWFHNESLISSQASSYFIDAATVDDSGEYRCQTNLSTLSDPVQLEVHIGWLLLQAPRWVFKEEDPIHLRCHSWKNTALHKVTYLQNGKGRKYFHHNSDFYIPKATLKDSGSYFCRGLVGSKNVSSETVNITITQGLAVSTISSFFPPGYQGSGGGGSGGGGSGGGGSFEQVQLQQPGAELVKPGASVKMSCKASGYAFSSYWINWMKQKPGQGLEWIGQIYPGDGDTNYNGKFKGRATLTADTSSSTAYMQLSSLTSEDSAVYFCARSITTVVGCAMDYWGQGTSVTVSSTREQKLISEEDLGSGIQNPDPAVYQLRDSKSSDKSVCLFTDFDSQTNVSQSKDSDVYITDKTVLDMRSMDFKSNSAVAWSNKSDFACANAFNNSIIPEDTFFPSPESSCGTQSFGLLDPKLCYLLDGILFIYGVILTALFLKRGRKKLLYIFKQPFMRPVQTTQEEDGCSCRFPEEEEGGCELRVKFSRSADAPAYQQGQNQLYNELNLGRREEYDVLDKRRGRDPEMGGKPQRRKNPQEGLYNELQKDKMAEAYSEIGMKGERRRGKGHDGLYQGLSTATKDTYDALHMQALPPR

SEQ ID NO: 15633 - protein, 1245 aa, Artificial Sequence
  Synthetic Polypeptide
MALPVTALLLPLALLLHAARPGMRTEDLPKAVVFLEPQWYRVLEKDSVTLKCQGAYSPEDNSTQWFHNESLISSQASSYFIDAATVDDSGEYRCQTNLSTLSDPVQLEVHIGWLLLQAPRWVFKEEDPIHLRCHSWKNTALHKVTYLQNGKGRKYFHHNSDFYIPKATLKDSGSYFCRGLVGSKNVSSETVNITITQGLAVSTISSFFPPGYQGTGGGGSGGGGSGGGGSEFDIQMTQSPSSLSASVGDRVTITCKASDHINNWLAWYQQKPGQAPKLLIYGATTLETGVPSRFSGSGSGTDYTLTISSLQPEDFATYYCQQSWNTPWTFGQGTKLEIKRLEQSFGLLDPKLCYLLDGILFIYGVILTALFLRVKFSRSADAPAYQQGQNQLYNELNLGRREEYDVLDKRRGRDPEMGGKPQRRKNPQEGLYNELQKDKMAEAYSEIGMKGERRRGKGHDGLYQGLSTATKDTYDALHMQALPPRRAKRSGSGATNFSLLKQAGDVEENPGPTSMDWIWRILFLVGAATGAHSGPGMRTEDLPKAVVFLEPQWYRVLEKDSVTLKCQGAYSPEDNSTQWFHNESLISSQASSYFIDAATVDDSGEYRCQTNLSTLSDPVQLEVHIGWLLLQAPRWVFKEEDPIHLRCHSWKNTALHKVTYLQNGKGRKYFHHNSDFYIPKATLKDSGSYFCRGLVGSKNVSSETVNITITQGLAVSTISSFFPPGYQGSGGGGSGGGGSGGGGSFEQVQLQQPGAELVKPGASVKMSCKASGYAFSSYWINWMKQKPGQGLEWIGQIYPGDGDTNYNGKFKGRATLTADTSSSTAYMQLSSLTSEDSAVYFCARSITTVVGCAMDYWGQGTSVTVSSTRQSFGLLDPKLCYLLDGILFIYGVILTALFLRVKFSRSADAPAYQQGQNQLYNELNLGRREEYDVLDKRRGRDPEMGGKPQRRKNPQEGLYNELQKDKMAEAYSEIGMKGERRRGKGHDGLYQGLSTATKDTYDALHMQALPPRRAKRSGSGVKQTLNFDLLKLAGDVESNPGPSRGHMTEYKPTVRLATRDDVPRAVRTLAAAFADYPATRHTVDPDRHIERVTELQELFLTRVGLDIGKVWVADDGAAVAVWTTPESVEAGAVFAEIGPRMAELSGSRLAAQQQMEGLLAPHRPKEPAWFLATVGVSPDHQGKGLGSAVVLPGVEAAERAGVPAFLETSAPRNLPFYERLGFTVTADVEVPEGPRTWCMTRKPGA

SEQ ID NO: 15634 - protein, 1070 aa, Artificial Sequence
  Synthetic Polypeptide
MALPVTALLLPLALLLHAARPGMRTEDLPKAVVFLEPQWYRVLEKDSVTLKCQGAYSPEDNSTQWFHNESLISSQASSYFIDAATVDDSGEYRCQTNLSTLSDPVQLEVHIGWLLLQAPRWVFKEEDPIHLRCHSWKNTALHKVTYLQNGKGRKYFHHNSDFYIPKATLKDSGSYFCRGLVGSKNVSSETVNITITQGLAVSTISSFFPPGYQGTGGGGSGGGGSGGGGSEFDIQMTQSPSSLSASVGDRVTITCKASDHINNWLAWYQQKPGQAPKLLIYGATTLETGVPSRFSGSGSGTDYTLTISSLQPEDFATYYCQQSWNTPWTFGQGTKLEIKRLEGQPKANPTVTLFPPSSEELQANKATLVCLISDFYPGAVTVAWKADGSPVKAGVETTKPSKQSNNKYAASSYLSLTPEQWKSHRSYSCQVTHEGSTVEKTVAPTECSPIKTDVITMDPKDNCSKDANDTLLLQLTNTSAYYMYLLLLLKSVVYFAIITCCLLRRTAFCCNGEKSRAKRSGSGATNFSLLKQAGDVEENPGPTSMDWIWRILFLVGAATGAHSGPGMRTEDLPKAVVFLEPQWYRVLEKDSVTLKCQGAYSPEDNSTQWFHNESLISSQASSYFIDAATVDDSGEYRCQTNLSTLSDPVQLEVHIGWLLLQAPRWVFKEEDPIHLRCHSWKNTALHKVTYLQNGKGRKYFHHNSDFYIPKATLKDSGSYFCRGLVGSKNVSSETVNITITQGLAVSTISSFFPPGYQGSGGGGSGGGGSGGGGSFEQVQLQQPGAELVKPGASVKMSCKASGYAFSSYWINWMKQKPGQGLEWIGQIYPGDGDTNYNGKFKGRATLTADTSSSTAYMQLSSLTSEDSAVYFCARSITTVVGCAMDYWGQGTSVTVSSTRASTKGPSVFPLAPSSKSTSGGTAALGCLVKDYFPEPVTVSWNSGALTSGVHTFPAVLQSSGLYSLSSVVTVPSSSLGTQTYICNVNHKPSNTKVDKRVEPKSCEVKTDSTDHVKPKETENTKQPSKSCHKPKAIVHTEKVNMMSLTVLGLRMLFAKTVAVNFLLTAKLFFL

SEQ ID NO: 15635 - protein, 1048 aa, Artificial Sequence
  Synthetic Polypeptide
MALPVTALLLPLALLLHAARPGMRTEDLPKAVVFLEPQWYRVLEKDSVTLKCQGAYSPEDNSTQWFHNESLISSQASSYFIDAATVDDSGEYRCQTNLSTLSDPVQLEVHIGWLLLQAPRWVFKEEDPIHLRCHSWKNTALHKVTYLQNGKGRKYFHHNSDFYIPKATLKDSGSYFCRGLVGSKNVSSETVNITITQGLAVSTISSFFPPGYQGTGGGGSGGGGSGGGGSEFDIQMTQSPSSLSASVGDRVTITCKASDHINNWLAWYQQKPGQAPKLLIYGATTLETGVPSRFSGSGSGTDYTLTISSLQPEDFATYYCQQSWNTPWTFGQGTKLEIKRLEGQPKANPTVTLFPPSSEELQANKATLVCLISDFYPGAVTVAWKADGSPVKAGVETTKPSKQSNNKYAASSYLSLTPEQWKSHRSYSCQVTHEGSTVEKTVAPTECSGRADCGITSASYHQGVLSATILYEILLGKATLYAVLVSALVLMAMVKRKDSRGRAKRSGSGATNFSLLKQAGDVEENPGPTSMDWIWRILFLVGAATGAHSGPGMRTEDLPKAVVFLEPQWYRVLEKDSVTLKCQGAYSPEDNSTQWFHNESLISSQASSYFIDAATVDDSGEYRCQTNLSTLSDPVQLEVHIGWLLLQAPRWVFKEEDPIHLRCHSWKNTALHKVTYLQNGKGRKYFHHNSDFYIPKATLKDSGSYFCRGLVGSKNVSSETVNITITQGLAVSTISSFFPPGYQGSGGGGSGGGGSGGGGSFEQVQLQQPGAELVKPGASVKMSCKASGYAFSSYWINWMKQKPGQGLEWIGQIYPGDGDTNYNGKFKGRATLTADTSSSTAYMQLSSLTSEDSAVYFCARSITTVVGCAMDYWGQGTSVTVSSTRASTKGPSVFPLAPSSKSTSGGTAALGCLVKDYFPEPVTVSWNSGALTSGVHTFPAVLQSSGLYSLSSVVTVPSSSLGTQTYICNVNHKPSNTKVDKRVEPKSCIPEDTFFPSSDVPCDVKLVEKSFETDTNLNFQNLSVIGFRILLLKVAGFNLLMTLRLWSS

SEQ ID NO: 15636 - protein, 1048 aa, Artificial Sequence
  Synthetic Polypeptide
MALPVTALLLPLALLLHAARPGMRTEDLPKAVVFLEPQWYRVLEKDSVTLKCQGAYSPEDNSTQWFHNESLISSQASSYFIDAATVDDSGEYRCQTNLSTLSDPVQLEVHIGWLLLQAPRWVFKEEDPIHLRCHSWKNTALHKVTYLQNGKGRKYFHHNSDFYIPKATLKDSGSYFCRGLVGSKNVSSETVNITITQGLAVSTISSFFPPGYQGTGGGGSGGGGSGGGGSEFDIQMTQSPSSLSASVGDRVTITCKASDHINNWLAWYQQKPGQAPKLLIYGATTLETGVPSRFSGSGSGTDYTLTISSLQPEDFATYYCQQSWNTPWTFGQGTKLEIKRLEGQPKANPTVTLFPPSSEELQANKATLVCLISDFYPGAVTVAWKADGSPVKAGVETTKPSKQSNNKYAASSYLSLTPEQWKSHRSYSCQVTHEGSTVEKTVAPTECSGRADCGFTSESYQQGVLSATILYEILLGKATLYAVLVSALVLMAMVKRKDSRGRAKRSGSGATNFSLLKQAGDVEENPGPTSMDWIWRILFLVGAATGAHSGPGMRTEDLPKAVVFLEPQWYRVLEKDSVTLKCQGAYSPEDNSTQWFHNESLISSQASSYFIDAATVDDSGEYRCQTNLSTLSDPVQLEVHIGWLLLQAPRWVFKEEDPIHLRCHSWKNTALHKVTYLQNGKGRKYFHHNSDFYIPKATLKDSGSYFCRGLVGSKNVSSETVNITITQGLAVSTISSFFPPGYQGSGGGGSGGGGSGGGGSFEQVQLQQPGAELVKPGASVKMSCKASGYAFSSYWINWMKQKPGQGLEWIGQIYPGDGDTNYNGKFKGRATLTADTSSSTAYMQLSSLTSEDSAVYFCARSITTVVGCAMDYWGQGTSVTVSSTRASTKGPSVFPLAPSSKSTSGGTAALGCLVKDYFPEPVTVSWNSGALTSGVHTFPAVLQSSGLYSLSSVVTVPSSSLGTQTYICNVNHKPSNTKVDKRVEPKSCIPEDTFFPSPESSCDVKLVEKSFETDTNLNFQNLSVIGFRILLLKVAGFNLLMTLRLWSS

SEQ ID NO: 15637 - protein, 1014 aa, Artificial Sequence
  Synthetic Polypeptide
MALPVTALLLPLALLLHAARPGMRTEDLPKAVVFLEPQWYRVLEKDSVTLKCQGAYSPEDNSTQWFHNESLISSQASSYFIDAATVDDSGEYRCQTNLSTLSDPVQLEVHIGWLLLQAPRWVFKEEDPIHLRCHSWKNTALHKVTYLQNGKGRKYFHHNSDFYIPKATLKDSGSYFCRGLVGSKNVSSETVNITITQGLAVSTISSFFPPGYQLEGQPKANPTVTLFPPSSEELQANKATLVCLISDFYPGAVTVAWKADGSPVKAGVETTKPSKQSNNKYAASSYLSLTPEQWKSHRSYSCQVTHEGSTVEKTVAPTECSGRADCGFTSESYQQGVLSATILYEILLGKATLYAVLVSALVLMAMVKRKDSRGRAKRSGSGATNFSLLKQAGDVEENPGPTSMDWIWRILFLVGAATGAHSGPGMRTEDLPKAVVFLEPQWYRVLEKDSVTLKCQGAYSPEDNSTQWFHNESLISSQASSYFIDAATVDDSGEYRCQTNLSTLSDPVQLEVHIGWLLLQAPRWVFKEEDPIHLRCHSWKNTALHKVTYLQNGKGRKYFHHNSDFYIPKATLKDSGSYFCRGLVGSKNVSSETVNITITQGLAVSTISSFFPPGYQTRASTKGPSVFPLAPSSKSTSGGTAALGCLVKDYFPEPVTVSWNSGALTSGVHTFPAVLQSSGLYSLSSVVTVPSSSLGTQTYICNVNHKPSNTKVDKRVEPKSCIPEDTFFPSPESSCDVKLVEKSFETDTNLNFQNLSVIGFRILLLKVAGFNLLMTLRLWSSRAKRSGSGVKQTLNFDLLKLAGDVESNPGPSRGHMTEYKPTVRLATRDDVPRAVRTLAAAFADYPATRHTVDPDRHIERVTELQELFLTRVGLDIGKVWVADDGAAVAVWTTPESVEAGAVFAEIGPRMAELSGSRLAAQQQMEGLLAPHRPKEPAWFLATVGVSPDHQGKGLGSAVVLPGVEAAERAGVPAFLETSAPRNLPFYERLGFTVTADVEVPEGPRTWCMTRKPGA

SEQ ID NO: 15638 - protein, 781 aa, Artificial Sequence
  Synthetic Polypeptide
MALPVTALLLPLALLLHAARPGMRTEDLPKAVVFLEPQWYRVLEKDSVTLKCQGAYSPEDNSTQWFHNESLISSQASSYFIDAATVDDSGEYRCQTNLSTLSDPVQLEVHIGWLLLQAPRWVFKEEDPIHLRCHSWKNTALHKVTYLQNGKGRKYFHHNSDFYIPKATLKDSGSYFCRGLVGSKNVSSETVNITITQGLAVSTISSFFPPGYQLEGQPKANPTVTLFPPSSEELQANKATLVCLISDFYPGAVTVAWKADGSPVKAGVETTKPSKQSNNKYAASSYLSLTPEQWKSHRSYSCQVTHEGSTVEKTVAPTECSGRADCGFTSESYQQGVLSATILYEILLGKATLYAVLVSALVLMAMVKRKDSRGRAKRSGSGATNFSLLKQAGDVEENPGPTSMDWIWRILFLVGAATGAHSGPGMRTEDLPKAVVFLEPQWYRVLEKDSVTLKCQGAYSPEDNSTQWFHNESLISSQASSYFIDAATVDDSGEYRCQTNLSTLSDPVQLEVHIGWLLLQAPRWVFKEEDPIHLRCHSWKNTALHKVTYLQNGKGRKYFHHNSDFYIPKATLKDSGSYFCRGLVGSKNVSSETVNITITQGLAVSTISSFFPPGYQTRASTKGPSVFPLAPSSKSTSGGTAALGCLVKDYFPEPVTVSWNSGALTSGVHTFPAVLQSSGLYSLSSVVTVPSSSLGTQTYICNVNHKPSNTKVDKRVEPKSCIPEDTFFPSPESSCDVKLVEKSFETDTNLNFQNLSVIGFRILLLKVAGFNLLMTLRLWSS

SEQ ID NO: 15639 - protein, 809 aa, Artificial Sequence
  Synthetic Polypeptide
MALPVTALLLPLALLLHAARPGMRTEDLPKAVVFLEPQWYRVLEKDSVTLKCQGAYSPEDNSTQWFHNESLISSQASSYFIDAATVDDSGEYRCQTNLSTLSDPVQLEVHIGWLLLQAPRWVFKEEDPIHLRCHSWKNTALHKVTYLQNGKGRKYFHHNSDFYIPKATLKDSGSYFCRGLVGSKNVSSETVNITITQGLAVSTISSFFPPGYQLEGSGRADCGFTSESYQQGVLSATILYEILLGKATLYAVLVSALVLMAMVKRKDSRGRAKRSGSGATNFSLLKQAGDVEENPGPTSMDWIWRILFLVGAATGAHSGPGMRTEDLPKAVVFLEPQWYRVLEKDSVTLKCQGAYSPEDNSTQWFHNESLISSQASSYFIDAATVDDSGEYRCQTNLSTLSDPVQLEVHIGWLLLQAPRWVFKEEDPIHLRCHSWKNTALHKVTYLQNGKGRKYFHHNSDFYIPKATLKDSGSYFCRGLVGSKNVSSETVNITITQGLAVSTISSFFPPGYQTRGSIPEDTFFPSPESSCDVKLVEKSFETDTNLNFQNLSVIGFRILLLKVAGFNLLMTLRLWSSRAKRSGSGVKQTLNFDLLKLAGDVESNPGPSRGHMTEYKPTVRLATRDDVPRAVRTLAAAFADYPATRHTVDPDRHIERVTELQELFLTRVGLDIGKVWVADDGAAVAVWTTPESVEAGAVFAEIGPRMAELSGSRLAAQQQMEGLLAPHRPKEPAWFLATVGVSPDHQGKGLGSAVVLPGVEAAERAGVPAFLETSAPRNLPFYERLGFTVTADVEVPEGPRTWCMTRKPGA

SEQ ID NO: 15640 - protein, 576 aa, Artificial Sequence
  Synthetic Polypeptide
MALPVTALLLPLALLLHAARPGMRTEDLPKAVVFLEPQWYRVLEKDSVTLKCQGAYSPEDNSTQWFHNESLISSQASSYFIDAATVDDSGEYRCQTNLSTLSDPVQLEVHIGWLLLQAPRWVFKEEDPIHLRCHSWKNTALHKVTYLQNGKGRKYFHHNSDFYIPKATLKDSGSYFCRGLVGSKNVSSETVNITITQGLAVSTISSFFPPGYQLEGSGRADCGFTSESYQQGVLSATILYEILLGKATLYAVLVSALVLMAMVKRKDSRGRAKRSGSGATNFSLLKQAGDVEENPGPTSMDWIWRILFLVGAATGAHSGPGMRTEDLPKAVVFLEPQWYRVLEKDSVTLKCQGAYSPEDNSTQWFHNESLISSQASSYFIDAATVDDSGEYRCQTNLSTLSDPVQLEVHIGWLLLQAPRWVFKEEDPIHLRCHSWKNTALHKVTYLQNGKGRKYFHHNSDFYIPKATLKDSGSYFCRGLVGSKNVSSETVNITITQGLAVSTISSFFPPGYQTRGSIPEDTFFPSPESSCDVKLVEKSFETDTNLNFQNLSVIGFRILLLKVAGFNLLMTLRLWSS

SEQ ID NO: 15641 - protein, 818 aa, Artificial Sequence
  Synthetic Polypeptide
MALPVTALLLPLALLLHAARPGMRTEDLPKAVVFLEPQWYRVLEKDSVTLKCQGAYSPEDNSTQWFHNESLISSQASSYFIDAATVDDSGEYRCQTNLSTLSDPVQLEVHIGWLLLQAPRWVFKEEDPIHLRCHSWKNTALHKVTYLQNGKGRKYFHHNSDFYIPKATLKDSGSYFCRGLVGSKNVSSETVNITITQGLAVSTISSFFPPGYQLEDKTHTCPPCPAGRADCGFTSESYQQGVLSATILYEILLGKATLYAVLVSALVLMAMVKRKDSRGRAKRSGSGATNFSLLKQAGDVEENPGPTSMDWIWRILFLVGAATGAHSGPGMRTEDLPKAVVFLEPQWYRVLEKDSVTLKCQGAYSPEDNSTQWFHNESLISSQASSYFIDAATVDDSGEYRCQTNLSTLSDPVQLEVHIGWLLLQAPRWVFKEEDPIHLRCHSWKNTALHKVTYLQNGKGRKYFHHNSDFYIPKATLKDSGSYFCRGLVGSKNVSSETVNITITQGLAVSTISSFFPPGYQTRGSIPEDTFFPSPESSCDVKLVEKSFETDTNLNFQNLSVIGFRILLLKVAGFNLLMTLRLWSSRAKRSGSGVKQTLNFDLLKLAGDVESNPGPSRGHMTEYKPTVRLATRDDVPRAVRTLAAAFADYPATRHTVDPDRHIERVTELQELFLTRVGLDIGKVWVADDGAAVAVWTTPESVEAGAVFAEIGPRMAELSGSRLAAQQQMEGLLAPHRPKEPAWFLATVGVSPDHQGKGLGSAVVLPGVEAAERAGVPAFLETSAPRNLPFYERLGFTVTADVEVPEGPRTWCMTRKPGA

SEQ ID NO: 15642 - protein, 818 aa, Artificial Sequence
  Synthetic Polypeptide
MALPVTALLLPLALLLHAARPGMRTEDLPKAVVFLEPQWYRVLEKDSVTLKCQGAYSPEDNSTQWFHNESLISSQASSYFIDAATVDDSGEYRCQTNLSTLSDPVQLEVHIGWLLLQAPRWVFKEEDPIHLRCHSWKNTALHKVTYLQNGKGRKYFHHNSDFYIPKATLKDSGSYFCRGLVGSKNVSSETVNITITQGLAVSTISSFFPPGYQLEGSGRADCGFTSESYQQGVLSATILYEILLGKATLYAVLVSALVLMAMVKRKDSRGRAKRSGSGATNFSLLKQAGDVEENPGPTSMDWIWRILFLVGAATGAHSGPGMRTEDLPKAVVFLEPQWYRVLEKDSVTLKCQGAYSPEDNSTQWFHNESLISSQASSYFIDAATVDDSGEYRCQTNLSTLSDPVQLEVHIGWLLLQAPRWVFKEEDPIHLRCHSWKNTALHKVTYLQNGKGRKYFHHNSDFYIPKATLKDSGSYFCRGLVGSKNVSSETVNITITQGLAVSTISSFFPPGYQTRDKTHTCPPCPAIPEDTFFPSPESSCDVKLVEKSFETDTNLNFQNLSVIGFRILLLKVAGFNLLMTLRLWSSRAKRSGSGVKQTLNFDLLKLAGDVESNPGPSRGHMTEYKPTVRLATRDDVPRAVRTLAAAFADYPATRHTVDPDRHIERVTELQELFLTRVGLDIGKVWVADDGAAVAVWTTPESVEAGAVFAEIGPRMAELSGSRLAAQQQMEGLLAPHRPKEPAWFLATVGVSPDHQGKGLGSAVVLPGVEAAERAGVPAFLETSAPRNLPFYERLGFTVTADVEVPEGPRTWCMTRKPGA

SEQ ID NO: 15643 - protein, 827 aa, Artificial Sequence
  Synthetic Polypeptide
MALPVTALLLPLALLLHAARPGMRTEDLPKAVVFLEPQWYRVLEKDSVTLKCQGAYSPEDNSTQWFHNESLISSQASSYFIDAATVDDSGEYRCQTNLSTLSDPVQLEVHIGWLLLQAPRWVFKEEDPIHLRCHSWKNTALHKVTYLQNGKGRKYFHHNSDFYIPKATLKDSGSYFCRGLVGSKNVSSETVNITITQGLAVSTISSFFPPGYQLEDKTHTCPPCPAGRADCGFTSESYQQGVLSATILYEILLGKATLYAVLVSALVLMAMVKRKDSRGRAKRSGSGATNFSLLKQAGDVEENPGPTSMDWIWRILFLVGAATGAHSGPGMRTEDLPKAVVFLEPQWYRVLEKDSVTLKCQGAYSPEDNSTQWFHNESLISSQASSYFIDAATVDDSGEYRCQTNLSTLSDPVQLEVHIGWLLLQAPRWVFKEEDPIHLRCHSWKNTALHKVTYLQNGKGRKYFHHNSDFYIPKATLKDSGSYFCRGLVGSKNVSSETVNITITQGLAVSTISSFFPPGYQTRDKTHTCPPCPAIPEDTFFPSPESSCDVKLVEKSFETDTNLNFQNLSVIGFRILLLKVAGFNLLMTLRLWSSRAKRSGSGVKQTLNFDLLKLAGDVESNPGPSRGHMTEYKPTVRLATRDDVPRAVRTLAAAFADYPATRHTVDPDRHIERVTELQELFLTRVGLDIGKVWVADDGAAVAVWTTPESVEAGAVFAEIGPRMAELSGSRLAAQQQMEGLLAPHRPKEPAWFLATVGVSPDHQGKGLGSAVVLPGVEAAERAGVPAFLETSAPRNLPFYERLGFTVTADVEVPEGPRTWCMTRKPGA

SEQ ID NO: 15644 - protein, 594 aa, Artificial Sequence
  Synthetic Polypeptide
MALPVTALLLPLALLLHAARPGMRTEDLPKAVVFLEPQWYRVLEKDSVTLKCQGAYSPEDNSTQWFHNESLISSQASSYFIDAATVDDSGEYRCQTNLSTLSDPVQLEVHIGWLLLQAPRWVFKEEDPIHLRCHSWKNTALHKVTYLQNGKGRKYFHHNSDFYIPKATLKDSGSYFCRGLVGSKNVSSETVNITITQGLAVSTISSFFPPGYQLEDKTHTCPPCPAGRADCGFTSESYQQGVLSATILYEILLGKATLYAVLVSALVLMAMVKRKDSRGRAKRSGSGATNFSLLKQAGDVEENPGPTSMDWIWRILFLVGAATGAHSGPGMRTEDLPKAVVFLEPQWYRVLEKDSVTLKCQGAYSPEDNSTQWFHNESLISSQASSYFIDAATVDDSGEYRCQTNLSTLSDPVQLEVHIGWLLLQAPRWVFKEEDPIHLRCHSWKNTALHKVTYLQNGKGRKYFHHNSDFYIPKATLKDSGSYFCRGLVGSKNVSSETVNITITQGLAVSTISSFFPPGYQTRDKTHTCPPCPAIPEDTFFPSPESSCDVKLVEKSFETDTNLNFQNLSVIGFRILLLKVAGFNLLMTLRLWSS

SEQ ID NO: 15645 - protein, 585 aa, Artificial Sequence
  Synthetic Polypeptide
MALPVTALLLPLALLLHAARPGMRTEDLPKAVVFLEPQWYRVLEKDSVTLKCQGAYSPEDNSTQWFHNESLISSQASSYFIDAATVDDSGEYRCQTNLSTLSDPVQLEVHIGWLLLQAPRWVFKEEDPIHLRCHSWKNTALHKVTYLQNGKGRKYFHHNSDFYIPKATLKDSGSYFCRGLVGSKNVSSETVNITITQGLAVSTISSFFPPGYQLEGSGRADCGFTSESYQQGVLSATILYEILLGKATLYAVLVSALVLMAMVKRKDSRGRAKRSGSGATNFSLLKQAGDVEENPGPTSMDWIWRILFLVGAATGAHSGPGMRTEDLPKAVVFLEPQWYRVLEKDSVTLKCQGAYSPEDNSTQWFHNESLISSQASSYFIDAATVDDSGEYRCQTNLSTLSDPVQLEVHIGWLLLQAPRWVFKEEDPIHLRCHSWKNTALHKVTYLQNGKGRKYFHHNSDFYIPKATLKDSGSYFCRGLVGSKNVSSETVNITITQGLAVSTISSFFPPGYQTRDKTHTCPPCPAIPEDTFFPSPESSCDVKLVEKSFETDTNLNFQNLSVIGFRILLLKVAGFNLLMTLRLWSS

SEQ ID NO: 15646 - protein, 1036 aa, Artificial Sequence
  Synthetic Polypeptide
MALPVTALLLPLALLLHAARPGMRTEDLPKAVVFLEPQWYRVLEKDSVTLKCQGAYSPEDNSTQWFHNESLISSQASSYFIDAATVDDSGEYRCQTNLSTLSDPVQLEVHIGWLLLQAPRWVFKEEDPIHLRCHSWKNTALHKVTYLQNGKGRKYFHHNSDFYIPKATLKDSGSYFCRGLVGSKNVSSETVNITITQGLAVSTISSFFPPGYQLEGQPKANPTVTLFPPSSEELQANKATLVCLISDFYPGAVTVAWKADGSPVKAGVETTKPSKQSNNKYAASSYLSLTPEQWKSHRSYSCQVTHEGSTVEKTVAPTECSPIKTDVITMDPKDNCSKDANDTLLLQLTNTSAYYMYLLLLLKSVVYFAIITCCLLRRTAFCCNGEKSRAKRSGSGATNFSLLKQAGDVEENPGPTSMDWIWRILFLVGAATGAHSGPGMRTEDLPKAVVFLEPQWYRVLEKDSVTLKCQGAYSPEDNSTQWFHNESLISSQASSYFIDAATVDDSGEYRCQTNLSTLSDPVQLEVHIGWLLLQAPRWVFKEEDPIHLRCHSWKNTALHKVTYLQNGKGRKYFHHNSDFYIPKATLKDSGSYFCRGLVGSKNVSSETVNITITQGLAVSTISSFFPPGYQTRASTKGPSVFPLAPSSKSTSGGTAALGCLVKDYFPEPVTVSWNSGALTSGVHTFPAVLQSSGLYSLSSVVTVPSSSLGTQTYICNVNHKPSNTKVDKRVEPKSCEVKTDSTDHVKPKETENTKQPSKSCHKPKAIVHTEKVNMMSLTVLGLRMLFAKTVAVNFLLTAKLFFLRAKRSGSGVKQTLNFDLLKLAGDVESNPGPSRGHMTEYKPTVRLATRDDVPRAVRTLAAAFADYPATRHTVDPDRHIERVTELQELFLTRVGLDIGKVWVADDGAAVAVWTTPESVEAGAVFAEIGPRMAELSGSRLAAQQQMEGLLAPHRPKEPAWFLATVGVSPDHQGKGLGSAVVLPGVEAAERAGVPAFLETSAPRNLPFYERLGFTVTADVEVPEGPRTWCMTRKPGA

SEQ ID NO: 15647 - protein, 803 aa, Artificial Sequence
  Synthetic Polypeptide
MALPVTALLLPLALLLHAARPGMRTEDLPKAVVFLEPQWYRVLEKDSVTLKCQGAYSPEDNSTQWFHNESLISSQASSYFIDAATVDDSGEYRCQTNLSTLSDPVQLEVHIGWLLLQAPRWVFKEEDPIHLRCHSWKNTALHKVTYLQNGKGRKYFHHNSDFYIPKATLKDSGSYFCRGLVGSKNVSSETVNITITQGLAVSTISSFFPPGYQLEGQPKANPTVTLFPPSSEELQANKATLVCLISDFYPGAVTVAWKADGSPVKAGVETTKPSKQSNNKYAASSYLSLTPEQWKSHRSYSCQVTHEGSTVEKTVAPTECSPIKTDVITMDPKDNCSKDANDTLLLQLTNTSAYYMYLLLLLKSVVYFAIITCCLLRRTAFCCNGEKSRAKRSGSGATNFSLLKQAGDVEENPGPTSMDWIWRILFLVGAATGAHSGPGMRTEDLPKAVVFLEPQWYRVLEKDSVTLKCQGAYSPEDNSTQWFHNESLISSQASSYFIDAATVDDSGEYRCQTNLSTLSDPVQLEVHIGWLLLQAPRWVFKEEDPIHLRCHSWKNTALHKVTYLQNGKGRKYFHHNSDFYIPKATLKDSGSYFCRGLVGSKNVSSETVNITITQGLAVSTISSFFPPGYQTRASTKGPSVFPLAPSSKSTSGGTAALGCLVKDYFPEPVTVSWNSGALTSGVHTFPAVLQSSGLYSLSSVVTVPSSSLGTQTYICNVNHKPSNTKVDKRVEPKSCEVKTDSTDHVKPKETENTKQPSKSCHKPKAIVHTEKVNMMSLTVLGLRMLFAKTVAVNFLLTAKLFFL

SEQ ID NO: 15648 - protein, 831 aa, Artificial Sequence
  Synthetic Polypeptide
MALPVTALLLPLALLLHAARPGMRTEDLPKAVVFLEPQWYRVLEKDSVTLKCQGAYSPEDNSTQWFHNESLISSQASSYFIDAATVDDSGEYRCQTNLSTLSDPVQLEVHIGWLLLQAPRWVFKEEDPIHLRCHSWKNTALHKVTYLQNGKGRKYFHHNSDFYIPKATLKDSGSYFCRGLVGSKNVSSETVNITITQGLAVSTISSFFPPGYQLEGSPIKTDVITMDPKDNCSKDANDTLLLQLTNTSAYYMYLLLLLKSVVYFAIITCCLLRRTAFCCNGEKSRAKRSGSGATNFSLLKQAGDVEENPGPTSMDWIWRILFLVGAATGAHSGPGMRTEDLPKAVVFLEPQWYRVLEKDSVTLKCQGAYSPEDNSTQWFHNESLISSQASSYFIDAATVDDSGEYRCQTNLSTLSDPVQLEVHIGWLLLQAPRWVFKEEDPIHLRCHSWKNTALHKVTYLQNGKGRKYFHHNSDFYIPKATLKDSGSYFCRGLVGSKNVSSETVNITITQGLAVSTISSFFPPGYQTRGSEVKTDSTDHVKPKETENTKQPSKSCHKPKAIVHTEKVNMMSLTVLGLRMLFAKTVAVNFLLTAKLFFLRAKRSGSGVKQTLNFDLLKLAGDVESNPGPSRGHMTEYKPTVRLATRDDVPRAVRTLAAAFADYPATRHTVDPDRHIERVTELQELFLTRVGLDIGKVWVADDGAAVAVWTTPESVEAGAVFAEIGPRMAELSGSRLAAQQQMEGLLAPHRPKEPAWFLATVGVSPDHQGKGLGSAVVLPGVEAAERAGVPAFLETSAPRNLPFYERLGFTVTADVEVPEGPRTWCMTRKPGA

SEQ ID NO: 15649 - protein, 598 aa, Artificial Sequence
  Synthetic Polypeptide
MALPVTALLLPLALLLHAARPGMRTEDLPKAVVFLEPQWYRVLEKDSVTLKCQGAYSPEDNSTQWFHNESLISSQASSYFIDAATVDDSGEYRCQTNLSTLSDPVQLEVHIGWLLLQAPRWVFKEEDPIHLRCHSWKNTALHKVTYLQNGKGRKYFHHNSDFYIPKATLKDSGSYFCRGLVGSKNVSSETVNITITQGLAVSTISSFFPPGYQLEGSPIKTDVITMDPKDNCSKDANDTLLLQLTNTSAYYMYLLLLLKSVVYFAIITCCLLRRTAFCCNGEKSRAKRSGSGATNFSLLKQAGDVEENPGPTSMDWIWRILFLVGAATGAHSGPGMRTEDLPKAVVFLEPQWYRVLEKDSVTLKCQGAYSPEDNSTQWFHNESLISSQASSYFIDAATVDDSGEYRCQTNLSTLSDPVQLEVHIGWLLLQAPRWVFKEEDPIHLRCHSWKNTALHKVTYLQNGKGRKYFHHNSDFYIPKATLKDSGSYFCRGLVGSKNVSSETVNITITQGLAVSTISSFFPPGYQTRGSEVKTDSTDHVKPKETENTKQPSKSCHKPKAIVHTEKVNMMSLTVLGLRMLFAKTVAVNFLLTAKLFFL

SEQ ID NO: 15650 - protein, 840 aa, Artificial Sequence
  Synthetic Polypeptide
MALPVTALLLPLALLLHAARPGMRTEDLPKAVVFLEPQWYRVLEKDSVTLKCQGAYSPEDNSTQWFHNESLISSQASSYFIDAATVDDSGEYRCQTNLSTLSDPVQLEVHIGWLLLQAPRWVFKEEDPIHLRCHSWKNTALHKVTYLQNGKGRKYFHHNSDFYIPKATLKDSGSYFCRGLVGSKNVSSETVNITITQGLAVSTISSFFPPGYQLEDKTHTCPPCPAPIKTDVITMDPKDNCSKDANDTLLLQLTNTSAYYMYLLLLLKSVVYFAIITCCLLRRTAFCCNGEKSRAKRSGSGATNFSLLKQAGDVEENPGPTSMDWIWRILFLVGAATGAHSGPGMRTEDLPKAVVFLEPQWYRVLEKDSVTLKCQGAYSPEDNSTQWFHNESLISSQASSYFIDAATVDDSGEYRCQTNLSTLSDPVQLEVHIGWLLLQAPRWVFKEEDPIHLRCHSWKNTALHKVTYLQNGKGRKYFHHNSDFYIPKATLKDSGSYFCRGLVGSKNVSSETVNITITQGLAVSTISSFFPPGYQTRGSEVKTDSTDHVKPKETENTKQPSKSCHKPKAIVHTEKVNMMSLTVLGLRMLFAKTVAVNFLLTAKLFFLRAKRSGSGVKQTLNFDLLKLAGDVESNPGPSRGHMTEYKPTVRLATRDDVPRAVRTLAAAFADYPATRHTVDPDRHIERVTELQELFLTRVGLDIGKVWVADDGAAVAVWTTPESVEAGAVFAEIGPRMAELSGSRLAAQQQMEGLLAPHRPKEPAWFLATVGVSPDHQGKGLGSAVVLPGVEAAERAGVPAFLETSAPRNLPFYERLGFTVTADVEVPEGPRTWCMTRKPGA

SEQ ID NO: 15651 - protein, 840 aa, Artificial Sequence
  Synthetic Polypeptide
MALPVTALLLPLALLLHAARPGMRTEDLPKAVVFLEPQWYRVLEKDSVTLKCQGAYSPEDNSTQWFHNESLISSQASSYFIDAATVDDSGEYRCQTNLSTLSDPVQLEVHIGWLLLQAPRWVFKEEDPIHLRCHSWKNTALHKVTYLQNGKGRKYFHHNSDFYIPKATLKDSGSYFCRGLVGSKNVSSETVNITITQGLAVSTISSFFPPGYQLEGSPIKTDVITMDPKDNCSKDANDTLLLQLTNTSAYYMYLLLLLKSVVYFAIITCCLLRRTAFCCNGEKSRAKRSGSGATNFSLLKQAGDVEENPGPTSMDWIWRILFLVGAATGAHSGPGMRTEDLPKAVVFLEPQWYRVLEKDSVTLKCQGAYSPEDNSTQWFHNESLISSQASSYFIDAATVDDSGEYRCQTNLSTLSDPVQLEVHIGWLLLQAPRWVFKEEDPIHLRCHSWKNTALHKVTYLQNGKGRKYFHHNSDFYIPKATLKDSGSYFCRGLVGSKNVSSETVNITITQGLAVSTISSFFPPGYQTRDKTHTCPPCPAEVKTDSTDHVKPKETENTKQPSKSCHKPKAIVHTEKVNMMSLTVLGLRMLFAKTVAVNFLLTAKLFFLRAKRSGSGVKQTLNFDLLKLAGDVESNPGPSRGHMTEYKPTVRLATRDDVPRAVRTLAAAFADYPATRHTVDPDRHIERVTELQELFLTRVGLDIGKVWVADDGAAVAVWTTPESVEAGAVFAEIGPRMAELSGSRLAAQQQMEGLLAPHRPKEPAWFLATVGVSPDHQGKGLGSAVVLPGVEAAERAGVPAFLETSAPRNLPFYERLGFTVTADVEVPEGPRTWCMTRKPGA

SEQ ID NO: 15652 - protein, 849 aa, Artificial Sequence
  Synthetic Polypeptide
MALPVTALLLPLALLLHAARPGMRTEDLPKAVVFLEPQWYRVLEKDSVTLKCQGAYSPEDNSTQWFHNESLISSQASSYFIDAATVDDSGEYRCQTNLSTLSDPVQLEVHIGWLLLQAPRWVFKEEDPIHLRCHSWKNTALHKVTYLQNGKGRKYFHHNSDFYIPKATLKDSGSYFCRGLVGSKNVSSETVNITITQGLAVSTISSFFPPGYQLEDKTHTCPPCPAPIKTDVITMDPKDNCSKDANDTLLLQLTNTSAYYMYLLLLLKSVVYFAIITCCLLRRTAFCCNGEKSRAKRSGSGATNFSLLKQAGDVEENPGPTSMDWIWRILFLVGAATGAHSGPGMRTEDLPKAVVFLEPQWYRVLEKDSVTLKCQGAYSPEDNSTQWFHNESLISSQASSYFIDAATVDDSGEYRCQTNLSTLSDPVQLEVHIGWLLLQAPRWVFKEEDPIHLRCHSWKNTALHKVTYLQNGKGRKYFHHNSDFYIPKATLKDSGSYFCRGLVGSKNVSSETVNITITQGLAVSTISSFFPPGYQTRDKTHTCPPCPAEVKTDSTDHVKPKETENTKQPSKSCHKPKAIVHTEKVNMMSLTVLGLRMLFAKTVAVNFLLTAKLFFLRAKRSGSGVKQTLNFDLLKLAGDVESNPGPSRGHMTEYKPTVRLATRDDVPRAVRTLAAAFADYPATRHTVDPDRHIERVTELQELFLTRVGLDIGKVWVADDGAAVAVWTTPESVEAGAVFAEIGPRMAELSGSRLAAQQQMEGLLAPHRPKEPAWFLATVGVSPDHQGKGLGSAVVLPGVEAAERAGVPAFLETSAPRNLPFYERLGFTVTADVEVPEGPRTWCMTRKPGA

SEQ ID NO: 15653 - protein, 616 aa, Artificial Sequence
  Synthetic Polypeptide
MALPVTALLLPLALLLHAARPGMRTEDLPKAVVFLEPQWYRVLEKDSVTLKCQGAYSPEDNSTQWFHNESLISSQASSYFIDAATVDDSGEYRCQTNLSTLSDPVQLEVHIGWLLLQAPRWVFKEEDPIHLRCHSWKNTALHKVTYLQNGKGRKYFHHNSDFYIPKATLKDSGSYFCRGLVGSKNVSSETVNITITQGLAVSTISSFFPPGYQLEDKTHTCPPCPAPIKTDVITMDPKDNCSKDANDTLLLQLTNTSAYYMYLLLLLKSVVYFAIITCCLLRRTAFCCNGEKSRAKRSGSGATNFSLLKQAGDVEENPGPTSMDWIWRILFLVGAATGAHSGPGMRTEDLPKAVVFLEPQWYRVLEKDSVTLKCQGAYSPEDNSTQWFHNESLISSQASSYFIDAATVDDSGEYRCQTNLSTLSDPVQLEVHIGWLLLQAPRWVFKEEDPIHLRCHSWKNTALHKVTYLQNGKGRKYFHHNSDFYIPKATLKDSGSYFCRGLVGSKNVSSETVNITITQGLAVSTISSFFPPGYQTRDKTHTCPPCPAEVKTDSTDHVKPKETENTKQPSKSCHKPKAIVHTEKVNMMSLTVLGLRMLFAKTVAVNFLLTAKLFFL

SEQ ID NO: 15654 - protein, 607 aa, Artificial Sequence
  Synthetic Polypeptide
MALPVTALLLPLALLLHAARPGMRTEDLPKAVVFLEPQWYRVLEKDSVTLKCQGAYSPEDNSTQWFHNESLISSQASSYFIDAATVDDSGEYRCQTNLSTLSDPVQLEVHIGWLLLQAPRWVFKEEDPIHLRCHSWKNTALHKVTYLQNGKGRKYFHHNSDFYIPKATLKDSGSYFCRGLVGSKNVSSETVNITITQGLAVSTISSFFPPGYQLEGSPIKTDVITMDPKDNCSKDANDTLLLQLTNTSAYYMYLLLLLKSVVYFAIITCCLLRRTAFCCNGEKSRAKRSGSGATNFSLLKQAGDVEENPGPTSMDWIWRILFLVGAATGAHSGPGMRTEDLPKAVVFLEPQWYRVLEKDSVTLKCQGAYSPEDNSTQWFHNESLISSQASSYFIDAATVDDSGEYRCQTNLSTLSDPVQLEVHIGWLLLQAPRWVFKEEDPIHLRCHSWKNTALHKVTYLQNGKGRKYFHHNSDFYIPKATLKDSGSYFCRGLVGSKNVSSETVNITITQGLAVSTISSFFPPGYQTRDKTHTCPPCPAEVKTDSTDHVKPKETENTKQPSKSCHKPKAIVHTEKVNMMSLTVLGLRMLFAKTVAVNFLLTAKLFFL

SEQ ID NO: 15655 - protein, 823 aa, Artificial Sequence
  Synthetic Polypeptide
MALPVTALLLPLALLLHAARPGMRTEDLPKAVVFLEPQWYRVLEKDSVTLKCQGAYSPEDNSTQWFHNESLISSQASSYFIDAATVDDSGEYRCQTNLSTLSDPVQLEVHIGWLLLQAPRWVFKEEDPIHLRCHSWKNTALHKVTYLQNGKGRKYFHHNSDFYIPKATLKDSGSYFCRGLVGSKNVSSETVNITITQGLAVSTISSFFPPGYQLEGSMDPKDNCSKDANDTLLLQLTNTSAYYMYLLLLLKSVVYFAIITCCLLRRTAFCCNGEKSRAKRSGSGATNFSLLKQAGDVEENPGPTSMDWIWRILFLVGAATGAHSGPGMRTEDLPKAVVFLEPQWYRVLEKDSVTLKCQGAYSPEDNSTQWFHNESLISSQASSYFIDAATVDDSGEYRCQTNLSTLSDPVQLEVHIGWLLLQAPRWVFKEEDPIHLRCHSWKNTALHKVTYLQNGKGRKYFHHNSDFYIPKATLKDSGSYFCRGLVGSKNVSSETVNITITQGLAVSTISSFFPPGYQTRGSEVKTDSTDHVKPKETENTKQPSKSCHKPKAIVHTEKVNMMSLTVLGLRMLFAKTVAVNFLLTAKLFFLRAKRSGSGVKQTLNFDLLKLAGDVESNPGPSRGHMTEYKPTVRLATRDDVPRAVRTLAAAFADYPATRHTVDPDRHIERVTELQELFLTRVGLDIGKVWVADDGAAVAVWTTPESVEAGAVFAEIGPRMAELSGSRLAAQQQMEGLLAPHRPKEPAWFLATVGVSPDHQGKGLGSAVVLPGVEAAERAGVPAFLETSAPRNLPFYERLGFTVTADVEVPEGPRTWCMTRKPGA

SEQ ID NO: 15656 - protein, 824 aa, Artificial Sequence
  Synthetic Polypeptide
MALPVTALLLPLALLLHAARPGMRTEDLPKAVVFLEPQWYRVLEKDSVTLKCQGAYSPEDNSTQWFHNESLISSQASSYFIDAATVDDSGEYRCQTNLSTLSDPVQLEVHIGWLLLQAPRWVFKEEDPIHLRCHSWKNTALHKVTYLQNGKGRKYFHHNSDFYIPKATLKDSGSYFCRGLVGSKNVSSETVNITITQGLAVSTISSFFPPGYQLEGSPIKTDVITMDPKDNCSKDANDTLLLQLTNTSAYYMYLLLLLKSVVYFAIITCCLLRRTAFCCNGEKSRAKRSGSGATNFSLLKQAGDVEENPGPTSMDWIWRILFLVGAATGAHSGPGMRTEDLPKAVVFLEPQWYRVLEKDSVTLKCQGAYSPEDNSTQWFHNESLISSQASSYFIDAATVDDSGEYRCQTNLSTLSDPVQLEVHIGWLLLQAPRWVFKEEDPIHLRCHSWKNTALHKVTYLQNGKGRKYFHHNSDFYIPKATLKDSGSYFCRGLVGSKNVSSETVNITITQGLAVSTISSFFPPGYQTRGSDHVKPKETENTKQPSKSCHKPKAIVHTEKVNMMSLTVLGLRMLFAKTVAVNFLLTAKLFFLRAKRSGSGVKQTLNFDLLKLAGDVESNPGPSRGHMTEYKPTVRLATRDDVPRAVRTLAAAFADYPATRHTVDPDRHIERVTELQELFLTRVGLDIGKVWVADDGAAVAVWTTPESVEAGAVFAEIGPRMAELSGSRLAAQQQMEGLLAPHRPKEPAWFLATVGVSPDHQGKGLGSAVVLPGVEAAERAGVPAFLETSAPRNLPFYERLGFTVTADVEVPEGPRTWCMTRKPGA

SEQ ID NO: 15657 - protein, 816 aa, Artificial Sequence
  Synthetic Polypeptide
MALPVTALLLPLALLLHAARPGMRTEDLPKAVVFLEPQWYRVLEKDSVTLKCQGAYSPEDNSTQWFHNESLISSQASSYFIDAATVDDSGEYRCQTNLSTLSDPVQLEVHIGWLLLQAPRWVFKEEDPIHLRCHSWKNTALHKVTYLQNGKGRKYFHHNSDFYIPKATLKDSGSYFCRGLVGSKNVSSETVNITITQGLAVSTISSFFPPGYQLEGSMDPKDNCSKDANDTLLLQLTNTSAYYMYLLLLLKSVVYFAIITCCLLRRTAFCCNGEKSRAKRSGSGATNFSLLKQAGDVEENPGPTSMDWIWRILFLVGAATGAHSGPGMRTEDLPKAVVFLEPQWYRVLEKDSVTLKCQGAYSPEDNSTQWFHNESLISSQASSYFIDAATVDDSGEYRCQTNLSTLSDPVQLEVHIGWLLLQAPRWVFKEEDPIHLRCHSWKNTALHKVTYLQNGKGRKYFHHNSDFYIPKATLKDSGSYFCRGLVGSKNVSSETVNITITQGLAVSTISSFFPPGYQTRGSDHVKPKETENTKQPSKSCHKPKAIVHTEKVNMMSLTVLGLRMLFAKTVAVNFLLTAKLFFLRAKRSGSGVKQTLNFDLLKLAGDVESNPGPSRGHMTEYKPTVRLATRDDVPRAVRTLAAAFADYPATRHTVDPDRHIERVTELQELFLTRVGLDIGKVWVADDGAAVAVWTTPESVEAGAVFAEIGPRMAELSGSRLAAQQQMEGLLAPHRPKEPAWFLATVGVSPDHQGKGLGSAVVLPGVEAAERAGVPAFLETSAPRNLPFYERLGFTVTADVEVPEGPRTWCMTRKPGA

SEQ ID NO: 15658 - protein, 583 aa, Artificial Sequence
  Synthetic Polypeptide
MALPVTALLLPLALLLHAARPGMRTEDLPKAVVFLEPQWYRVLEKDSVTLKCQGAYSPEDNSTQWFHNESLISSQASSYFIDAATVDDSGEYRCQTNLSTLSDPVQLEVHIGWLLLQAPRWVFKEEDPIHLRCHSWKNTALHKVTYLQNGKGRKYFHHNSDFYIPKATLKDSGSYFCRGLVGSKNVSSETVNITITQGLAVSTISSFFPPGYQLEGSMDPKDNCSKDANDTLLLQLTNTSAYYMYLLLLLKSVVYFAIITCCLLRRTAFCCNGEKSRAKRSGSGATNFSLLKQAGDVEENPGPTSMDWIWRILFLVGAATGAHSGPGMRTEDLPKAVVFLEPQWYRVLEKDSVTLKCQGAYSPEDNSTQWFHNESLISSQASSYFIDAATVDDSGEYRCQTNLSTLSDPVQLEVHIGWLLLQAPRWVFKEEDPIHLRCHSWKNTALHKVTYLQNGKGRKYFHHNSDFYIPKATLKDSGSYFCRGLVGSKNVSSETVNITITQGLAVSTISSFFPPGYQTRGSDHVKPKETENTKQPSKSCHKPKAIVHTEKVNMMSLTVLGLRMLFAKTVAVNFLLTAKLFFL

SEQ ID NO: 15659 - protein, 825 aa, Artificial Sequence
  Synthetic Polypeptide
MALPVTALLLPLALLLHAARPGMRTEDLPKAVVFLEPQWYRVLEKDSVTLKCQGAYSPEDNSTQWFHNESLISSQASSYFIDAATVDDSGEYRCQTNLSTLSDPVQLEVHIGWLLLQAPRWVFKEEDPIHLRCHSWKNTALHKVTYLQNGKGRKYFHHNSDFYIPKATLKDSGSYFCRGLVGSKNVSSETVNITITQGLAVSTISSFFPPGYQLEDKTHTCPPCPAMDPKDNCSKDANDTLLLQLTNTSAYYMYLLLLLKSVVYFAIITCCLLRRTAFCCNGEKSRAKRSGSGATNFSLLKQAGDVEENPGPTSMDWIWRILFLVGAATGAHSGPGMRTEDLPKAVVFLEPQWYRVLEKDSVTLKCQGAYSPEDNSTQWFHNESLISSQASSYFIDAATVDDSGEYRCQTNLSTLSDPVQLEVHIGWLLLQAPRWVFKEEDPIHLRCHSWKNTALHKVTYLQNGKGRKYFHHNSDFYIPKATLKDSGSYFCRGLVGSKNVSSETVNITITQGLAVSTISSFFPPGYQTRGSDHVKPKETENTKQPSKSCHKPKAIVHTEKVNMMSLTVLGLRMLFAKTVAVNFLLTAKLFFLRAKRSGSGVKQTLNFDLLKLAGDVESNPGPSRGHMTEYKPTVRLATRDDVPRAVRTLAAAFADYPATRHTVDPDRHIERVTELQELFLTRVGLDIGKVWVADDGAAVAVWTTPESVEAGAVFAEIGPRMAELSGSRLAAQQQMEGLLAPHRPKEPAWFLATVGVSPDHQGKGLGSAVVLPGVEAAERAGVPAFLETSAPRNLPFYERLGFTVTADVEVPEGPRTWCMTRKPGA

SEQ ID NO: 15660 - protein, 834 aa, Artificial Sequence
  Synthetic Polypeptide
MALPVTALLLPLALLLHAARPGMRTEDLPKAVVFLEPQWYRVLEKDSVTLKCQGAYSPEDNSTQWFHNESLISSQASSYFIDAATVDDSGEYRCQTNLSTLSDPVQLEVHIGWLLLQAPRWVFKEEDPIHLRCHSWKNTALHKVTYLQNGKGRKYFHHNSDFYIPKATLKDSGSYFCRGLVGSKNVSSETVNITITQGLAVSTISSFFPPGYQLEDKTHTCPPCPAMDPKDNCSKDANDTLLLQLTNTSAYYMYLLLLLKSVVYFAIITCCLLRRTAFCCNGEKSRAKRSGSGATNFSLLKQAGDVEENPGPTSMDWIWRILFLVGAATGAHSGPGMRTEDLPKAVVFLEPQWYRVLEKDSVTLKCQGAYSPEDNSTQWFHNESLISSQASSYFIDAATVDDSGEYRCQTNLSTLSDPVQLEVHIGWLLLQAPRWVFKEEDPIHLRCHSWKNTALHKVTYLQNGKGRKYFHHNSDFYIPKATLKDSGSYFCRGLVGSKNVSSETVNITITQGLAVSTISSFFPPGYQTRDKTHTCPPCPADHVKPKETENTKQPSKSCHKPKAIVHTEKVNMMSLTVLGLRMLFAKTVAVNFLLTAKLFFLRAKRSGSGVKQTLNFDLLKLAGDVESNPGPSRGHMTEYKPTVRLATRDDVPRAVRTLAAAFADYPATRHTVDPDRHIERVTELQELFLTRVGLDIGKVWVADDGAAVAVWTTPESVEAGAVFAEIGPRMAELSGSRLAAQQQMEGLLAPHRPKEPAWFLATVGVSPDHQGKGLGSAVVLPGVEAAERAGVPAFLETSAPRNLPFYERLGFTVTADVEVPEGPRTWCMTRKPGA

SEQ ID NO: 15661 - protein, 601 aa, Artificial Sequence
  Synthetic Polypeptide
MALPVTALLLPLALLLHAARPGMRTEDLPKAVVFLEPQWYRVLEKDSVTLKCQGAYSPEDNSTQWFHNESLISSQASSYFIDAATVDDSGEYRCQTNLSTLSDPVQLEVHIGWLLLQAPRWVFKEEDPIHLRCHSWKNTALHKVTYLQNGKGRKYFHHNSDFYIPKATLKDSGSYFCRGLVGSKNVSSETVNITITQGLAVSTISSFFPPGYQLEDKTHTCPPCPAMDPKDNCSKDANDTLLLQLTNTSAYYMYLLLLLKSVVYFAIITCCLLRRTAFCCNGEKSRAKRSGSGATNFSLLKQAGDVEENPGPTSMDWIWRILFLVGAATGAHSGPGMRTEDLPKAVVFLEPQWYRVLEKDSVTLKCQGAYSPEDNSTQWFHNESLISSQASSYFIDAATVDDSGEYRCQTNLSTLSDPVQLEVHIGWLLLQAPRWVFKEEDPIHLRCHSWKNTALHKVTYLQNGKGRKYFHHNSDFYIPKATLKDSGSYFCRGLVGSKNVSSETVNITITQGLAVSTISSFFPPGYQTRDKTHTCPPCPADHVKPKETENTKQPSKSCHKPKAIVHTEKVNMMSLTVLGLRMLFAKTVAVNFLLTAKLFFL

SEQ ID NO: 15662 - protein, 374 aa, Artificial Sequence; identical to SEQ ID NO: 15535
  Synthetic Polypeptide

SEQ ID NO: 15663 - protein, 378 aa, Artificial Sequence
  Synthetic Polypeptide
MDWIWRILFLVGAATGAHSGPGMRTEDLPKAVVFLEPQWYRVLEKDSVTLKCQGAYSPEDNSTQWFHNESLISSQASSYFIDAATVDDSGEYRCQTNLSTLSDPVQLEVHIGWLLLQAPRWVFKEEDPIHLRCHSWKNTALHKVTYLQNGKGRKYFHHNSDFYIPKATLKDSGSYFCRGLVGSKNVSSETVNITITQGLAVSTISSFFPPGYQTRASTKGPSVFPLAPSSKSTSGGTAALGCLVKDYFPEPVTVSWNSGALTSGVHTFPAVLQSSGLYSLSSVVTVPSSSLGTQTYICNVNHKPSNTKVDKRVEPKSCIPEDTFFPSPESSCDVKLVEKSFETDTNLNFQNLSVIGFRILLLKVAGFNLLMTLRLWSS

SEQ ID NO: 15664 - protein, 388 aa, Artificial Sequence; identical to SEQ ID NO: 15537
  Synthetic Polypeptide

SEQ ID NO: 15665 - protein, 386 aa, Artificial Sequence
  Synthetic Polypeptide
MDWIWRILFLVGAATGAHSGPGMRTEDLPKAVVFLEPQWYRVLEKDSVTLKCQGAYSPEDNSTQWFHNESLISSQASSYFIDAATVDDSGEYRCQTNLSTLSDPVQLEVHIGWLLLQAPRWVFKEEDPIHLRCHSWKNTALHKVTYLQNGKGRKYFHHNSDFYIPKATLKDSGSYFCRGLVGSKNVSSETVNITITQGLAVSTISSFFPPGYQTRASTKGPSVFPLAPSSKSTSGGTAALGCLVKDYFPEPVTVSWNSGALTSGVHTFPAVLQSSGLYSLSSVVTVPSSSLGTQTYICNVNHKPSNTKVDKRVEPKSCEVKTDSTDHVKPKETENTKQPSKSCHKPKAIVHTEKVNMMSLTVLGLRMLFAKTVAVNFLLTAKLFFL

SEQ ID NO: 15666 - protein, 639 aa, Artificial Sequence
  Synthetic Polypeptide
MALPVTALLLPLALLLHAARPQVQLVESGGGLVQAGDSVTLSCTASGRTFSSYALAWFRQRPGKEREFVAGLRWGGPTNYADSVKDRFTISGDSAKHTMYLQMNSLKPEDTAVYYCGYNPGGWAVPSQYEYDSWGQGTQVTVSSGTGGGGSGGGGSGGGGSEFDIQMTQSPSSLSASVGDRVTITCKASDHINNWLAWYQQKPGQAPKLLIYGATTLETGVPSRFSGSGSGTDYTLTISSLQPEDFATYYCQQSWNTPWTFGQGTKLEIKRGGGGSGGGGSGGGGSQVQLQQPGAELVKPGASVKMSCKASGYAFSSYWINWMKQKPGQGLEWIGQIYPGDGDTNYNGKFKGRATLTADTSSSTAYMQLSSLTSEDSAVYFCARSITTVVGCAMDYWGQGTSVTVSSTREQKLISEEDLKIEVMYPPPYLDNEKSNGTIIHVKGKHLCPSPLFPGPSKPFWVLVVVGGVLACYSLLVTVAFIIFWVRSKRSRLLHSDYMNMTPRRPGPTRKHYQPYAPPRDFAAYRSRVKFSRSADAPAYQQGQNQLYNELNLGRREEYDVLDKRRGRDPEMGGKPRRKNPQEGLYNELQKDKMAEAYSEIGMKGERRRGKGHDGLYQGLSTATKDTYDALHMQALPPR

SEQ ID NO: 15667 - protein, 645 aa, Artificial Sequence
  Synthetic Polypeptide
MALPVTALLLPLALLLHAARPQVQLVESGGGLVQAGDSVTLSCTASGRTFSSYALAWFRQRPGKEREFVAGLRWGGPTNYADSVKDRFTISGDSAKHTMYLQMNSLKPEDTAVYYCGYNPGGWAVPSQYEYDSWGQGTQVTVSSGTGGGGSGGGGSGGGGSEFDIQMTQSPSSLSASVGDRVTITCKASDHINNWLAWYQQKPGQAPKLLIYGATTLETGVPSRFSGSGSGTDYTLTISSLQPEDFATYYCQQSWNTPWTFGQGTKLEIKRGGGGSGGGGSGGGGSQVQLQQPGAELVKPGASVKMSCKASGYAFSSYWINWMKQKPGQGLEWIGQIYPGDGDTNYNGKFKGRATLTADTSSSTAYMQLSSLTSEDSAVYFCARSITTVVGCAMDYWGQGTSVTVSSTREQKLISEEDLAKPTTTPAPRPPTPAPTIASQPLSLRPEACRPAAGGAVHTRGLDFACDIYIWAPLAGTCGVLLLSLVITLYCKRGRKKLLYIFKQPFMRPVQTTQEEDGCSCRFPEEEEGGCELRVKFSRSADAPAYQQGQNQLYNELNLGRREEYDVLDKRRGRDPEMGGKPRRKNPQEGLYNELQKDKMAEAYSEIGMKGERRRGKGHDGLYQGLSTATKDTYDALHMQALPPR

SEQ ID NO: 15668 - protein, 1058 aa, Artificial Sequence
  Synthetic Polypeptide
MALPVTALLLPLALLLHAARPQVQLVESGGGLVQAGDSVTLSCTASGRTFSSYALAWFRQRPGKEREFVAGLRWGGPTNYADSVKDRFTISGDSAKHTMYLQMNSLKPEDTAVYYCGYNPGGWAVPSQYEYDSWGQGTQVTVSSGTGGGGSGGGGSGGGGSEFDIQMTQSPSSLSASVGDRVTITCKASDHINNWLAWYQQKPGQAPKLLIYGATTLETGVPSRFSGSGSGTDYTLTISSLQPEDFATYYCQQSWNTPWTFGQGTKLEIKRGGGGSGGGGSGGGGSQVQLQQPGAELVKPGASVKMSCKASGYAFSSYWINWMKQKPGQGLEWIGQIYPGDGDTNYNGKFKGRATLTADTSSSTAYMQLSSLTSEDSAVYFCARSITTVVGCAMDYWGQGTSVTVSSTREQKLISEEDLAKPTTTPAPRPPTPAPTIASQPLSLRPEACRPAAGGAVHTRGLDFACDIYIWAPLAGTCGVLLLSLVITLYCGRARVKFSRSADAPAYQQGQNQLYNELNLGRREEYDVLDKRRGRDPEMGGKPRRKNPQEGLYNELQKDKMAEAYSEIGMKGERRRGKGHDGLYQGLSTATKDTYDALHMQALPPRSRGSGATNFSLLKQAGDVEENPGPGIHMATYEVLCEVARKLGTDDREVVLFLLNVFIPQPTLAQLIGALRALKEEGRLTFPLLAECLFRAGRRDLLRDLLHLDPRFLERHLAGTMSYFSPYQLTVLHVDGELCARDIRSLIFLSKDTIGSRSTPQTFLHWVYCMENLDLLGPTDVDALMSMLRSLSRVDLQRQVQTLMGLHLSGPSHSQHYRHTPLETDFYDYKDDDDKTSGSGEGRGSLLTCGDVEENPGPHMTEYKPTVRLATRDDVPRAVRTLAAAFADYPATRHTVDPDRHIERVTELQELFLTRVGLDIGKVWVADDGAAVAVWTTPESVEAGAVFAEIGPRMAELSGSRLAAQQQMEGLLAPHRPKEPAWFLATVGVSPDHQGKGLGSAVVLPGVEAAERAGVPAFLETSAPRNLPFYERLGFTVTADVEVPEGPRTWCMTRKPGA

SEQ ID NO: 15669 - protein, 998 aa, Artificial Sequence
  Synthetic Polypeptide
MALPVTALLLPLALLLHAARPQVQLVESGGGLVQAGDSVTLSCTASGRTFSSYALAWFRQRPGKEREFVAGLRWGGPTNYADSVKDRFTISGDSAKHTMYLQMNSLKPEDTAVYYCGYNPGGWAVPSQYEYDSWGQGTQVTVSSGTGGGGSGGGGSGGGGSEFDIQMTQSPSSLSASVGDRVTITCKASDHINNWLAWYQQKPGQAPKLLIYGATTLETGVPSRFSGSGSGTDYTLTISSLQPEDFATYYCQQSWNTPWTFGQGTKLEIKRLEIQNPDPAVYQLRDSKSSDKSVCLFTDFDSQTNVSQSKDSDVYITDKCVLDMRSMDFKSNSAVAWSNKSDFACANAFNNSIIPEDTFFPSSDVPCDVKLVEKSFETDTNLNFQNLSVIGFRILLLKVAGFNLLMTLRLWSSRAKRSGSGVKQTLNFDLLKLAGDVESNPGPTSMDWIWRILFLVGAATGAHSFEQVQLQQPGAELVKPGASVKMSCKASGYAFSSYWINWMKQKPGQGLEWIGQIYPGDGDTNYNGKFKGRATLTADTSSSTAYMQLSSLTSEDSAVYFCARSITTVVGCAMDYWGQGTSVTVSSTREDLKNVFPPEVAVFEPSKAEIAHTQKATLVCLATGFYPDHVELSWWVNGKEVHSGVCTDPQPLKEQPALNDSRYCLSSRLRVSATFWQNPRNHFRCQVQFYGLSENDEWTQDRAKPVTQIVSAEAWGRADCGITSASYHQGVLSATILYEILLGKATLYAVLVSALVLMAMVKRKDSRGRAKRSGSGATNFSLLKQAGDVEENPGPSRGHMTEYKPTVRLATRDDVPRAVRTLAAAFADYPATRHTVDPDRHIERVTELQELFLTRVGLDIGKVWVADDGAAVAVWTTPESVEAGAVFAEIGPRMAELSGSRLAAQQQMEGLLAPHRPKEPAWFLATVGVSPDHQGKGLGSAVVLPGVEAAERAGVPAFLETSAPRNLPFYERLGFTVTADVEVPEGPRTWCMTRKPGA

SEQ ID NO: 15670 - protein, 997 aa, Artificial Sequence
  Synthetic Polypeptide
MALPVTALLLPLALLLHAARPQVQLVESGGGLVQAGDSVTLSCTASGRTFSSYALAWFRQRPGKEREFVAGLRWGGPTNYADSVKDRFTISGDSAKHTMYLQMNSLKPEDTAVYYCGYNPGGWAVPSQYEYDSWGQGTQVTVSSGTGGGGSGGGGSGGGGSEFDIQMTQSPSSLSASVGDRVTITCKASDHINNWLAWYQQKPGQAPKLLIYGATTLETGVPSRFSGSGSGTDYTLTISSLQPEDFATYYCQQSWNTPWTFGQGTKLEIKRLEDLKNVFPPEVAVFEPSKAEIAHTQKATLVCLATGFYPDHVELSWWVNGKEVHSGVCTDPQPLKEQPALNDSRYCLSSRLRVSATFWQNPRNHFRCQVQFYGLSENDEWTQDRAKPVTQIVSAEAWGRADCGITSASYHQGVLSATILYEILLGKATLYAVLVSALVLMAMVKRKDSRGRAKRSGSGATNFSLLKQAGDVEENPGPTSMDWIWRILFLVGAATGAHSFEQVQLQQPGAELVKPGASVKMSCKASGYAFSSYWINWMKQKPGQGLEWIGQIYPGDGDTNYNGKFKGRATLTADTSSSTAYMQLSSLTSEDSAVYFCARSITTVVGCAMDYWGQGTSVTVSSTRIQNPDPAVYQLRDSKSSDKSVCLFTDFDSQTNVSQSKDSDVYITDKCVLDMRSMDFKSNSAVAWSNKSDFACANAFNNSIIPEDTFFPSSDVPCDVKLVEKSFETDTNLNFQNLSVIGFRILLLKVAGFNLLMTLRLWSSRAKRSGSGVKQTLNFDLLKLAGDVESNPGPSRGHMTEYKPTVRLATRDDVPRAVRTLAAAFADYPATRHTVDPDRHIERVTELQELFLTRVGLDIGKVWVADDGAAVAVWTTPESVEAGAVFAEIGPRMAELSGSRLAAQQQMEGLLAPHRPKEPAWFLATVGVSPDHQGKGLGSAVVLPGVEAAERAGVPAFLETSAPRNLPFYERLGFTVTADVEVPEGPRTWCMTRKPGA

SEQ ID NO: 15671 - protein, 764 aa, Artificial Sequence
  Synthetic Polypeptide
MALPVTALLLPLALLLHAARPQVQLVESGGGLVQAGDSVTLSCTASGRTFSSYALAWFRQRPGKEREFVAGLRWGGPTNYADSVKDRFTISGDSAKHTMYLQMNSLKPEDTAVYYCGYNPGGWAVPSQYEYDSWGQGTQVTVSSGTGGGGSGGGGSGGGGSEFDIQMTQSPSSLSASVGDRVTITCKASDHINNWLAWYQQKPGQAPKLLIYGATTLETGVPSRFSGSGSGTDYTLTISSLQPEDFATYYCQQSWNTPWTFGQGTKLEIKRLEDLKNVFPPEVAVFEPSEAEISHTQKATLVCLATGFYPDHVELSWWVNGKEVHSGVCTDPQPLKEQPALNDSRYCLSSRLRVSATFWQNPRNHFRCQVQFYGLSENDEWTQDRAKPVTQIVSAEAWGRADCGFTSESYQQGVLSATILYEILLGKATLYAVLVSALVLMAMVKRKDSRGRAKRSGSGATNFSLLKQAGDVEENPGPTSMDWIWRILFLVGAATGAHSFEQVQLQQPGAELVKPGASVKMSCKASGYAFSSYWINWMKQKPGQGLEWIGQIYPGDGDTNYNGKFKGRATLTADTSSSTAYMQLSSLTSEDSAVYFCARSITTVVGCAMDYWGQGTSVTVSSTRIQNPDPAVYQLRDSKSSDKSVCLFTDFDSQTNVSQSKDSDVYITDKCVLDMRSMDFKSNSAVAWSNKSDFACANAFNNSIIPEDTFFPSPESSCDVKLVEKSFETDTNLNFQNLSVIGFRILLLKVAGFNLLMTLRLWSS

SEQ ID NO: 15672 - protein, 989 aa, Artificial Sequence
  Synthetic Polypeptide
MALPVTALLLPLALLLHAARPQVQLVESGGGLVQAGDSVTLSCTASGRTFSSYALAWFRQRPGKEREFVAGLRWGGPTNYADSVKDRFTISGDSAKHTMYLQMNSLKPEDTAVYYCGYNPGGWAVPSQYEYDSWGQGTQVTVSSGTGGGGSGGGGSGGGGSEFDIQMTQSPSSLSASVGDRVTITCKASDHINNWLAWYQQKPGQAPKLLIYGATTLETGVPSRFSGSGSGTDYTLTISSLQPEDFATYYCQQSWNTPWTFGQGTKLEIKRLEDLKNVFPPEVAVFEPSEAEISHTQKATLVCLATGFYPDHVELSWWVNGKEVHSGVCTDPQPLKEQPALNDSRYCLSSRLRVSATFWQNPRNHFRCQVQFYGLSENDEWTQDRAKPVTQIVSAEAWGRADCGFTSESYQQGVLSATILYEILLGKATLYAVLVSALVLMAMVKRKDSRGRAKRSGSGATNFSLLKQAGDVEENPGPTSMDWIWRILFLVGAATGAHSFEQVQLQQPGAELVKPGASVKMSCKASGYAFSSYWINWMKQKPGQGLEWIGQIYPGDGDTNYNGKFKGRATLTADTSSSTAYMQLSSLTSEDSAVYFCARSITTVVGCAMDYWGQGTSVTVSSTRIQNPDPAVYQLRDSKSSDKSVCLFTDFDSQTNVSQSKDSDVYITDKCVLDMRSMDFKSNSAVAWSNKSDFACANAFNNSIIPEDTFFPSPESSCDVKLVEKSFETDTNLNFQNLSVIGFRILLLKVAGFNLLMTLRLWSSRAKRSGSGVKQTLNFDLLKLAGDVESNPGPSRGGIHTMATYEVLCEVARKLGTDDREVVLFLLNVFIPQPTLAQLIGALRALKEEGRLTFPLLAECLFRAGRRDLLRDLLHLDPRFLERHLAGTMSYFSPYQLTVLHVDGELCARDIRSLIFLSKDTIGSRSTPQTFLHWVYCMENLDLLGPTDVDALMSMLRSLSRVDLQRQVQTLMGLHLSGPSHSQHYRHTP

SEQ ID NO: 15673 - protein, 768 aa, Artificial Sequence
  Synthetic Polypeptide
MALPVTALLLPLALLLHAARPQVQLVESGGGLVQAGDSVTLSCTASGRTFSSYALAWFRQRPGKEREFVAGLRWGGPTNYADSVKDRFTISGDSAKHTMYLQMNSLKPEDTAVYYCGYNPGGWAVPSQYEYDSWGQGTQVTVSSGTGGGGSGGGGSGGGGSEFDIQMTQSPSSLSASVGDRVTITCKASDHINNWLAWYQQKPGQAPKLLIYGATTLETGVPSRFSGSGSGTDYTLTISSLQPEDFATYYCQQSWNTPWTFGQGTKLEIKRLEIQNPDPAVYQLRDSKSSDKSVCLFTDFDSQTNVSQSKDSDVYITDKCVLDMRSMDFKSNSAVAWSNKSDFACANAFNNSIIPEDTFFPSPESSCDVKLVEKSFETDTNLNFQNLSVIGFRILLLKVAGFNLLMTLRLWSSRAKRSGSGVKQTLNFDLLKLAGDVESNPGPTSMDWIWRILFLVGAATGAHSFEQVQLQQPGAELVKPGASVKMSCKASGYAFSSYWINWMKQKPGQGLEWIGQIYPGDGDTNYNGKFKGRATLTADTSSSTAYMQLSSLTSEDSAVYFCARSITTVVGCAMDYWGQGTSVTVSSTREDLKNVFPPEVAVFEPSEAEISHTQKATLVCLATGFYPDHVELSWWVNGKEVHSGVCTDPQPLKEQPALNDSRYCLSSRLRVSATFWQNPRNHFRCQVQFYGLSENDEWTQDRAKPVTQIVSAEAWGRADCGFTSESYQQGVLSATILYEILLGKATLYAVLVSALVLMAMVKRKDSRG

SEQ ID NO: 15674 - protein, 990 aa, Artificial Sequence
  Synthetic Polypeptide
MALPVTALLLPLALLLHAARPQVQLVESGGGLVQAGDSVTLSCTASGRTFSSYALAWFRQRPGKEREFVAGLRWGGPTNYADSVKDRFTISGDSAKHTMYLQMNSLKPEDTAVYYCGYNPGGWAVPSQYEYDSWGQGTQVTVSSGTGGGGSGGGGSGGGGSEFDIQMTQSPSSLSASVGDRVTITCKASDHINNWLAWYQQKPGQAPKLLIYGATTLETGVPSRFSGSGSGTDYTLTISSLQPEDFATYYCQQSWNTPWTFGQGTKLEIKRLEIQNPDPAVYQLRDSKSSDKSVCLFTDFDSQTNVSQSKDSDVYITDKCVLDMRSMDFKSNSAVAWSNKSDFACANAFNNSIIPEDTFFPSPESSCDVKLVEKSFETDTNLNFQNLSVIGFRILLLKVAGFNLLMTLRLWSSRAKRSGSGVKQTLNFDLLKLAGDVESNPGPTSMDWIWRILFLVGAATGAHSFEQVQLQQPGAELVKPGASVKMSCKASGYAFSSYWINWMKQKPGQGLEWIGQIYPGDGDTNYNGKFKGRATLTADTSSSTAYMQLSSLTSEDSAVYFCARSITTVVGCAMDYWGQGTSVTVSSTREDLKNVFPPEVAVFEPSEAEISHTQKATLVCLATGFYPDHVELSWWVNGKEVHSGVCTDPQPLKEQPALNDSRYCLSSRLRVSATFWQNPRNHFRCQVQFYGLSENDEWTQDRAKPVTQIVSAEAWGRADCGFTSESYQQGVLSATILYEILLGKATLYAVLVSALVLMAMVKRKDSRGRAKRSGSGATNFSLLKQAGDVEENPGPSRGGIHTMATYEVLCEVARKLGTDDREVVLFLLNVFIPQPTLAQLIGALRALKEEGRLTFPLLAECLFRAGRRDLLRDLLHLDPRFLERHLAGTMSYFSPYQLTVLHVDGELCARDIRSLIFLSKDTIGSRSTPQTFLHWVYCMENLDLLGPTDVDALMSMLRSLSRVDLQRQVQTLMGLHLSGPSHSQHYRHTP

SEQ ID NO: 15675 - protein, 1042 aa, Artificial Sequence
  Synthetic Polypeptide
MALPVTALLLPLALLLHAARPLEGKPIPNPLLGLDSTGSGEDLKNVFPPEVAVFEPSKAEIAHTQKATLVCLATGFYPDHVELSWWVNGKEVHSGVCTDPQPLKEQPALNDSRYCLSSRLRVSATFWQNPRNHFRCQVQFYGLSENDEWTQDRAKPVTQIVSAEAWGRADCGITSASYHQGVLSATILYEILLGKATLYAVLVSALVLMAMVKRKDSRGRAKRSGSGATNFSLLKQAGDVEENPGPTSMALPVTALLLPLALLLHAARPQVQLVESGGGLVQAGDSVTLSCTASGRTFSSYALAWFRQRPGKEREFVAGLRWGGPTNYADSVKDRFTISGDSAKHTMYLQMNSLKPEDTAVYYCGYNPGGWAVPSQYEYDSWGQGTQVTVSSGTGGGGSGGGGSGGGGSEFDIQMTQSPSSLSASVGDRVTITCKASDHINNWLAWYQQKPGQAPKLLIYGATTLETGVPSRFSGSGSGTDYTLTISSLQPEDFATYYCQQSWNTPWTFGQGTKLEIKRGGGGSGGGGSGGGGSQVQLQQPGAELVKPGASVKMSCKASGYAFSSYWINWMKQKPGQGLEWIGQIYPGDGDTNYNGKFKGRATLTADTSSSTAYMQLSSLTSEDSAVYFCARSITTVVGCAMDYWGQGTSVTVSSTREQKLISEEDGSGIQNPDPAVYQLRDSKSSDKSVCLFTDFDSQTNVSQSKDSDVYITDKCVLDMRSMDFKSNSAVAWSNKSDFACANAFNNSIIPEDTFFPSSDVPCDVKLVEKSFETDTNLNFQNLSVIGFRILLLKVAGFNLLMTLRLWSSRAKRSGSGVKQTLNFDLLKLAGDVESNPGPSRGHMTEYKPTVRLATRDDVPRAVRTLAAAFADYPATRHTVDPDRHIERVTELQELFLTRVGLDIGKVWVADDGAAVAVWTTPESVEAGAVFAEIGPRMAELSGSRLAAQQQMEGLLAPHRPKEPAWFLATVGVSPDHQGKGLGSAVVLPGVEAAERAGVPAFLETSAPRNLPFYERLGFTVTADVEVPEGPRTWCMTRKPGA

SEQ ID NO: 15676 - protein, 1043 aa, Artificial Sequence
  Synthetic Polypeptide
MALPVTALLLPLALLLHAARPLEQKLISEEDLGSGDRPDPAVYQLRDSKSSDKSVCLFTDFDSQTNVSQSKDSDVYITDKCVLDMRSMDFKSNSAVAWSNKSDFACANAFNNSIIPEDTFFPSPESSCDVKLVEKSFETDTNLNFQNLSVIGFRILLLKVAGFNLLMTLRLWSSSSRAKRSGSGVKQTLNFDLLKLAGDVESNPGPTSMALPVTALLLPLALLLHAARPQVQLVESGGGLVQAGDSVTLSCTASGRTFSSYALAWFRQRPGKEREFVAGLRWGGPTNYADSVKDRFTISGDSAKHTMYLQMNSLKPEDTAVYYCGYNPGGWAVPSQYEYDSWGQGTQVTVSSGTGGGGSGGGGSGGGGSEFDIQMTQSPSSLSASVGDRVTITCKASDHINNWLAWYQQKPGQAPKLLIYGATTLETGVPSRFSGSGSGTDYTLTISSLQPEDFATYYCQQSWNTPWTFGQGTKLEIKRGGGGSGGGGSGGGGSQVQLQQPGAELVKPGASVKMSCKASGYAFSSYWINWMKQKPGQGLEWIGQIYPGDGDTNYNGKFKGRATLTADTSSSTAYMQLSSLTSEDSAVYFCARSITTVVGCAMDYWGQGTSVTVSSTRGKPIPNPLLGLDSTGSGEDLKNVFPPEVAVFEPSEAEISHTQKATLVCLATGFYPDHVELSWWVNGKEVHSGVCTDPQPLKEQPALNDSRYCLSSRLRVSATFWQNPRNHFRCQVQFYGLSENDEWTQDRAKPVTQIVSAEAWGRADCGFTSESYQQGVLSATILYEILLGKATLYAVLVSALVLMAMVKRKDSRGRAKRSGSGATNFSLLKQAGDVEENPGPSRGHMTEYKPTVRLATRDDVPRAVRTLAAAFADYPATRHTVDPDRHIERVTELQELFLTRVGLDIGKVWVADDGAAVAVWTTPESVEAGAVFAEIGPRMAELSGSRLAAQQQMEGLLAPHRPKEPAWFLATVGVSPDHQGKGLGSAVVLPGVEAAERAGVPAFLETSAPRNLPFYERLGFTVTADVEVPEGPRTWCMTRKPGA

SEQ ID NO: 15677 - protein, 997 aa, Artificial Sequence
  Synthetic Polypeptide
MALPVTALLLPLALLLHAARPQVQLVESGGGLVQAGDSVTLSCTASGRTFSSYALAWFRQRPGKEREFVAGLRWGGPTNYADSVKDRFTISGDSAKHTMYLQMNSLKPEDTAVYYCGYNPGGWAVPSQYEYDSWGQGTQVTVSSGTGGGGSGGGGSGGGGSEFDIQMTQSPSSLSASVGDRVTITCKASDHINNWLAWYQQKPGQAPKLLIYGATTLETGVPSRFSGSGSGTDYTLTISSLQPEDFATYYCQQSWNTPWTFGQGTKLEIKRLEDLKNVFPPEVAVFEPSEAEISHTQKATLVCLATGFYPDHVELSWWVNGKEVHSGVSTDPQPLKEQPALNDSRYCLSSRLRVSATFWQNPRNHFRCQVQFYGLSENDEWTQDRAKPVTQIVSAEAWGRADCGFTSESYQQGVLSATILYEILLGKATLYAVLVSALVLMAMVKRKDSRGRAKRSGSGATNFSLLKQAGDVEENPGPTSMDWIWRILFLVGAATGAHSFEQVQLQQPGAELVKPGASVKMSCKASGYAFSSYWINWMKQKPGQGLEWIGQIYPGDGDTNYNGKFKGRATLTADTSSSTAYMQLSSLTSEDSAVYFCARSITTVVGCAMDYWGQGTSVTVSSTRIQNPDPAVYQLRDSKSSDKSVCLFTDFDSQTNVSQSKDSDVYITDKTVLDMRSMDFKSNSAVAWSNKSDFACANAFNNSIIPEDTFFPSPESSCDVKLVEKSFETDTNLNFQNLSVIGFRILLLKVAGFNLLMTLRLWSSRAKRSGSGVKQTLNFDLLKLAGDVESNPGPSRGHMTEYKPTVRLATRDDVPRAVRTLAAAFADYPATRHTVDPDRHIERVTELQELFLTRVGLDIGKVWVADDGAAVAVWTTPESVEAGAVFAEIGPRMAELSGSRLAAQQQMEGLLAPHRPKEPAWFLATVGVSPDHQGKGLGSAVVLPGVEAAERAGVPAFLETSAPRNLPFYERLGFTVTADVEVPEGPRTWCMTRKPGA

SEQ ID NO: 15678 - protein, 1079 aa, Artificial Sequence
  Synthetic Polypeptide
MALPVTALLLPLALLLHAARPQVQLVESGGGLVQAGDSVTLSCTASGRTFSSYALAWFRQRPGKEREFVAGLRWGGPTNYADSVKDRFTISGDSAKHTMYLQMNSLKPEDTAVYYCGYNPGGWAVPSQYEYDSWGQGTQVTVSSGTGGGGSGGGGSGGGGSEFDIQMTQSPSSLSASVGDRVTITCKASDHINNWLAWYQQKPGQAPKLLIYGATTLETGVPSRFSGSGSGTDYTLTISSLQPEDFATYYCQQSWNTPWTFGQGTKLEIKRLEDLKNVFPPEVAVFEPSEAEISHTQKATLVCLATGFYPDHVELSWWVNGKEVHSGVSTDPQPLKEQPALNDSRYCLSSRLRVSATFWQNPRNHFRCQVQFYGLSENDEWTQDRAKPVTQIVSAEAWGRADCGFTSESYQQGVLSATILYEILLGKATLYAVLVSALVLMAMVKRKDSRGRAKRSGSGATNFSLLKQAGDVEENPGPTSMDWIWRILFLVGAATGAHSFEQVQLQQPGAELVKPGASVKMSCKASGYAFSSYWINWMKQKPGQGLEWIGQIYPGDGDTNYNGKFKGRATLTADTSSSTAYMQLSSLTSEDSAVYFCARSITTVVGCAMDYWGQGTSVTVSSTREQKLISEEDGSGTPFPSLAPPIMLLVDGKQQMVVVCLVLDVAPPGLDSPIWFSAGNGSALDAFTYGPSPATDGTWTNLAHLSLPSEELASWEPLVCHTGPGAEGHSRSTQPMHLSGEASTARTCPQEPLRGTPGGALWLGVLRLLLFKLLLFDLLLTCSCLCDPAGPLPSPATTTRLRALGSHRLHPATETGGREATSSPRPQPRDRRWGDTPPGRKPGSPVRAKRSGSGVKQTLNFDLLKLAGDVESNPGPSRGHMTEYKPTVRLATRDDVPRAVRTLAAAFADYPATRHTVDPDRHIERVTELQELFLTRVGLDIGKVWVADDGAAVAVWTTPESVEAGAVFAEIGPRMAELSGSRLAAQQQMEGLLAPHRPKEPAWFLATVGVSPDHQGKGLGSAVVLPGVEAAERAGVPAFLETSAPRNLPFYERLGFTVTADVEVPEGPRTWCMTRKPGA

SEQ ID NO: 15679 - protein, 1097 aa, Artificial Sequence
  Synthetic Polypeptide
MALPVTALLLPLALLLHAARPLEDLKNVFPPEVAVFEPSEAEISHTQKATLVCLATGFYPDHVELSWWVNGKEVHSGVSTDPQPLKEQPALNDSRYCLSSRLRVSATFWQNPRNHFRCQVQFYGLSENDEWTQDRAKPVTQIVSAEAWGRADCGFTSESYQQGVLSATILYEILLGKATLYAVLVSALVLMAMVKRKDSRGRAKRSGSGATNFSLLKQAGDVEENPGPTSMALPVTALLLPLALLLHAARPQVQLVESGGGLVQAGDSVTLSCTASGRTFSSYALAWFRQRPGKEREFVAGLRWGGPTNYADSVKDRFTISGDSAKHTMYLQMNSLKPEDTAVYYCGYNPGGWAVPSQYEYDSWGQGTQVTVSSGTGGGGSGGGGSGGGGSEFDIQMTQSPSSLSASVGDRVTITCKASDHINNWLAWYQQKPGQAPKLLIYGATTLETGVPSRFSGSGSGTDYTLTISSLQPEDFATYYCQQSWNTPWTFGQGTKLEIKRGGGGSGGGGSGGGGSQVQLQQPGAELVKPGASVKMSCKASGYAFSSYWINWMKQKPGQGLEWIGQIYPGDGDTNYNGKFKGRATLTADTSSSTAYMQLSSLTSEDSAVYFCARSITTVVGCAMDYWGQGTSVTVSSTREQKLISEEDLGSGTPFPSLAPPIMLLVDGKQQMVVVCLVLDVAPPGLDSPIWFSAGNGSALDAFTYGPSPATDGTWTNLAHLSLPSEELASWEPLVCHTGPGAEGHSRSTQPMHLSGEASTARTCPQEPLRGTPGGALWLGVLRLLLFKLLLFDLLLTCSCLCDPAGPLPSPATTTRLRALGSHRLHPATETGGREATSSPRPQPRDRRWGDTPPGRKPGSPVRAKRSGSGVKQTLNFDLLKLAGDVESNPGPSRSRGHMTEYKPTVRLATRDDVPRAVRTLAAAFADYPATRHTVDPDRHIERVTELQELFLTRVGLDIGKVWVADDGAAVAVWTTPESVEAGAVFAEIGPRMAELSGSRLAAQQQMEGLLAPHRPKEPAWFLATVGVSPDHQGKGLGSAVVLPGVEAAERAGVPAFLETSAPRNLPFYERLGFTVTADVEVPEGPRTWCMTRKPGA

SEQ ID NO: 15680 - protein, 1034 aa, Artificial Sequence
  Synthetic Polypeptide
MALPVTALLLPLALLLHAARPQVQLVESGGGLVQAGDSVTLSCTASGRTFSSYALAWFRQRPGKEREFVAGLRWGGPTNYADSVKDRFTISGDSAKHTMYLQMNSLKPEDTAVYYCGYNPGGWAVPSQYEYDSWGQGTQVTVSSGTGGGGSGGGGSGGGGSEFDIQMTQSPSSLSASVGDRVTITCKASDHINNWLAWYQQKPGQAPKLLIYGATTLETGVPSRFSGSGSGTDYTLTISSLQPEDFATYYCQQSWNTPWTFGQGTKLEIKRLEGKPIPNPLLGLDSTGSGDKQLDADVSPKPTIFLPSIAETKLQKAGTYLCLLEKFFPDVIKIHWQEKKSNTILGSQEGNTMKTNDTYMKFSWLTVPEKSLDKEHRCIVRHENNKNGVDQEIIFPPIKTDVITMDPKDNCSKDANDTLLLQLTNTSAYYMYLLLLLKSVVYFAIITCCLLRRTAFCCNGEKSRAKRSGSGATNFSLLKQAGDVEENPGPTSMDWIWRILFLVGAATGAHSFEQVQLQQPGAELVKPGASVKMSCKASGYAFSSYWINWMKQKPGQGLEWIGQIYPGDGDTNYNGKFKGRATLTADTSSSTAYMQLSSLTSEDSAVYFCARSITTVVGCAMDYWGQGTSVTVSSTREQKLISEEDGSGSQPHTKPSVFVMKNGTNVACLVKEFYPKDIRINLVSSKKITEFDPAIVISPSGKYNAVKLGKYEDSNSVTCSVQHDNKTVHSTDFEVKTDSTDHVKPKETENTKQPSKSCHKPKAIVHTEKVNMMSLTVLGLRMLFAKTVAVNFLLTAKLFFLRAKRSGSGVKQTLNFDLLKLAGDVESNPGPSRGHMTEYKPTVRLATRDDVPRAVRTLAAAFADYPATRHTVDPDRHIERVTELQELFLTRVGLDIGKVWVADDGAAVAVWTTPESVEAGAVFAEIGPRMAELSGSRLAAQQQMEGLLAPHRPKEPAWFLATVGVSPDHQGKGLGSAVVLPGVEAAERAGVPAFLETSAPRNLPFYERLGFTVTADVEVPEGPRTWCMTRKPGA

SEQ ID NO: 15681 - protein, 772 aa, Artificial Sequence
  Synthetic Polypeptide
MALPVTALLLPLALLLHAARPQVQLVESGGGLVQAGDSVTLSCTASGRTFSSYALAWFRQRPGKEREFVAGLRWGGPTNYADSVKDRFTISGDSAKHTMYLQMNSLKPEDTAVYYCGYNPGGWAVPSQYEYDSWGQGTQVTVSSGTGGGGSGGGGSGGGGSEFDIQMTQSPSSLSASVGDRVTITCKASDHINNWLAWYQQKPGQAPKLLIYGATTLETGVPSRFSGSGSGTDYTLTISSLQPEDFATYYCQQSWNTPWTFGQGTKLEIKRLESQPHTKPSVFVMKNGTNVACLVKEFYPKDIRINLVSSKKITEFDPAIVISPSGKYNAVKLGKYEDSNSVTCSVQHDNKTVHSTDFEVKTDSTDHVKPKETENTKQPSKSCHKPKAIVHTEKVNMMSLTVLGLRMLFAKTVAVNFLLTAKLFFLRAKRSGSGATNFSLLKQAGDVEENPGPTSMDWIWRILFLVGAATGAHSFEQVQLQQPGAELVKPGASVKMSCKASGYAFSSYWINWMKQKPGQGLEWIGQIYPGDGDTNYNGKFKGRATLTADTSSSTAYMQLSSLTSEDSAVYFCARSITTVVGCAMDYWGQGTSVTVSSTRDKQLDADVSPKPTIFLPSIAETKLQKAGTYLCLLEKFFPDVIKIHWQEKKSNTILGSQEGNTMKTNDTYMKFSWLTVPEKSLDKEHRCIVRHENNKNGVDQEIIFPPIKTDVITMDPKDNCSKDANDTLLLQLTNTSAYYMYLLLLLKSVVYFAIITCCLLRRTAFCCNGEKS

SEQ ID NO: 15682 - protein, 1049 aa, Artificial Sequence
  Synthetic Polypeptide
MALPVTALLLPLALLLHAARPLEGKPIPNPLLGLDSTGSGDKQLDADVSPKPTIFLPSIAETKLQKAGTYLCLLEKFFPDVIKIHWQEKKSNTILGSQEGNTMKTNDTYMKFSWLTVPEKSLDKEHRCIVRHENNKNGVDQEIIFPPIKTDVITMDPKDNCSKDANDTLLLQLTNTSAYYMYLLLLLKSVVYFAIITCCLLRRTAFCCNGEKSRAKRSGSGATNFSLLKQAGDVEENPGPTSMALPVTALLLPLALLLHAARPQVQLVESGGGLVQAGDSVTLSCTASGRTFSSYALAWFRQRPGKEREFVAGLRWGGPTNYADSVKDRFTISGDSAKHTMYLQMNSLKPEDTAVYYCGYNPGGWAVPSQYEYDSWGQGTQVTVSSGTGGGGSGGGGSGGGGSEFDIQMTQSPSSLSASVGDRVTITCKASDHINNWLAWYQQKPGQAPKLLIYGATTLETGVPSRFSGSGSGTDYTLTISSLQPEDFATYYCQQSWNTPWTFGQGTKLEIKRGGGGSGGGGSGGGGSQVQLQQPGAELVKPGASVKMSCKASGYAFSSYWINWMKQKPGQGLEWIGQIYPGDGDTNYNGKFKGRATLTADTSSSTAYMQLSSLTSEDSAVYFCARSITTVVGCAMDYWGQGTSVTVSSTREQKLISEEDGSGSQPHTKPSVFVMKNGTNVACLVKEFYPKDIRINLVSSKKITEFDPAIVISPSGKYNAVKLGKYEDSNSVTCSVQHDNKTVHSTDFEVKTDSTDHVKPKETENTKQPSKSCHKPKAIVHTEKVNMMSLTVLGLRMLFAKTVAVNFLLTAKLFFLRAKRSGSGVKQTLNFDLLKLAGDVESNPGPSRGHMTEYKPTVRLATRDDVPRAVRTLAAAFADYPATRHTVDPDRHIERVTELQELFLTRVGLDIGKVWVADDGAAVAVWTTPESVEAGAVFAEIGPRMAELSGSRLAAQQQMEGLLAPHRPKEPAWFLATVGVSPDHQGKGLGSAVVLPGVEAAERAGVPAFLETSAPRNLPFYERLGFTVTADVEVPEGPRTWCMTRKPGA

SEQ ID NO: 15683 - protein, 1174 aa, Artificial Sequence
  Synthetic Polypeptide
MALPVTALLLPLALLLHAARPQVQLVESGGGLVQAGDSVTLSCTASGRTFSSYALAWFRQRPGKEREFVAGLRWGGPTNYADSVKDRFTISGDSAKHTMYLQMNSLKPEDTAVYYCGYNPGGWAVPSQYEYDSWGQGTQVTVSSGTGGGGSGGGGSGGGGSEFDIQMTQSPSSLSASVGDRVTITCKASDHINNWLAWYQQKPGQAPKLLIYGATTLETGVPSRFSGSGSGTDYTLTISSLQPEDFATYYCQQSWNTPWTFGQGTKLEIKRGQPKANPTVTLFPPSSEELQANKATLVCLISDFYPGAVTVAWKADGSPVKAGVETTKPSKQSNNKYAASSYLSLTPEQWKSHRSYSCQVTHEGSTVEKTVAPTECSGSQSFGLLDPKLCYLLDGILFIYGVILTALFLRVKFSRSADAPAYQQGQNQLYNELNLGRREEYDVLDKRRGRDPEMGGKPQRRKNPQEGLYNELQKDKMAEAYSEIGMKGERRRGKGHDGLYQGLSTATKDTYDALHMQALPPRRAKRSGSGATNFSLLKQAGDVEENPGPTSMDWIWRILFLVGAATGAHSFEQVQLQQPGAELVKPGASVKMSCKASGYAFSSYWINWMKQKPGQGLEWIGQIYPGDGDTNYNGKFKGRATLTADTSSSTAYMQLSSLTSEDSAVYFCARSITTVVGCAMDYWGQGTSVTVSSASTKGPSVFPLAPSSKSTSGGTAALGCLVKDYFPEPVTVSWNSGALTSGVHTFPAVLQSSGLYSLSSVVTVPSSSLGTQTYICNVNHKPSNTKVDKRVEPKSCGTQSFGLLDPKLCYLLDGILFIYGVILTALFLRVKFSRSADAPAYQQGQNQLYNELNLGRREEYDVLDKRRGRDPEMGGKPQRRKNPQEGLYNELQKDKMAEAYSEIGMKGERRRGKGHDGLYQGLSTATKDTYDALHMQALPPRRAKRSGSGVKQTLNFDLLKLAGDVESNPGPSRGHMTEYKPTVRLATRDDVPRAVRTLAAAFADYPATRHTVDPDRHIERVTELQELFLTRVGLDIGKVWVADDGAAVAVWTTPESVEAGAVFAEIGPRMAELSGSRLAAQQQMEGLLAPHRPKEPAWFLATVGVSPDHQGKGLGSAVVLPGVEAAERAGVPAFLETSAPRNLPFYERLGFTVTADVEVPEGPRTWCMTRKPGA

SEQ ID NO: 15684 - protein, 960 aa, Artificial Sequence
  Synthetic Polypeptide
MALPVTALLLPLALLLHAARPQVQLVESGGGLVQAGDSVTLSCTASGRTFSSYALAWFRQRPGKEREFVAGLRWGGPTNYADSVKDRFTISGDSAKHTMYLQMNSLKPEDTAVYYCGYNPGGWAVPSQYEYDSWGQGTQVTVSSGTGGGGSGGGGSGGGGSEFDIQMTQSPSSLSASVGDRVTITCKASDHINNWLAWYQQKPGQAPKLLIYGATTLETGVPSRFSGSGSGTDYTLTISSLQPEDFATYYCQQSWNTPWTFGQGTKLEIKRLEDLKNVFPPEVAVFEPSEAEISHTQKATLVCLATGFYPDHVELSWWVNGKEVHSGVSTDPQPLKEQPALNDSRYCLSSRLRVSATFWQNPRNHFRCQVQFYGLSENDEWTQDRAKPVTQIVSAEAWGRADCGSQSFGLLDPKLCYLLDGILFIYGVILTALFLRVKFSRSADAPAYQQGQNQLYNELNLGRREEYDVLDKRRGRDPEMGGKPQRRKNPQEGLYNELQKDKMAEAYSEIGMKGERRRGKGHDGLYQGLSTATKDTYDALHMQALPPRRAKRSGSGATNFSLLKQAGDVEENPGPTSMDWIWRILFLVGAATGAHSFEQVQLQQPGAELVKPGASVKMSCKASGYAFSSYWINWMKQKPGQGLEWIGQIYPGDGDTNYNGKFKGRATLTADTSSSTAYMQLSSLTSEDSAVYFCARSITTVVGCAMDYWGQGTSVTVSSTRIQNPDPAVYQLRDSKSSDKSVCLFTDFDSQTNVSQSKDSDVYITDKTVLDMRSMDFKSNSAVAWSNKSDFACANAFNNSIIPEDTFFPSPESSCGTQSFGLLDPKLCYLLDGILFIYGVILTALFLRVKFSRSADAPAYQQGQNQLYNELNLGRREEYDVLDKRRGRDPEMGGKPQRRKNPQEGLYNELQKDKMAEAYSEIGMKGERRRGKGHDGLYQGLSTATKDTYDALHMQALPPR

SEQ ID NO: 15685 - protein, 960 aa, Artificial Sequence
  Synthetic Polypeptide
MALPVTALLLPLALLLHAARPQVQLVESGGGLVQAGDSVTLSCTASGRTFSSYALAWFRQRPGKEREFVAGLRWGGPTNYADSVKDRFTISGDSAKHTMYLQMNSLKPEDTAVYYCGYNPGGWAVPSQYEYDSWGQGTQVTVSSGTGGGGSGGGGSGGGGSEFDIQMTQSPSSLSASVGDRVTITCKASDHINNWLAWYQQKPGQAPKLLIYGATTLETGVPSRFSGSGSGTDYTLTISSLQPEDFATYYCQQSWNTPWTFGQGTKLEIKRLEDLKNVFPPEVAVFEPSKAEIAHTQKATLVCLATGFYPDHVELSWWVNGKEVHSGVCTDPQPLKEQPALNDSRYCLSSRLRVSATFWQNPRNHFRCQVQFYGLSENDEWTQDRAKPVTQIVSAEAWGRADCGSQSFGLLDPKLCYLLDGILFIYGVILTALFLRVKFSRSADAPAYQQGQNQLYNELNLGRREEYDVLDKRRGRDPEMGGKPQRRKNPQEGLYNELQKDKMAEAYSEIGMKGERRRGKGHDGLYQGLSTATKDTYDALHMQALPPRRAKRSGSGATNFSLLKQAGDVEENPGPTSMDWIWRILFLVGAATGAHSFEQVQLQQPGAELVKPGASVKMSCKASGYAFSSYWINWMKQKPGQGLEWIGQIYPGDGDTNYNGKFKGRATLTADTSSSTAYMQLSSLTSEDSAVYFCARSITTVVGCAMDYWGQGTSVTVSSTRIQNPDPAVYQLRDSKSSDKSVCLFTDFDSQTNVSQSKDSDVYITDKCVLDMRSMDFKSNSAVAWSNKSDFACANAFNNSIIPEDTFFPSSDVPCGTQSFGLLDPKLCYLLDGILFIYGVILTALFLRVKFSRSADAPAYQQGQNQLYNELNLGRREEYDVLDKRRGRDPEMGGKPQRRKNPQEGLYNELQKDKMAEAYSEIGMKGERRRGKGHDGLYQGLSTATKDTYDALHMQALPPR

SEQ ID NO: 15686 - protein, 1031 aa, Artificial Sequence
  Synthetic Polypeptide
MALPVTALLLPLALLLHAARPQVQLVESGGGLVQAGDSVTLSCTASGRTFSSYALAWFRQRPGKEREFVAGLRWGGPTNYADSVKDRFTISGDSAKHTMYLQMNSLKPEDTAVYYCGYNPGGWAVPSQYEYDSWGQGTQVTVSSGTGGGGSGGGGSGGGGSEFDIQMTQSPSSLSASVGDRVTITCKASDHINNWLAWYQQKPGQAPKLLIYGATTLETGVPSRFSGSGSGTDYTLTISSLQPEDFATYYCQQSWNTPWTFGQGTKLEIKRLEGKPIPNPLLGLDSTGSGEDLKNVFPPEVAVFEPSEAEISHTQKATLVCLATGFYPDHVELSWWVNGKEVHSGVSTDPQPLKEQPALNDSRYCLSSRLRVSATFWQNPRNHFRCQVQFYGLSENDEWTQDRAKPVTQIVSAEAWGRADCGSQSFGLLDPKLCYLLDGILFIYGVILTALFLRVKFSRSADAPAYQQGQNQLYNELNLGRREEYDVLDKRRGRDPEMGGKPQRRKNPQEGLYNELQKDKMAEAYSEIGMKGERRRGKGHDGLYQGLSTATKDTYDALHMQALPPRRAKRSGSGATNFSLLKQAGDVEENPGPTSMDWIWRILFLVGAATGAHSFEQVQLQQPGAELVKPGASVKMSCKASGYAFSSYWINWMKQKPGQGLEWIGQIYPGDGDTNYNGKFKGRATLTADTSSSTAYMQLSSLTSEDSAVYFCARSITTVVGCAMDYWGQGTSVTVSSTREQKLISEEDGSGIQNPDPAVYQLRDSKSSDKSVCLFTDFDSQTNVSQSKDSDVYITDKTVLDMRSMDFKSNSAVAWSNKSDFACANAFNNSIIPEDTFFPSPESSCGTQSFGLLDPKLCYLLDGILFIYGVILTALFLRSKRSRLLHSDYMNMTPRRPGPTRKHYQPYAPPRDFAAYRSRVKFSRSADAPAYQQGQNQLYNELNLGRREEYDVLDKRRGRDPEMGGKPQRRKNPQEGLYNELQKDKMAEAYSEIGMKGERRRGKGHDGLYQGLSTATKDTYDALHMQALPPR

SEQ ID NO: 15687 - protein, 1072 aa, Artificial Sequence
  Synthetic Polypeptide
MALPVTALLLPLALLLHAARPQVQLVESGGGLVQAGDSVTLSCTASGRTFSSYALAWFRQRPGKEREFVAGLRWGGPTNYADSVKDRFTISGDSAKHTMYLQMNSLKPEDTAVYYCGYNPGGWAVPSQYEYDSWGQGTQVTVSSGTGGGGSGGGGSGGGGSEFDIQMTQSPSSLSASVGDRVTITCKASDHINNWLAWYQQKPGQAPKLLIYGATTLETGVPSRFSGSGSGTDYTLTISSLQPEDFATYYCQQSWNTPWTFGQGTKLEIKRLEGKPIPNPLLGLDSTGSGEDLKNVFPPEVAVFEPSEAEISHTQKATLVCLATGFYPDHVELSWWVNGKEVHSGVSTDPQPLKEQPALNDSRYCLSSRLRVSATFWQNPRNHFRCQVQFYGLSENDEWTQDRAKPVTQIVSAEAWGRADCGSQSFGLLDPKLCYLLDGILFIYGVILTALFLRSKRSRLLHSDYMNMTPRRPGPTRKHYQPYAPPRDFAAYRSRVKFSRSADAPAYQQGQNQLYNELNLGRREEYDVLDKRRGRDPEMGGKPQRRKNPQEGLYNELQKDKMAEAYSEIGMKGERRRGKGHDGLYQGLSTATKDTYDALHMQALPPRRAKRSGSGATNFSLLKQAGDVEENPGPTSMDWIWRILFLVGAATGAHSFEQVQLQQPGAELVKPGASVKMSCKASGYAFSSYWINWMKQKPGQGLEWIGQIYPGDGDTNYNGKFKGRATLTADTSSSTAYMQLSSLTSEDSAVYFCARSITTVVGCAMDYWGQGTSVTVSSTREQKLISEEDGSGIQNPDPAVYQLRDSKSSDKSVCLFTDFDSQTNVSQSKDSDVYITDKTVLDMRSMDFKSNSAVAWSNKSDFACANAFNNSIIPEDTFFPSPESSCGTQSFGLLDPKLCYLLDGILFIYGVILTALFLRSKRSRLLHSDYMNMTPRRPGPTRKHYQPYAPPRDFAAYRSRVKFSRSADAPAYQQGQNQLYNELNLGRREEYDVLDKRRGRDPEMGGKPQRRKNPQEGLYNELQKDKMAEAYSEIGMKGERRRGKGHDGLYQGLSTATKDTYDALHMQALPPR

SEQ ID NO: 15688 - protein, 1033 aa, Artificial Sequence
  Synthetic Polypeptide
MALPVTALLLPLALLLHAARPQVQLVESGGGLVQAGDSVTLSCTASGRTFSSYALAWFRQRPGKEREFVAGLRWGGPTNYADSVKDRFTISGDSAKHTMYLQMNSLKPEDTAVYYCGYNPGGWAVPSQYEYDSWGQGTQVTVSSGTGGGGSGGGGSGGGGSEFDIQMTQSPSSLSASVGDRVTITCKASDHINNWLAWYQQKPGQAPKLLIYGATTLETGVPSRFSGSGSGTDYTLTISSLQPEDFATYYCQQSWNTPWTFGQGTKLEIKRLEGKPIPNPLLGLDSTGSGEDLKNVFPPEVAVFEPSEAEISHTQKATLVCLATGFYPDHVELSWWVNGKEVHSGVSTDPQPLKEQPALNDSRYCLSSRLRVSATFWQNPRNHFRCQVQFYGLSENDEWTQDRAKPVTQIVSAEAWGRADCGSQSFGLLDPKLCYLLDGILFIYGVILTALFLRVKFSRSADAPAYQQGQNQLYNELNLGRREEYDVLDKRRGRDPEMGGKPQRRKNPQEGLYNELQKDKMAEAYSEIGMKGERRRGKGHDGLYQGLSTATKDTYDALHMQALPPRRAKRSGSGATNFSLLKQAGDVEENPGPTSMDWIWRILFLVGAATGAHSFEQVQLQQPGAELVKPGASVKMSCKASGYAFSSYWINWMKQKPGQGLEWIGQIYPGDGDTNYNGKFKGRATLTADTSSSTAYMQLSSLTSEDSAVYFCARSITTVVGCAMDYWGQGTSVTVSSTREQKLISEEDLGSGIQNPDPAVYQLRDSKSSDKSVCLFTDFDSQTNVSQSKDSDVYITDKTVLDMRSMDFKSNSAVAWSNKSDFACANAFNNSIIPEDTFFPSPESSCGTQSFGLLDPKLCYLLDGILFIYGVILTALFLKRGRKKLLYIFKQPFMRPVQTTQEEDGCSCRFPEEEEGGCELRVKFSRSADAPAYQQGQNQLYNELNLGRREEYDVLDKRRGRDPEMGGKPQRRKNPQEGLYNELQKDKMAEAYSEIGMKGERRRGKGHDGLYQGLSTATKDTYDALHMQALPPR

SEQ ID NO: 15689 - protein, 1075 aa, Artificial Sequence
  Synthetic Polypeptide
MALPVTALLLPLALLLHAARPQVQLVESGGGLVQAGDSVTLSCTASGRTFSSYALAWFRQRPGKEREFVAGLRWGGPTNYADSVKDRFTISGDSAKHTMYLQMNSLKPEDTAVYYCGYNPGGWAVPSQYEYDSWGQGTQVTVSSGTGGGGSGGGGSGGGGSEFDIQMTQSPSSLSASVGDRVTITCKASDHINNWLAWYQQKPGQAPKLLIYGATTLETGVPSRFSGSGSGTDYTLTISSLQPEDFATYYCQQSWNTPWTFGQGTKLEIKRLEGKPIPNPLLGLDSTGSGEDLKNVFPPEVAVFEPSEAEISHTQKATLVCLATGFYPDHVELSWWVNGKEVHSGVSTDPQPLKEQPALNDSRYCLSSRLRVSATFWQNPRNHFRCQVQFYGLSENDEWTQDRAKPVTQIVSAEAWGRADCGSQSFGLLDPKLCYLLDGILFIYGVILTALFLKRGRKKLLYIFKQPFMRPVQTTQEEDGCSCRFPEEEEGGCELRVKFSRSADAPAYQQGQNQLYNELNLGRREEYDVLDKRRGRDPEMGGKPQRRKNPQEGLYNELQKDKMAEAYSEIGMKGERRRGKGHDGLYQGLSTATKDTYDALHMQALPPRRAKRSGSGATNFSLLKQAGDVEENPGPTSMDWIWRILFLVGAATGAHSFEQVQLQQPGAELVKPGASVKMSCKASGYAFSSYWINWMKQKPGQGLEWIGQIYPGDGDTNYNGKFKGRATLTADTSSSTAYMQLSSLTSEDSAVYFCARSITTVVGCAMDYWGQGTSVTVSSTREQKLISEEDLGSGIQNPDPAVYQLRDSKSSDKSVCLFTDFDSQTNVSQSKDSDVYITDKTVLDMRSMDFKSNSAVAWSNKSDFACANAFNNSIIPEDTFFPSPESSCGTQSFGLLDPKLCYLLDGILFIYGVILTALFLKRGRKKLLYIFKQPFMRPVQTTQEEDGCSCRFPEEEEGGCELRVKFSRSADAPAYQQGQNQLYNELNLGRREEYDVLDKRRGRDPEMGGKPQRRKNPQEGLYNELQKDKMAEAYSEIGMKGERRRGKGHDGLYQGLSTATKDTYDALHMQALPPR

SEQ ID NO: 15690 - protein, 965 aa, Artificial Sequence
  Synthetic Polypeptide
MALPVTALLLPLALLLHAARPQVQLVESGGGLVQAGDSVTLSCTASGRTFSSYALAWFRQRPGKEREFVAGLRWGGPTNYADSVKDRFTISGDSAKHTMYLQMNSLKPEDTAVYYCGYNPGGWAVPSQYEYDSWGQGTQVTVSSGTGGGGSGGGGSGGGGSEFDIQMTQSPSSLSASVGDRVTITCKASDHINNWLAWYQQKPGQAPKLLIYGATTLETGVPSRFSGSGSGTDYTLTISSLQPEDFATYYCQQSWNTPWTFGQGTKLEIKRLEQSFGLLDPKLCYLLDGILFIYGVILTALFLRVKFSRSADAPAYQQGQNQLYNELNLGRREEYDVLDKRRGRDPEMGGKPQRRKNPQEGLYNELQKDKMAEAYSEIGMKGERRRGKGHDGLYQGLSTATKDTYDALHMQALPPRRAKRSGSGATNFSLLKQAGDVEENPGPTSMDWIWRILFLVGAATGAHSFEQVQLQQPGAELVKPGASVKMSCKASGYAFSSYWINWMKQKPGQGLEWIGQIYPGDGDTNYNGKFKGRATLTADTSSSTAYMQLSSLTSEDSAVYFCARSITTVVGCAMDYWGQGTSVTVSSTRQSFGLLDPKLCYLLDGILFIYGVILTALFLRVKFSRSADAPAYQQGQNQLYNELNLGRREEYDVLDKRRGRDPEMGGKPQRRKNPQEGLYNELQKDKMAEAYSEIGMKGERRRGKGHDGLYQGLSTATKDTYDALHMQALPPRRAKRSGSGVKQTLNFDLLKLAGDVESNPGPSRGHMTEYKPTVRLATRDDVPRAVRTLAAAFADYPATRHTVDPDRHIERVTELQELFLTRVGLDIGKVWVADDGAAVAVWTTPESVEAGAVFAEIGPRMAELSGSRLAAQQQMEGLLAPHRPKEPAWFLATVGVSPDHQGKGLGSAVVLPGVEAAERAGVPAFLETSAPRNLPFYERLGFTVTADVEVPEGPRTWCMTRKPGA

SEQ ID NO: 15691 - protein, 790 aa, Artificial Sequence
  Synthetic Polypeptide
MALPVTALLLPLALLLHAARPQVQLVESGGGLVQAGDSVTLSCTASGRTFSSYALAWFRQRPGKEREFVAGLRWGGPTNYADSVKDRFTISGDSAKHTMYLQMNSLKPEDTAVYYCGYNPGGWAVPSQYEYDSWGQGTQVTVSSGTGGGGSGGGGSGGGGSEFDIQMTQSPSSLSASVGDRVTITCKASDHINNWLAWYQQKPGQAPKLLIYGATTLETGVPSRFSGSGSGTDYTLTISSLQPEDFATYYCQQSWNTPWTFGQGTKLEIKRLEGQPKANPTVTLFPPSSEELQANKATLVCLISDFYPGAVTVAWKADGSPVKAGVETTKPSKQSNNKYAASSYLSLTPEQWKSHRSYSCQVTHEGSTVEKTVAPTECSPIKTDVITMDPKDNCSKDANDTLLLQLTNTSAYYMYLLLLLKSVVYFAIITCCLLRRTAFCCNGEKSRAKRSGSGATNFSLLKQAGDVEENPGPTSMDWIWRILFLVGAATGAHSFEQVQLQQPGAELVKPGASVKMSCKASGYAFSSYWINWMKQKPGQGLEWIGQIYPGDGDTNYNGKFKGRATLTADTSSSTAYMQLSSLTSEDSAVYFCARSITTVVGCAMDYWGQGTSVTVSSTRASTKGPSVFPLAPSSKSTSGGTAALGCLVKDYFPEPVTVSWNSGALTSGVHTFPAVLQSSGLYSLSSVVTVPSSSLGTQTYICNVNHKPSNTKVDKRVEPKSCEVKTDSTDHVKPKETENTKQPSKSCHKPKAIVHTEKVNMMSLTVLGLRMLFAKTVAVNFLLTAKLFFL

SEQ ID NO: 15692 - protein, 768 aa, Artificial Sequence
  Synthetic Polypeptide
MALPVTALLLPLALLLHAARPQVQLVESGGGLVQAGDSVTLSCTASGRTFSSYALAWFRQRPGKEREFVAGLRWGGPTNYADSVKDRFTISGDSAKHTMYLQMNSLKPEDTAVYYCGYNPGGWAVPSQYEYDSWGQGTQVTVSSGTGGGGSGGGGSGGGGSEFDIQMTQSPSSLSASVGDRVTITCKASDHINNWLAWYQQKPGQAPKLLIYGATTLETGVPSRFSGSGSGTDYTLTISSLQPEDFATYYCQQSWNTPWTFGQGTKLEIKRLEGQPKANPTVTLFPPSSEELQANKATLVCLISDFYPGAVTVAWKADGSPVKAGVETTKPSKQSNNKYAASSYLSLTPEQWKSHRSYSCQVTHEGSTVEKTVAPTECSGRADCGITSASYHQGVLSATILYEILLGKATLYAVLVSALVLMAMVKRKDSRGRAKRSGSGATNFSLLKQAGDVEENPGPTSMDWIWRILFLVGAATGAHSFEQVQLQQPGAELVKPGASVKMSCKASGYAFSSYWINWMKQKPGQGLEWIGQIYPGDGDTNYNGKFKGRATLTADTSSSTAYMQLSSLTSEDSAVYFCARSITTVVGCAMDYWGQGTSVTVSSTRASTKGPSVFPLAPSSKSTSGGTAALGCLVKDYFPEPVTVSWNSGALTSGVHTFPAVLQSSGLYSLSSVVTVPSSSLGTQTYICNVNHKPSNTKVDKRVEPKSCIPEDTFFPSSDVPCDVKLVEKSFETDTNLNFQNLSVIGFRILLLKVAGFNLLMTLRLWSS

SEQ ID NO: 15693 - protein, 768 aa, Artificial Sequence
  Synthetic Polypeptide
MALPVTALLLPLALLLHAARPQVQLVESGGGLVQAGDSVTLSCTASGRTFSSYALAWFRQRPGKEREFVAGLRWGGPTNYADSVKDRFTISGDSAKHTMYLQMNSLKPEDTAVYYCGYNPGGWAVPSQYEYDSWGQGTQVTVSSGTGGGGSGGGGSGGGGSEFDIQMTQSPSSLSASVGDRVTITCKASDHINNWLAWYQQKPGQAPKLLIYGATTLETGVPSRFSGSGSGTDYTLTISSLQPEDFATYYCQQSWNTPWTFGQGTKLEIKRLEGQPKANPTVTLFPPSSEELQANKATLVCLISDFYPGAVTVAWKADGSPVKAGVETTKPSKQSNNKYAASSYLSLTPEQWKSHRSYSCQVTHEGSTVEKTVAPTECSGRADCGFTSESYQQGVLSATILYEILLGKATLYAVLVSALVLMAMVKRKDSRGRAKRSGSGATNFSLLKQAGDVEENPGPTSMDWIWRILFLVGAATGAHSFEQVQLQQPGAELVKPGASVKMSCKASGYAFSSYWINWMKQKPGQGLEWIGQIYPGDGDTNYNGKFKGRATLTADTSSSTAYMQLSSLTSEDSAVYFCARSITTVVGCAMDYWGQGTSVTVSSTRASTKGPSVFPLAPSSKSTSGGTAALGCLVKDYFPEPVTVSWNSGALTSGVHTFPAVLQSSGLYSLSSVVTVPSSSLGTQTYICNVNHKPSNTKVDKRVEPKSCIPEDTFFPSPESSCDVKLVEKSFETDTNLNFQNLSVIGFRILLLKVAGFNLLMTLRLWSS

SEQ ID NO: 15694 - protein, 594 aa, Artificial Sequence
  Synthetic Polypeptide
MALPVTALLLPLALLLHAARPQVQLVESGGGLVQAGDSVTLSCTASGRTFSSYALAWFRQRPGKEREFVAGLRWGGPTNYADSVKDRFTISGDSAKHTMYLQMNSLKPEDTAVYYCGYNPGGWAVPSQYEYDSWGQGTQVTVSSGTGGGGSGGGGSGGGGSEFDIQMTQSPSSLSASVGDRVTITCKASDHINNWLAWYQQKPGQAPKLLIYGATTLETGVPSRFSGSGSGTDYTLTISSLQPEDFATYYCQQSWNTPWTFGQGTKLEIKRGGGGSGGGGSGGGGSQVQLQQPGAELVKPGASVKMSCKASGYAFSSYWINWMKQKPGQGLEWIGQIYPGDGDTNYNGKFKGRATLTADTSSSTAYMQLSSLTSEDSAVYFCARSITTVVGCAMDYWGQGTSVTVSSTRDGNEEMGGITQTPYKVSISGTTVILTCPQYPGSEILWQHNDKNIGGDEDDKNIGSDEDHLSLKEFSELEQSGYYVCYPRGSKPEDANFYLYLRARVCENCMEMDVMSVATIVIVDICITGGLLLLVYYWSKNRKAKAKPVTRGAGAGGRQRGQNKERPPPVPNPDYEPIRKGQRDLYSGLNQRRI

SEQ ID NO: 15695 - protein, 559 aa, Artificial Sequence
  Synthetic Polypeptide
MALPVTALLLPLALLLHAARPQVQLVESGGGLVQAGDSVTLSCTASGRTFSSYALAWFRQRPGKEREFVAGLRWGGPTNYADSVKDRFTISGDSAKHTMYLQMNSLKPEDTAVYYCGYNPGGWAVPSQYEYDSWGQGTQVTVSSGTGGGGSGGGGSGGGGSEFDIQMTQSPSSLSASVGDRVTITCKASDHINNWLAWYQQKPGQAPKLLIYGATTLETGVPSRFSGSGSGTDYTLTISSLQPEDFATYYCQQSWNTPWTFGQGTKLEIKRGGGGSGGGGSGGGGSQVQLQQPGAELVKPGASVKMSCKASGYAFSSYWINWMKQKPGQGLEWIGQIYPGDGDTNYNGKFKGRATLTADTSSSTAYMQLSSLTSEDSAVYFCARSITTVVGCAMDYWGQGTSVTVSSTRFKIPIEELEDRVFVNCNTSITWVEGTVGTLLSDITRLDLGKRILDPRGIYRCNGTDIYKDKESTVQVHYRMCQSCVELDPATVAGIIVTDVIATLLLALGVFCFAGHETGRLSGAADTQALLRNDQVYQPLRDRDDAQYSHLGGNWARNK

SEQ ID NO: 15696 - protein, 569 aa, Artificial Sequence
  Synthetic Polypeptide
MALPVTALLLPLALLLHAARPQVQLVESGGGLVQAGDSVTLSCTASGRTFSSYALAWFRQRPGKEREFVAGLRWGGPTNYADSVKDRFTISGDSAKHTMYLQMNSLKPEDTAVYYCGYNPGGWAVPSQYEYDSWGQGTQVTVSSGTGGGGSGGGGSGGGGSEFDIQMTQSPSSLSASVGDRVTITCKASDHINNWLAWYQQKPGQAPKLLIYGATTLETGVPSRFSGSGSGTDYTLTISSLQPEDFATYYCQQSWNTPWTFGQGTKLEIKRGGGGSGGGGSGGGGSQVQLQQPGAELVKPGASVKMSCKASGYAFSSYWINWMKQKPGQGLEWIGQIYPGDGDTNYNGKFKGRATLTADTSSSTAYMQLSSLTSEDSAVYFCARSITTVVGCAMDYWGQGTSVTVSSTRQSIKGNHLVKVYDYQEDGSVLLTCDAEAKNITWFKDGKMIGFLTEDKKKWNLGSNAKDPRGMYQCKGSQNKSKPLQVYYRMCQNCIELNAATISGFLFAEIVSIFVLAVGVYFIAGQDGVRQSRASDKQTLLPNDQLYQPLKDREDDQYSHLQGNQLRRN

SEQ ID NO: 15697 - protein, 552 aa, Artificial Sequence
  Synthetic Polypeptide
MALPVTALLLPLALLLHAARPQVQLVESGGGLVQAGDSVTLSCTASGRTFSSYALAWFRQRPGKEREFVAGLRWGGPTNYADSVKDRFTISGDSAKHTMYLQMNSLKPEDTAVYYCGYNPGGWAVPSQYEYDSWGQGTQVTVSSGTGGGGSGGGGSGGGGSEFDIQMTQSPSSLSASVGDRVTITCKASDHINNWLAWYQQKPGQAPKLLIYGATTLETGVPSRFSGSGSGTDYTLTISSLQPEDFATYYCQQSWNTPWTFGQGTKLEIKRGGGGSGGGGSGGGGSQVQLQQPGAELVKPGASVKMSCKASGYAFSSYWINWMKQKPGQGLEWIGQIYPGDGDTNYNGKFKGRATLTADTSSSTAYMQLSSLTSEDSAVYFCARSITTVVGCAMDYWGQGTSVTVSSTRQSFGLLDPKLCYLLDGILFIYGVILTALFLRVKFSRSADAPAYQQGQNQLYNELNLGRREEYDVLDKRRGRDPEMGGKPQRRKNPQEGLYNELQKDKMAEAYSEIGMKGERRRGKGHDGLYQGLSTATKDTYDALHMQALPPR

SEQ ID NO: 15698 - protein, 785 aa, Artificial Sequence
  Synthetic Polypeptide
MALPVTALLLPLALLLHAARPQVQLVESGGGLVQAGDSVTLSCTASGRTFSSYALAWFRQRPGKEREFVAGLRWGGPTNYADSVKDRFTISGDSAKHTMYLQMNSLKPEDTAVYYCGYNPGGWAVPSQYEYDSWGQGTQVTVSSGTGGGGSGGGGSGGGGSEFDIQMTQSPSSLSASVGDRVTITCKASDHINNWLAWYQQKPGQAPKLLIYGATTLETGVPSRFSGSGSGTDYTLTISSLQPEDFATYYCQQSWNTPWTFGQGTKLEIKRGGGGSGGGGSGGGGSQVQLQQPGAELVKPGASVKMSCKASGYAFSSYWINWMKQKPGQGLEWIGQIYPGDGDTNYNGKFKGRATLTADTSSSTAYMQLSSLTSEDSAVYFCARSITTVVGCAMDYWGQGTSVTVSSTRGSGIQNPDPAVYQLRDSKSSDKSVCLFTDFDSQTNVSQSKDSDVYITDKTVLDMRSMDFKSNSAVAWSNKSDFACANAFNNSIIPEDTFFPSPESSCDVKLVEKSFETDTNLNFQNLSVIGFRILLLKVAGFNLLMTLRLWSSRAKRSGSGVKQTLNFDLLKLAGDVESNPGPSRGHMTEYKPTVRLATRDDVPRAVRTLAAAFADYPATRHTVDPDRHIERVTELQELFLTRVGLDIGKVWVADDGAAVAVWTTPESVEAGAVFAEIGPRMAELSGSRLAAQQQMEGLLAPHRPKEPAWFLATVGVSPDHQGKGLGSAVVLPGVEAAERAGVPAFLETSAPRNLPFYERLGFTVTADVEVPEGPRTWCMTRKPGA

SEQ ID NO: 15699 - protein, 817 aa, Artificial Sequence
  Synthetic Polypeptide
MALPVTALLLPLALLLHAARPQVQLVESGGGLVQAGDSVTLSCTASGRTFSSYALAWFRQRPGKEREFVAGLRWGGPTNYADSVKDRFTISGDSAKHTMYLQMNSLKPEDTAVYYCGYNPGGWAVPSQYEYDSWGQGTQVTVSSGTGGGGSGGGGSGGGGSEFDIQMTQSPSSLSASVGDRVTITCKASDHINNWLAWYQQKPGQAPKLLIYGATTLETGVPSRFSGSGSGTDYTLTISSLQPEDFATYYCQQSWNTPWTFGQGTKLEIKRGGGGSGGGGSGGGGSQVQLQQPGAELVKPGASVKMSCKASGYAFSSYWINWMKQKPGQGLEWIGQIYPGDGDTNYNGKFKGRATLTADTSSSTAYMQLSSLTSEDSAVYFCARSITTVVGCAMDYWGQGTSVTVSSLEDLKNVFPPEVAVFEPSEAEISHTQKATLVCLATGFYPDHVELSWWVNGKEVHSGVSTDPQPLKEQPALNDSRYCLSSRLRVSATFWQNPRNHFRCQVQFYGLSENDEWTQDRAKPVTQIVSAEAWGRADCGFTSESYQQGVLSATILYEILLGKATLYAVLVSALVLMAMVKRKDSRGRAKRSGSGATNFSLLKQAGDVEENPGPTRGHMTEYKPTVRLATRDDVPRAVRTLAAAFADYPATRHTVDPDRHIERVTELQELFLTRVGLDIGKVWVADDGAAVAVWTTPESVEAGAVFAEIGPRMAELSGSRLAAQQQMEGLLAPHRPKEPAWFLATVGVSPDHQGKGLGSAVVLPGVEAAERAGVPAFLETSAPRNLPFYERLGFTVTADVEVPEGPRTWCMTRKPGA

SEQ ID NO: 15700 - protein, 867 aa, Artificial Sequence
  Synthetic Polypeptide
MALPVTALLLPLALLLHAARPQVQLVESGGGLVQAGDSVTLSCTASGRTFSSYALAWFRQRPGKEREFVAGLRWGGPTNYADSVKDRFTISGDSAKHTMYLQMNSLKPEDTAVYYCGYNPGGWAVPSQYEYDSWGQGTQVTVSSGTGGGGSGGGGSGGGGSEFDIQMTQSPSSLSASVGDRVTITCKASDHINNWLAWYQQKPGQAPKLLIYGATTLETGVPSRFSGSGSGTDYTLTISSLQPEDFATYYCQQSWNTPWTFGQGTKLEIKRGGGGSGGGGSGGGGSQVQLQQPGAELVKPGASVKMSCKASGYAFSSYWINWMKQKPGQGLEWIGQIYPGDGDTNYNGKFKGRATLTADTSSSTAYMQLSSLTSEDSAVYFCARSITTVVGCAMDYWGQGTSVTVSSTREQKLISEEDLGSGTPFPSLAPPIMLLVDGKQQMVVVCLVLDVAPPGLDSPIWFSAGNGSALDAFTYGPSPATDGTWTNLAHLSLPSEELASWEPLVCHTGPGAEGHSRSTQPMHLSGEASTARTCPQEPLRGTPGGALWLGVLRLLLFKLLLFDLLLTCSCLCDPAGPLPSPATTTRLRALGSHRLHPATETGGREATSSPRPQPRDRRWGDTPPGRKPGSPVRAKRSGSGVKQTLNFDLLKLAGDVESNPGPSRSRGHMTEYKPTVRLATRDDVPRAVRTLAAAFADYPATRHTVDPDRHIERVTELQELFLTRVGLDIGKVWVADDGAAVAVWTTPESVEAGAVFAEIGPRMAELSGSRLAAQQQMEGLLAPHRPKEPAWFLATVGVSPDHQGKGLGSAVVLPGVEAAERAGVPAFLETSAPRNLPFYERLGFTVTADVEVPEGPRTWCMTRKPGA

SEQ ID NO: 15701 - protein, 681 aa, Artificial Sequence
  Synthetic Polypeptide
MALPVTALLLPLALLLHAARPQVQLVESGGGLVQAGDSVTLSCTASGRTFSSYALAWFRQRPGKEREFVAGLRWGGPTNYADSVKDRFTISGDSAKHTMYLQMNSLKPEDTAVYYCGYNPGGWAVPSQYEYDSWGQGTQVTVSSGTGGGGSGGGGSGGGGSEFDIQMTQSPSSLSASVGDRVTITCKASDHINNWLAWYQQKPGQAPKLLIYGATTLETGVPSRFSGSGSGTDYTLTISSLQPEDFATYYCQQSWNTPWTFGQGTKLEIKRLEDLKNVFPPEVAVFEPSEAEISHTQKATLVCLATGFYPDHVELSWWVNGKEVHSGVSTDPQPLKEQPALNDSRYCLSSRLRVSATFWQNPRNHFRCQVQFYGLSENDEWTQDRAKPVTQIVSAEAWGRADCGFTSESYQQGVLSATILYEILLGKATLYAVLVSALVLMAMVKRKDSRGRAKRSGSGATNFSLLKQAGDVEENPGPTRGHMTEYKPTVRLATRDDVPRAVRTLAAAFADYPATRHTVDPDRHIERVTELQELFLTRVGLDIGKVWVADDGAAVAVWTTPESVEAGAVFAEIGPRMAELSGSRLAAQQQMEGLLAPHRPKEPAWFLATVGVSPDHQGKGLGSAVVLPGVEAAERAGVPAFLETSAPRNLPFYERLGFTVTADVEVPEGPRTWCMTRKPGA

SEQ ID NO: 15702 - protein, 451 aa, Artificial Sequence
  Synthetic Polypeptide
MALPVTALLLPLALLLHAARPQVQLVESGGGLVQAGDSVTLSCTASGRTFSSYALAWFRQRPGKEREFVAGLRWGGPTNYADSVKDRFTISGDSAKHTMYLQMNSLKPEDTAVYYCGYNPGGWAVPSQYEYDSWGQGTQVTVSSGTGGGGSGGGGSGGGGSEFDIQMTQSPSSLSASVGDRVTITCKASDHINNWLAWYQQKPGQAPKLLIYGATTLETGVPSRFSGSGSGTDYTLTISSLQPEDFATYYCQQSWNTPWTFGQGTKLEIKRLEDLKNVFPPEVAVFEPSEAEISHTQKATLVCLATGFYPDHVELSWWVNGKEVHSGVSTDPQPLKEQPALNDSRYCLSSRLRVSATFWQNPRNHFRCQVQFYGLSENDEWTQDRAKPVTQIVSAEAWGRADCGFTSESYQQGVLSATILYEILLGKATLYAVLVSALVLMAMVKRKDSRG

SEQ ID NO: 15703 - protein, 699 aa, Artificial Sequence
  Synthetic Polypeptide
MALPVTALLLPLALLLHAARPQVQLVESGGGLVQAGDSVTLSCTASGRTFSSYALAWFRQRPGKEREFVAGLRWGGPTNYADSVKDRFTISGDSAKHTMYLQMNSLKPEDTAVYYCGYNPGGWAVPSQYEYDSWGQGTQVTVSSGTGGGGSGGGGSGGGGSEFDIQMTQSPSSLSASVGDRVTITCKASDHINNWLAWYQQKPGQAPKLLIYGATTLETGVPSRFSGSGSGTDYTLTISSLQPEDFATYYCQQSWNTPWTFGQGTKLEIKRLEGKPIPNPLLGLDSTGSGEDLKNVFPPEVAVFEPSEAEISHTQKATLVCLATGFYPDHVELSWWVNGKEVHSGVCTDPQPLKEQPALNDSRYCLSSRLRVSATFWQNPRNHFRCQVQFYGLSENDEWTQDRAKPVTQIVSAEAWGRADCGFTSESYQQGVLSATILYEILLGKATLYAVLVSALVLMAMVKRKDSRGRAKRSGSGATNFSLLKQAGDVEENPGPTRGHMTEYKPTVRLATRDDVPRAVRTLAAAFADYPATRHTVDPDRHIERVTELQELFLTRVGLDIGKVWVADDGAAVAVWTTPESVEAGAVFAEIGPRMAELSGSRLAAQQQMEGLLAPHRPKEPAWFLATVGVSPDHQGKGLGSAVVLPGVEAAERAGVPAFLETSAPRNLPFYERLGFTVTADVEVPEGPRTWCMTRKPGA

SEQ ID NO: 15704 - protein, 469 aa, Artificial Sequence
  Synthetic Polypeptide
MALPVTALLLPLALLLHAARPQVQLVESGGGLVQAGDSVTLSCTASGRTFSSYALAWFRQRPGKEREFVAGLRWGGPTNYADSVKDRFTISGDSAKHTMYLQMNSLKPEDTAVYYCGYNPGGWAVPSQYEYDSWGQGTQVTVSSGTGGGGSGGGGSGGGGSEFDIQMTQSPSSLSASVGDRVTITCKASDHINNWLAWYQQKPGQAPKLLIYGATTLETGVPSRFSGSGSGTDYTLTISSLQPEDFATYYCQQSWNTPWTFGQGTKLEIKRLEGKPIPNPLLGLDSTGSGEDLKNVFPPEVAVFEPSEAEISHTQKATLVCLATGFYPDHVELSWWVNGKEVHSGVCTDPQPLKEQPALNDSRYCLSSRLRVSATFWQNPRNHFRCQVQFYGLSENDEWTQDRAKPVTQIVSAEAWGRADCGFTSESYQQGVLSATILYEILLGKATLYAVLVSALVLMAMVKRKDSRG

SEQ ID NO: 15705 - protein, 785 aa, Artificial Sequence
  Synthetic Polypeptide
MALPVTALLLPLALLLHAARPQVQLVESGGGLVQAGDSVTLSCTASGRTFSSYALAWFRQRPGKEREFVAGLRWGGPTNYADSVKDRFTISGDSAKHTMYLQMNSLKPEDTAVYYCGYNPGGWAVPSQYEYDSWGQGTQVTVSSGTGGGGSGGGGSGGGGSEFDIQMTQSPSSLSASVGDRVTITCKASDHINNWLAWYQQKPGQAPKLLIYGATTLETGVPSRFSGSGSGTDYTLTISSLQPEDFATYYCQQSWNTPWTFGQGTKLEIKRGGGGSGGGGSGGGGSQVQLQQPGAELVKPGASVKMSCKASGYAFSSYWINWMKQKPGQGLEWIGQIYPGDGDTNYNGKFKGRATLTADTSSSTAYMQLSSLTSEDSAVYFCARSITTVVGCAMDYWGQGTSVTVSSTRGSGIQNPDPAVYQLRDSKSSDKSVCLFTDFDSQTNVSQSKDSDVYITDKTVLDMRSMDFKSNSAVAWSNKSDFACANAFNNSIIPEDTFFPSSDVPCDVKLVEKSFETDTNLNFQNLSVIGFRILLLKVAGFNLLMTLRLWSSRAKRSGSGVKQTLNFDLLKLAGDVESNPGPSRGHMTEYKPTVRLATRDDVPRAVRTLAAAFADYPATRHTVDPDRHIERVTELQELFLTRVGLDIGKVWVADDGAAVAVWTTPESVEAGAVFAEIGPRMAELSGSRLAAQQQMEGLLAPHRPKEPAWFLATVGVSPDHQGKGLGSAVVLPGVEAAERAGVPAFLETSAPRNLPFYERLGFTVTADVEVPEGPRTWCMTRKPGA

SEQ ID NO: 15706 - protein, 817 aa, Artificial Sequence
  Synthetic Polypeptide
MALPVTALLLPLALLLHAARPQVQLVESGGGLVQAGDSVTLSCTASGRTFSSYALAWFRQRPGKEREFVAGLRWGGPTNYADSVKDRFTISGDSAKHTMYLQMNSLKPEDTAVYYCGYNPGGWAVPSQYEYDSWGQGTQVTVSSGTGGGGSGGGGSGGGGSEFDIQMTQSPSSLSASVGDRVTITCKASDHINNWLAWYQQKPGQAPKLLIYGATTLETGVPSRFSGSGSGTDYTLTISSLQPEDFATYYCQQSWNTPWTFGQGTKLEIKRGGGGSGGGGSGGGGSQVQLQQPGAELVKPGASVKMSCKASGYAFSSYWINWMKQKPGQGLEWIGQIYPGDGDTNYNGKFKGRATLTADTSSSTAYMQLSSLTSEDSAVYFCARSITTVVGCAMDYWGQGTSVTVSSLEDLKNVFPPEVAVFEPSKAEIAHTQKATLVCLATGFYPDHVELSWWVNGKEVHSGVSTDPQPLKEQPALNDSRYCLSSRLRVSATFWQNPRNHFRCQVQFYGLSENDEWTQDRAKPVTQIVSAEAWGRADCGITSASYHQGVLSATILYEILLGKATLYAVLVSALVLMAMVKRKDSRGRAKRSGSGATNFSLLKQAGDVEENPGPTRGHMTEYKPTVRLATRDDVPRAVRTLAAAFADYPATRHTVDPDRHIERVTELQELFLTRVGLDIGKVWVADDGAAVAVWTTPESVEAGAVFAEIGPRMAELSGSRLAAQQQMEGLLAPHRPKEPAWFLATVGVSPDHQGKGLGSAVVLPGVEAAERAGVPAFLETSAPRNLPFYERLGFTVTADVEVPEGPRTWCMTRKPGA

SEQ ID NO: 15707 - protein, 640 aa, Artificial Sequence; identical to SEQ ID NO: 14777
  Synthetic Polypeptide

SEQ ID NO: 15708 - protein, 993 aa, Artificial Sequence; identical to SEQ ID NO: 14778
  Synthetic Polypeptide

SEQ ID NO: 15709 - protein, 992 aa, Artificial Sequence; identical to SEQ ID NO: 14779
  Synthetic Polypeptide

SEQ ID NO: 15710 - protein, 992 aa, Artificial Sequence; identical to SEQ ID NO: 14780
  Synthetic Polypeptide

SEQ ID NO: 15711 - protein, 759 aa, Artificial Sequence; identical to SEQ ID NO: 14781
  Synthetic Polypeptide

SEQ ID NO: 15712 - protein, 984 aa, Artificial Sequence; identical to SEQ ID NO: 14782
  Synthetic Polypeptide

SEQ ID NO: 15713 - protein, 763 aa, Artificial Sequence; identical to SEQ ID NO: 14783
  Synthetic Polypeptide

SEQ ID NO: 15714 - protein, 985 aa, Artificial Sequence; identical to SEQ ID NO: 14784
  Synthetic Polypeptide

SEQ ID NO: 15715 - protein, 992 aa, Artificial Sequence; identical to SEQ ID NO: 14785
  Synthetic Polypeptide

SEQ ID NO: 15716 - protein, 1074 aa, Artificial Sequence; identical to SEQ ID NO: 14786
  Synthetic Polypeptide

SEQ ID NO: 15717 - protein, 1029 aa, Artificial Sequence; identical to SEQ ID NO: 14787
  Synthetic Polypeptide

SEQ ID NO: 15718 - protein, 767 aa, Artificial Sequence; identical to SEQ ID NO: 14788
  Synthetic Polypeptide

SEQ ID NO: 15719 - protein, 1169 aa, Artificial Sequence; identical to SEQ ID NO: 14789
  Synthetic Polypeptide

SEQ ID NO: 15720 - protein, 955 aa, Artificial Sequence; identical to SEQ ID NO: 14790
  Synthetic Polypeptide

SEQ ID NO: 15721 - protein, 955 aa, Artificial Sequence; identical to SEQ ID NO: 14791
  Synthetic Polypeptide

SEQ ID NO: 15722 - protein, 1026 aa, Artificial Sequence; identical to SEQ ID NO: 14792
  Synthetic Polypeptide

SEQ ID NO: 15723 - protein, 1067 aa, Artificial Sequence; identical to SEQ ID NO: 14793
  Synthetic Polypeptide

SEQ ID NO: 15724 - protein, 1028 aa, Artificial Sequence; identical to SEQ ID NO: 14794
  Synthetic Polypeptide

SEQ ID NO: 15725 - protein, 1070 aa, Artificial Sequence; identical to SEQ ID NO: 14795
  Synthetic Polypeptide

SEQ ID NO: 15726 - protein, 960 aa, Artificial Sequence; identical to SEQ ID NO: 14796
  Synthetic Polypeptide

SEQ ID NO: 15727 - protein, 785 aa, Artificial Sequence; identical to SEQ ID NO: 14797
  Synthetic Polypeptide

SEQ ID NO: 15728 - protein, 763 aa, Artificial Sequence; identical to SEQ ID NO: 14798
  Synthetic Polypeptide

SEQ ID NO: 15729 - protein, 763 aa, Artificial Sequence; identical to SEQ ID NO: 14799
  Synthetic Polypeptide

SEQ ID NO: 15730 - protein, 593 aa, Artificial Sequence; identical to SEQ ID NO: 14800
  Synthetic Polypeptide

SEQ ID NO: 15731 - protein, 558 aa, Artificial Sequence; identical to SEQ ID NO: 14801
  Synthetic Polypeptide

SEQ ID NO: 15732 - protein, 568 aa, Artificial Sequence; identical to SEQ ID NO: 14802
  Synthetic Polypeptide

SEQ ID NO: 15733 - protein, 551 aa, Artificial Sequence; identical to SEQ ID NO: 14803
  Synthetic Polypeptide

SEQ ID NO: 15734 - protein, 587 aa, Artificial Sequence; identical to SEQ ID NO: 14804
  Synthetic Polypeptide

SEQ ID NO: 15735 - protein, 421 aa, Artificial Sequence; identical to SEQ ID NO: 14805
  Synthetic Polypeptide

SEQ ID NO: 15736 - protein, 599 aa, Artificial Sequence; identical to SEQ ID NO: 14806
  Synthetic Polypeptide

SEQ ID NO: 15737 - protein, 433 aa, Artificial Sequence; identical to SEQ ID NO: 14807
  Synthetic Polypeptide

SEQ ID NO: 15738 - protein, 1135 aa, Artificial Sequence
  Synthetic Polypeptide
MALPVTALLLPLALLLHAARPQVQLVESGGGLVQAGDSVTLSCTASGRTFSSYALAWFRQRPGKEREFVAGLRWGGPTNYADSVKDRFTISGDSAKHTMYLQMNSLKPEDTAVYYCGYNPGGWAVPSQYEYDSWGQGTQVTVSSGTGGGGSGGGGSGGGGSEFDIQMTQSPSSLSASVGDRVTITCKASDHINNWLAWYQQKPGQAPKLLIYGATTLETGVPSRFSGSGSGTDYTLTISSLQPEDFATYYCQQSWNTPWTFGQGTKLEIKRLEIQNPDPAVYQLRDSKSSDKSVCLFTDFDSQTNVSQSKDSDVYITDKCVLDMRSMDFKSNSAVAWSNKSDFACANAFNNSIIPEDTFFPSSDVPCDVKLVEKSFETDTNLNFQNLSVIGFRILLLKVAGFNLLMTLRLWSSRAKRSGSGVKQTLNFDLLKLAGDVESNPGPTSMDWIWRILFLVGAATGAHSGPQVQLQESGGGLAQAGGSLRLSCAASGRTFSMGWFRQAPGKEREFVAAITYSGGSPYYASSVRGRFTISRDNAKNTVYLQMNSLKPEDTAVYYCAANPTYGSDWNAENWGQGTQVTVSSGSGGGGSGGGGSGGGGSFEQVQLQQPGAELVKPGASVKMSCKASGYAFSSYWINWMKQKPGQGLEWIGQIYPGDGDTNYNGKFKGRATLTADTSSSTAYMQLSSLTSEDSAVYFCARSITTVVGCAMDYWGQGTSVTVSSTREDLKNVFPPEVAVFEPSKAEIAHTQKATLVCLATGFYPDHVELSWWVNGKEVHSGVCTDPQPLKEQPALNDSRYCLSSRLRVSATFWQNPRNHFRCQVQFYGLSENDEWTQDRAKPVTQIVSAEAWGRADCGITSASYHQGVLSATILYEILLGKATLYAVLVSALVLMAMVKRKDSRGRAKRSGSGATNFSLLKQAGDVEENPGPSRGHMTEYKPTVRLATRDDVPRAVRTLAAAFADYPATRHTVDPDRHIERVTELQELFLTRVGLDIGKVWVADDGAAVAVWTTPESVEAGAVFAEIGPRMAELSGSRLAAQQQMEGLLAPHRPKEPAWFLATVGVSPDHQGKGLGSAVVLPGVEAAERAGVPAFLETSAPRNLPFYERLGFTVTADVEVPEGPRTWCMTRKPGA

SEQ ID NO: 15739 - protein, 1134 aa, Artificial Sequence
  Synthetic Polypeptide
MALPVTALLLPLALLLHAARPQVQLVESGGGLVQAGDSVTLSCTASGRTFSSYALAWFRQRPGKEREFVAGLRWGGPTNYADSVKDRFTISGDSAKHTMYLQMNSLKPEDTAVYYCGYNPGGWAVPSQYEYDSWGQGTQVTVSSGTGGGGSGGGGSGGGGSEFDIQMTQSPSSLSASVGDRVTITCKASDHINNWLAWYQQKPGQAPKLLIYGATTLETGVPSRFSGSGSGTDYTLTISSLQPEDFATYYCQQSWNTPWTFGQGTKLEIKRLEDLKNVFPPEVAVFEPSKAEIAHTQKATLVCLATGFYPDHVELSWWVNGKEVHSGVCTDPQPLKEQPALNDSRYCLSSRLRVSATFWQNPRNHFRCQVQFYGLSENDEWTQDRAKPVTQIVSAEAWGRADCGITSASYHQGVLSATILYEILLGKATLYAVLVSALVLMAMVKRKDSRGRAKRSGSGATNFSLLKQAGDVEENPGPTSMDWIWRILFLVGAATGAHSGPQVQLQESGGGLAQAGGSLRLSCAASGRTFSMGWFRQAPGKEREFVAAITYSGGSPYYASSVRGRFTISRDNAKNTVYLQMNSLKPEDTAVYYCAANPTYGSDWNAENWGQGTQVTVSSGSGGGGSGGGGSGGGGSFEQVQLQQPGAELVKPGASVKMSCKASGYAFSSYWINWMKQKPGQGLEWIGQIYPGDGDTNYNGKFKGRATLTADTSSSTAYMQLSSLTSEDSAVYFCARSITTVVGCAMDYWGQGTSVTVSSTRIQNPDPAVYQLRDSKSSDKSVCLFTDFDSQTNVSQSKDSDVYITDKCVLDMRSMDFKSNSAVAWSNKSDFACANAFNNSIIPEDTFFPSSDVPCDVKLVEKSFETDTNLNFQNLSVIGFRILLLKVAGFNLLMTLRLWSSRAKRSGSGVKQTLNFDLLKLAGDVESNPGPSRGHMTEYKPTVRLATRDDVPRAVRTLAAAFADYPATRHTVDPDRHIERVTELQELFLTRVGLDIGKVWVADDGAAVAVWTTPESVEAGAVFAEIGPRMAELSGSRLAAQQQMEGLLAPHRPKEPAWFLATVGVSPDHQGKGLGSAVVLPGVEAAERAGVPAFLETSAPRNLPFYERLGFTVTADVEVPEGPRTWCMTRKPGA

SEQ ID NO: 15740 - protein, 1134 aa, Artificial Sequence
  Synthetic Polypeptide
MALPVTALLLPLALLLHAARPQVQLVESGGGLVQAGDSVTLSCTASGRTFSSYALAWFRQRPGKEREFVAGLRWGGPTNYADSVKDRFTISGDSAKHTMYLQMNSLKPEDTAVYYCGYNPGGWAVPSQYEYDSWGQGTQVTVSSGTGGGGSGGGGSGGGGSEFDIQMTQSPSSLSASVGDRVTITCKASDHINNWLAWYQQKPGQAPKLLIYGATTLETGVPSRFSGSGSGTDYTLTISSLQPEDFATYYCQQSWNTPWTFGQGTKLEIKRLEDLKNVFPPEVAVFEPSEAEISHTQKATLVCLATGFYPDHVELSWWVNGKEVHSGVCTDPQPLKEQPALNDSRYCLSSRLRVSATFWQNPRNHFRCQVQFYGLSENDEWTQDRAKPVTQIVSAEAWGRADCGFTSESYQQGVLSATILYEILLGKATLYAVLVSALVLMAMVKRKDSRGRAKRSGSGATNFSLLKQAGDVEENPGPTSMDWIWRILFLVGAATGAHSGPQVQLQESGGGLAQAGGSLRLSCAASGRTFSMGWFRQAPGKEREFVAAITYSGGSPYYASSVRGRFTISRDNAKNTVYLQMNSLKPEDTAVYYCAANPTYGSDWNAENWGQGTQVTVSSGSGGGGSGGGGSGGGGSFEQVQLQQPGAELVKPGASVKMSCKASGYAFSSYWINWMKQKPGQGLEWIGQIYPGDGDTNYNGKFKGRATLTADTSSSTAYMQLSSLTSEDSAVYFCARSITTVVGCAMDYWGQGTSVTVSSTRIQNPDPAVYQLRDSKSSDKSVCLFTDFDSQTNVSQSKDSDVYITDKCVLDMRSMDFKSNSAVAWSNKSDFACANAFNNSIIPEDTFFPSPESSCDVKLVEKSFETDTNLNFQNLSVIGFRILLLKVAGFNLLMTLRLWSSRAKRSGSGVKQTLNFDLLKLAGDVESNPGPSRGHMTEYKPTVRLATRDDVPRAVRTLAAAFADYPATRHTVDPDRHIERVTELQELFLTRVGLDIGKVWVADDGAAVAVWTTPESVEAGAVFAEIGPRMAELSGSRLAAQQQMEGLLAPHRPKEPAWFLATVGVSPDHQGKGLGSAVVLPGVEAAERAGVPAFLETSAPRNLPFYERLGFTVTADVEVPEGPRTWCMTRKPGA

SEQ ID NO: 15741 - protein, 901 aa, Artificial Sequence
  Synthetic Polypeptide
MALPVTALLLPLALLLHAARPQVQLVESGGGLVQAGDSVTLSCTASGRTFSSYALAWFRQRPGKEREFVAGLRWGGPTNYADSVKDRFTISGDSAKHTMYLQMNSLKPEDTAVYYCGYNPGGWAVPSQYEYDSWGQGTQVTVSSGTGGGGSGGGGSGGGGSEFDIQMTQSPSSLSASVGDRVTITCKASDHINNWLAWYQQKPGQAPKLLIYGATTLETGVPSRFSGSGSGTDYTLTISSLQPEDFATYYCQQSWNTPWTFGQGTKLEIKRLEDLKNVFPPEVAVFEPSEAEISHTQKATLVCLATGFYPDHVELSWWVNGKEVHSGVCTDPQPLKEQPALNDSRYCLSSRLRVSATFWQNPRNHFRCQVQFYGLSENDEWTQDRAKPVTQIVSAEAWGRADCGFTSESYQQGVLSATILYEILLGKATLYAVLVSALVLMAMVKRKDSRGRAKRSGSGATNFSLLKQAGDVEENPGPTSMDWIWRILFLVGAATGAHSGPQVQLQESGGGLAQAGGSLRLSCAASGRTFSMGWFRQAPGKEREFVAAITYSGGSPYYASSVRGRFTISRDNAKNTVYLQMNSLKPEDTAVYYCAANPTYGSDWNAENWGQGTQVTVSSGSGGGGSGGGGSGGGGSFEQVQLQQPGAELVKPGASVKMSCKASGYAFSSYWINWMKQKPGQGLEWIGQIYPGDGDTNYNGKFKGRATLTADTSSSTAYMQLSSLTSEDSAVYFCARSITTVVGCAMDYWGQGTSVTVSSTRIQNPDPAVYQLRDSKSSDKSVCLFTDFDSQTNVSQSKDSDVYITDKCVLDMRSMDFKSNSAVAWSNKSDFACANAFNNSIIPEDTFFPSPESSCDVKLVEKSFETDTNLNFQNLSVIGFRILLLKVAGFNLLMTLRLWSS

SEQ ID NO: 15742 - protein, 1126 aa, Artificial Sequence
  Synthetic Polypeptide
MALPVTALLLPLALLLHAARPQVQLVESGGGLVQAGDSVTLSCTASGRTFSSYALAWFRQRPGKEREFVAGLRWGGPTNYADSVKDRFTISGDSAKHTMYLQMNSLKPEDTAVYYCGYNPGGWAVPSQYEYDSWGQGTQVTVSSGTGGGGSGGGGSGGGGSEFDIQMTQSPSSLSASVGDRVTITCKASDHINNWLAWYQQKPGQAPKLLIYGATTLETGVPSRFSGSGSGTDYTLTISSLQPEDFATYYCQQSWNTPWTFGQGTKLEIKRLEDLKNVFPPEVAVFEPSEAEISHTQKATLVCLATGFYPDHVELSWWVNGKEVHSGVCTDPQPLKEQPALNDSRYCLSSRLRVSATFWQNPRNHFRCQVQFYGLSENDEWTQDRAKPVTQIVSAEAWGRADCGFTSESYQQGVLSATILYEILLGKATLYAVLVSALVLMAMVKRKDSRGRAKRSGSGATNFSLLKQAGDVEENPGPTSMDWIWRILFLVGAATGAHSGPQVQLQESGGGLAQAGGSLRLSCAASGRTFSMGWFRQAPGKEREFVAAITYSGGSPYYASSVRGRFTISRDNAKNTVYLQMNSLKPEDTAVYYCAANPTYGSDWNAENWGQGTQVTVSSGSGGGGSGGGGSGGGGSFEQVQLQQPGAELVKPGASVKMSCKASGYAFSSYWINWMKQKPGQGLEWIGQIYPGDGDTNYNGKFKGRATLTADTSSSTAYMQLSSLTSEDSAVYFCARSITTVVGCAMDYWGQGTSVTVSSTRIQNPDPAVYQLRDSKSSDKSVCLFTDFDSQTNVSQSKDSDVYITDKCVLDMRSMDFKSNSAVAWSNKSDFACANAFNNSIIPEDTFFPSPESSCDVKLVEKSFETDTNLNFQNLSVIGFRILLLKVAGFNLLMTLRLWSSRAKRSGSGVKQTLNFDLLKLAGDVESNPGPSRGGIHTMATYEVLCEVARKLGTDDREVVLFLLNVFIPQPTLAQLIGALRALKEEGRLTFPLLAECLFRAGRRDLLRDLLHLDPRFLERHLAGTMSYFSPYQLTVLHVDGELCARDIRSLIFLSKDTIGSRSTPQTFLHWVYCMENLDLLGPTDVDALMSMLRSLSRVDLQRQVQTLMGLHLSGPSHSQHYRHTP

SEQ ID NO: 15743 - protein, 905 aa, Artificial Sequence
  Synthetic Polypeptide
MALPVTALLLPLALLLHAARPQVQLVESGGGLVQAGDSVTLSCTASGRTFSSYALAWFRQRPGKEREFVAGLRWGGPTNYADSVKDRFTISGDSAKHTMYLQMNSLKPEDTAVYYCGYNPGGWAVPSQYEYDSWGQGTQVTVSSGTGGGGSGGGGSGGGGSEFDIQMTQSPSSLSASVGDRVTITCKASDHINNWLAWYQQKPGQAPKLLIYGATTLETGVPSRFSGSGSGTDYTLTISSLQPEDFATYYCQQSWNTPWTFGQGTKLEIKRLEIQNPDPAVYQLRDSKSSDKSVCLFTDFDSQTNVSQSKDSDVYITDKCVLDMRSMDFKSNSAVAWSNKSDFACANAFNNSIIPEDTFFPSPESSCDVKLVEKSFETDTNLNFQNLSVIGFRILLLKVAGFNLLMTLRLWSSRAKRSGSGVKQTLNFDLLKLAGDVESNPGPTSMDWIWRILFLVGAATGAHSGPQVQLQESGGGLAQAGGSLRLSCAASGRTFSMGWFRQAPGKEREFVAAITYSGGSPYYASSVRGRFTISRDNAKNTVYLQMNSLKPEDTAVYYCAANPTYGSDWNAENWGQGTQVTVSSGSGGGGSGGGGSGGGGSFEQVQLQQPGAELVKPGASVKMSCKASGYAFSSYWINWMKQKPGQGLEWIGQIYPGDGDTNYNGKFKGRATLTADTSSSTAYMQLSSLTSEDSAVYFCARSITTVVGCAMDYWGQGTSVTVSSTREDLKNVFPPEVAVFEPSEAEISHTQKATLVCLATGFYPDHVELSWWVNGKEVHSGVCTDPQPLKEQPALNDSRYCLSSRLRVSATFWQNPRNHFRCQVQFYGLSENDEWTQDRAKPVTQIVSAEAWGRADCGFTSESYQQGVLSATILYEILLGKATLYAVLVSALVLMAMVKRKDSRG

SEQ ID NO: 15744 - protein, 1127 aa, Artificial Sequence
  Synthetic Polypeptide
MALPVTALLLPLALLLHAARPQVQLVESGGGLVQAGDSVTLSCTASGRTFSSYALAWFRQRPGKEREFVAGLRWGGPTNYADSVKDRFTISGDSAKHTMYLQMNSLKPEDTAVYYCGYNPGGWAVPSQYEYDSWGQGTQVTVSSGTGGGGSGGGGSGGGGSEFDIQMTQSPSSLSASVGDRVTITCKASDHINNWLAWYQQKPGQAPKLLIYGATTLETGVPSRFSGSGSGTDYTLTISSLQPEDFATYYCQQSWNTPWTFGQGTKLEIKRLEIQNPDPAVYQLRDSKSSDKSVCLFTDFDSQTNVSQSKDSDVYITDKCVLDMRSMDFKSNSAVAWSNKSDFACANAFNNSIIPEDTFFPSPESSCDVKLVEKSFETDTNLNFQNLSVIGFRILLLKVAGFNLLMTLRLWSSRAKRSGSGVKQTLNFDLLKLAGDVESNPGPTSMDWIWRILFLVGAATGAHSGPQVQLQESGGGLAQAGGSLRLSCAASGRTFSMGWFRQAPGKEREFVAAITYSGGSPYYASSVRGRFTISRDNAKNTVYLQMNSLKPEDTAVYYCAANPTYGSDWNAENWGQGTQVTVSSGSGGGGSGGGGSGGGGSFEQVQLQQPGAELVKPGASVKMSCKASGYAFSSYWINWMKQKPGQGLEWIGQIYPGDGDTNYNGKFKGRATLTADTSSSTAYMQLSSLTSEDSAVYFCARSITTVVGCAMDYWGQGTSVTVSSTREDLKNVFPPEVAVFEPSEAEISHTQKATLVCLATGFYPDHVELSWWVNGKEVHSGVCTDPQPLKEQPALNDSRYCLSSRLRVSATFWQNPRNHFRCQVQFYGLSENDEWTQDRAKPVTQIVSAEAWGRADCGFTSESYQQGVLSATILYEILLGKATLYAVLVSALVLMAMVKRKDSRGRAKRSGSGATNFSLLKQAGDVEENPGPSRGGIHTMATYEVLCEVARKLGTDDREVVLFLLNVFIPQPTLAQLIGALRALKEEGRLTFPLLAECLFRAGRRDLLRDLLHLDPRFLERHLAGTMSYFSPYQLTVLHVDGELCARDIRSLIFLSKDTIGSRSTPQTFLHWVYCMENLDLLGPTDVDALMSMLRSLSRVDLQRQVQTLMGLHLSGPSHSQHYRHTP

SEQ ID NO: 15745 - protein, 1134 aa, Artificial Sequence
  Synthetic Polypeptide
MALPVTALLLPLALLLHAARPQVQLVESGGGLVQAGDSVTLSCTASGRTFSSYALAWFRQRPGKEREFVAGLRWGGPTNYADSVKDRFTISGDSAKHTMYLQMNSLKPEDTAVYYCGYNPGGWAVPSQYEYDSWGQGTQVTVSSGTGGGGSGGGGSGGGGSEFDIQMTQSPSSLSASVGDRVTITCKASDHINNWLAWYQQKPGQAPKLLIYGATTLETGVPSRFSGSGSGTDYTLTISSLQPEDFATYYCQQSWNTPWTFGQGTKLEIKRLEDLKNVFPPEVAVFEPSEAEISHTQKATLVCLATGFYPDHVELSWWVNGKEVHSGVSTDPQPLKEQPALNDSRYCLSSRLRVSATFWQNPRNHFRCQVQFYGLSENDEWTQDRAKPVTQIVSAEAWGRADCGFTSESYQQGVLSATILYEILLGKATLYAVLVSALVLMAMVKRKDSRGRAKRSGSGATNFSLLKQAGDVEENPGPTSMDWIWRILFLVGAATGAHSGPQVQLQESGGGLAQAGGSLRLSCAASGRTFSMGWFRQAPGKEREFVAAITYSGGSPYYASSVRGRFTISRDNAKNTVYLQMNSLKPEDTAVYYCAANPTYGSDWNAENWGQGTQVTVSSGSGGGGSGGGGSGGGGSFEQVQLQQPGAELVKPGASVKMSCKASGYAFSSYWINWMKQKPGQGLEWIGQIYPGDGDTNYNGKFKGRATLTADTSSSTAYMQLSSLTSEDSAVYFCARSITTVVGCAMDYWGQGTSVTVSSTRIQNPDPAVYQLRDSKSSDKSVCLFTDFDSQTNVSQSKDSDVYITDKTVLDMRSMDFKSNSAVAWSNKSDFACANAFNNSIIPEDTFFPSPESSCDVKLVEKSFETDTNLNFQNLSVIGFRILLLKVAGFNLLMTLRLWSSRAKRSGSGVKQTLNFDLLKLAGDVESNPGPSRGHMTEYKPTVRLATRDDVPRAVRTLAAAFADYPATRHTVDPDRHIERVTELQELFLTRVGLDIGKVWVADDGAAVAVWTTPESVEAGAVFAEIGPRMAELSGSRLAAQQQMEGLLAPHRPKEPAWFLATVGVSPDHQGKGLGSAVVLPGVEAAERAGVPAFLETSAPRNLPFYERLGFTVTADVEVPEGPRTWCMTRKPGA

SEQ ID NO: 15746 - protein, 1216 aa, Artificial Sequence
  Synthetic Polypeptide
MALPVTALLLPLALLLHAARPQVQLVESGGGLVQAGDSVTLSCTASGRTFSSYALAWFRQRPGKEREFVAGLRWGGPTNYADSVKDRFTISGDSAKHTMYLQMNSLKPEDTAVYYCGYNPGGWAVPSQYEYDSWGQGTQVTVSSGTGGGGSGGGGSGGGGSEFDIQMTQSPSSLSASVGDRVTITCKASDHINNWLAWYQQKPGQAPKLLIYGATTLETGVPSRFSGSGSGTDYTLTISSLQPEDFATYYCQQSWNTPWTFGQGTKLEIKRLEDLKNVFPPEVAVFEPSEAEISHTQKATLVCLATGFYPDHVELSWWVNGKEVHSGVSTDPQPLKEQPALNDSRYCLSSRLRVSATFWQNPRNHFRCQVQFYGLSENDEWTQDRAKPVTQIVSAEAWGRADCGFTSESYQQGVLSATILYEILLGKATLYAVLVSALVLMAMVKRKDSRGRAKRSGSGATNFSLLKQAGDVEENPGPTSMDWIWRILFLVGAATGAHSGPQVQLQESGGGLAQAGGSLRLSCAASGRTFSMGWFRQAPGKEREFVAAITYSGGSPYYASSVRGRFTISRDNAKNTVYLQMNSLKPEDTAVYYCAANPTYGSDWNAENWGQGTQVTVSSGSGGGGSGGGGSGGGGSFEQVQLQQPGAELVKPGASVKMSCKASGYAFSSYWINWMKQKPGQGLEWIGQIYPGDGDTNYNGKFKGRATLTADTSSSTAYMQLSSLTSEDSAVYFCARSITTVVGCAMDYWGQGTSVTVSSTREQKLISEEDGSGTPFPSLAPPIMLLVDGKQQMVVVCLVLDVAPPGLDSPIWFSAGNGSALDAFTYGPSPATDGTWTNLAHLSLPSEELASWEPLVCHTGPGAEGHSRSTQPMHLSGEASTARTCPQEPLRGTPGGALWLGVLRLLLFKLLLFDLLLTCSCLCDPAGPLPSPATTTRLRALGSHRLHPATETGGREATSSPRPQPRDRRWGDTPPGRKPGSPVRAKRSGSGVKQTLNFDLLKLAGDVESNPGPSRGHMTEYKPTVRLATRDDVPRAVRTLAAAFADYPATRHTVDPDRHIERVTELQELFLTRVGLDIGKVWVADDGAAVAVWTTPESVEAGAVFAEIGPRMAELSGSRLAAQQQMEGLLAPHRPKEPAWFLATVGVSPDHQGKGLGSAVVLPGVEAAERAGVPAFLETSAPRNLPFYERLGFTVTADVEVPEGPRTWCMTRKPGA

SEQ ID NO: 15747 - protein, 1171 aa, Artificial Sequence
  Synthetic Polypeptide
MALPVTALLLPLALLLHAARPQVQLVESGGGLVQAGDSVTLSCTASGRTFSSYALAWFRQRPGKEREFVAGLRWGGPTNYADSVKDRFTISGDSAKHTMYLQMNSLKPEDTAVYYCGYNPGGWAVPSQYEYDSWGQGTQVTVSSGTGGGGSGGGGSGGGGSEFDIQMTQSPSSLSASVGDRVTITCKASDHINNWLAWYQQKPGQAPKLLIYGATTLETGVPSRFSGSGSGTDYTLTISSLQPEDFATYYCQQSWNTPWTFGQGTKLEIKRLEGKPIPNPLLGLDSTGSGDKQLDADVSPKPTIFLPSIAETKLQKAGTYLCLLEKFFPDVIKIHWQEKKSNTILGSQEGNTMKTNDTYMKFSWLTVPEKSLDKEHRCIVRHENNKNGVDQEIIFPPIKTDVITMDPKDNCSKDANDTLLLQLTNTSAYYMYLLLLLKSVVYFAIITCCLLRRTAFCCNGEKSRAKRSGSGATNFSLLKQAGDVEENPGPTSMDWIWRILFLVGAATGAHSGPQVQLQESGGGLAQAGGSLRLSCAASGRTFSMGWFRQAPGKEREFVAAITYSGGSPYYASSVRGRFTISRDNAKNTVYLQMNSLKPEDTAVYYCAANPTYGSDWNAENWGQGTQVTVSSGSGGGGSGGGGSGGGGSFEQVQLQQPGAELVKPGASVKMSCKASGYAFSSYWINWMKQKPGQGLEWIGQIYPGDGDTNYNGKFKGRATLTADTSSSTAYMQLSSLTSEDSAVYFCARSITTVVGCAMDYWGQGTSVTVSSTREQKLISEEDGSGSQPHTKPSVFVMKNGTNVACLVKEFYPKDIRINLVSSKKITEFDPAIVISPSGKYNAVKLGKYEDSNSVTCSVQHDNKTVHSTDFEVKTDSTDHVKPKETENTKQPSKSCHKPKAIVHTEKVNMMSLTVLGLRMLFAKTVAVNFLLTAKLFFLRAKRSGSGVKQTLNFDLLKLAGDVESNPGPSRGHMTEYKPTVRLATRDDVPRAVRTLAAAFADYPATRHTVDPDRHIERVTELQELFLTRVGLDIGKVWVADDGAAVAVWTTPESVEAGAVFAEIGPRMAELSGSRLAAQQQMEGLLAPHRPKEPAWFLATVGVSPDHQGKGLGSAVVLPGVEAAERAGVPAFLETSAPRNLPFYERLGFTVTADVEVPEGPRTWCMTRKPGA

SEQ ID NO: 15748 - protein, 909 aa, Artificial Sequence
  Synthetic Polypeptide
MALPVTALLLPLALLLHAARPQVQLVESGGGLVQAGDSVTLSCTASGRTFSSYALAWFRQRPGKEREFVAGLRWGGPTNYADSVKDRFTISGDSAKHTMYLQMNSLKPEDTAVYYCGYNPGGWAVPSQYEYDSWGQGTQVTVSSGTGGGGSGGGGSGGGGSEFDIQMTQSPSSLSASVGDRVTITCKASDHINNWLAWYQQKPGQAPKLLIYGATTLETGVPSRFSGSGSGTDYTLTISSLQPEDFATYYCQQSWNTPWTFGQGTKLEIKRLESQPHTKPSVFVMKNGTNVACLVKEFYPKDIRINLVSSKKITEFDPAIVISPSGKYNAVKLGKYEDSNSVTCSVQHDNKTVHSTDFEVKTDSTDHVKPKETENTKQPSKSCHKPKAIVHTEKVNMMSLTVLGLRMLFAKTVAVNFLLTAKLFFLRAKRSGSGATNFSLLKQAGDVEENPGPTSMDWIWRILFLVGAATGAHSGPQVQLQESGGGLAQAGGSLRLSCAASGRTFSMGWFRQAPGKEREFVAAITYSGGSPYYASSVRGRFTISRDNAKNTVYLQMNSLKPEDTAVYYCAANPTYGSDWNAENWGQGTQVTVSSGSGGGGSGGGGSGGGGSFEQVQLQQPGAELVKPGASVKMSCKASGYAFSSYWINWMKQKPGQGLEWIGQIYPGDGDTNYNGKFKGRATLTADTSSSTAYMQLSSLTSEDSAVYFCARSITTVVGCAMDYWGQGTSVTVSSTRDKQLDADVSPKPTIFLPSIAETKLQKAGTYLCLLEKFFPDVIKIHWQEKKSNTILGSQEGNTMKTNDTYMKFSWLTVPEKSLDKEHRCIVRHENNKNGVDQEIIFPPIKTDVITMDPKDNCSKDANDTLLLQLTNTSAYYMYLLLLLKSVVYFAIITCCLLRRTAFCCNGEKS

SEQ ID NO: 15749 - protein, 1311 aa, Artificial Sequence
  Synthetic Polypeptide
MALPVTALLLPLALLLHAARPQVQLVESGGGLVQAGDSVTLSCTASGRTFSSYALAWFRQRPGKEREFVAGLRWGGPTNYADSVKDRFTISGDSAKHTMYLQMNSLKPEDTAVYYCGYNPGGWAVPSQYEYDSWGQGTQVTVSSGTGGGGSGGGGSGGGGSEFDIQMTQSPSSLSASVGDRVTITCKASDHINNWLAWYQQKPGQAPKLLIYGATTLETGVPSRFSGSGSGTDYTLTISSLQPEDFATYYCQQSWNTPWTFGQGTKLEIKRGQPKANPTVTLFPPSSEELQANKATLVCLISDFYPGAVTVAWKADGSPVKAGVETTKPSKQSNNKYAASSYLSLTPEQWKSHRSYSCQVTHEGSTVEKTVAPTECSGSQSFGLLDPKLCYLLDGILFIYGVILTALFLRVKFSRSADAPAYQQGQNQLYNELNLGRREEYDVLDKRRGRDPEMGGKPQRRKNPQEGLYNELQKDKMAEAYSEIGMKGERRRGKGHDGLYQGLSTATKDTYDALHMQALPPRRAKRSGSGATNFSLLKQAGDVEENPGPTSMDWIWRILFLVGAATGAHSGPQVQLQESGGGLAQAGGSLRLSCAASGRTFSMGWFRQAPGKEREFVAAITYSGGSPYYASSVRGRFTISRDNAKNTVYLQMNSLKPEDTAVYYCAANPTYGSDWNAENWGQGTQVTVSSGSGGGGSGGGGSGGGGSFEQVQLQQPGAELVKPGASVKMSCKASGYAFSSYWINWMKQKPGQGLEWIGQIYPGDGDTNYNGKFKGRATLTADTSSSTAYMQLSSLTSEDSAVYFCARSITTVVGCAMDYWGQGTSVTVSSASTKGPSVFPLAPSSKSTSGGTAALGCLVKDYFPEPVTVSWNSGALTSGVHTFPAVLQSSGLYSLSSVVTVPSSSLGTQTYICNVNHKPSNTKVDKRVEPKSCGTQSFGLLDPKLCYLLDGILFIYGVILTALFLRVKFSRSADAPAYQQGQNQLYNELNLGRREEYDVLDKRRGRDPEMGGKPQRRKNPQEGLYNELQKDKMAEAYSEIGMKGERRRGKGHDGLYQGLSTATKDTYDALHMQALPPRRAKRSGSGVKQTLNFDLLKLAGDVESNPGPSRGHMTEYKPTVRLATRDDVPRAVRTLAAAFADYPATRHTVDPDRHIERVTELQELFLTRVGLDIGKVWVADDGAAVAVWTTPESVEAGAVFAEIGPRMAELSGSRLAAQQQMEGLLAPHRPKEPAWFLATVGVSPDHQGKGLGSAVVLPGVEAAERAGVPAFLETSAPRNLPFYERLGFTVTADVEVPEGPRTWCMTRKPGA

SEQ ID NO: 15750 - protein, 1097 aa, Artificial Sequence
  Synthetic Polypeptide
MALPVTALLLPLALLLHAARPQVQLVESGGGLVQAGDSVTLSCTASGRTFSSYALAWFRQRPGKEREFVAGLRWGGPTNYADSVKDRFTISGDSAKHTMYLQMNSLKPEDTAVYYCGYNPGGWAVPSQYEYDSWGQGTQVTVSSGTGGGGSGGGGSGGGGSEFDIQMTQSPSSLSASVGDRVTITCKASDHINNWLAWYQQKPGQAPKLLIYGATTLETGVPSRFSGSGSGTDYTLTISSLQPEDFATYYCQQSWNTPWTFGQGTKLEIKRLEDLKNVFPPEVAVFEPSEAEISHTQKATLVCLATGFYPDHVELSWWVNGKEVHSGVSTDPQPLKEQPALNDSRYCLSSRLRVSATFWQNPRNHFRCQVQFYGLSENDEWTQDRAKPVTQIVSAEAWGRADCGSQSFGLLDPKLCYLLDGILFIYGVILTALFLRVKFSRSADAPAYQQGQNQLYNELNLGRREEYDVLDKRRGRDPEMGGKPQRRKNPQEGLYNELQKDKMAEAYSEIGMKGERRRGKGHDGLYQGLSTATKDTYDALHMQALPPRRAKRSGSGATNFSLLKQAGDVEENPGPTSMDWIWRILFLVGAATGAHSGPQVQLQESGGGLAQAGGSLRLSCAASGRTFSMGWFRQAPGKEREFVAAITYSGGSPYYASSVRGRFTISRDNAKNTVYLQMNSLKPEDTAVYYCAANPTYGSDWNAENWGQGTQVTVSSGSGGGGSGGGGSGGGGSFEQVQLQQPGAELVKPGASVKMSCKASGYAFSSYWINWMKQKPGQGLEWIGQIYPGDGDTNYNGKFKGRATLTADTSSSTAYMQLSSLTSEDSAVYFCARSITTVVGCAMDYWGQGTSVTVSSTRIQNPDPAVYQLRDSKSSDKSVCLFTDFDSQTNVSQSKDSDVYITDKTVLDMRSMDFKSNSAVAWSNKSDFACANAFNNSIIPEDTFFPSPESSCGTQSFGLLDPKLCYLLDGILFIYGVILTALFLRVKFSRSADAPAYQQGQNQLYNELNLGRREEYDVLDKRRGRDPEMGGKPQRRKNPQEGLYNELQKDKMAEAYSEIGMKGERRRGKGHDGLYQGLSTATKDTYDALHMQALPPR

SEQ ID NO: 15751 - protein, 1097 aa, Artificial Sequence
  Synthetic Polypeptide
MALPVTALLLPLALLLHAARPQVQLVESGGGLVQAGDSVTLSCTASGRTFSSYALAWFRQRPGKEREFVAGLRWGGPTNYADSVKDRFTISGDSAKHTMYLQMNSLKPEDTAVYYCGYNPGGWAVPSQYEYDSWGQGTQVTVSSGTGGGGSGGGGSGGGGSEFDIQMTQSPSSLSASVGDRVTITCKASDHINNWLAWYQQKPGQAPKLLIYGATTLETGVPSRFSGSGSGTDYTLTISSLQPEDFATYYCQQSWNTPWTFGQGTKLEIKRLEDLKNVFPPEVAVFEPSKAEIAHTQKATLVCLATGFYPDHVELSWWVNGKEVHSGVCTDPQPLKEQPALNDSRYCLSSRLRVSATFWQNPRNHFRCQVQFYGLSENDEWTQDRAKPVTQIVSAEAWGRADCGSQSFGLLDPKLCYLLDGILFIYGVILTALFLRVKFSRSADAPAYQQGQNQLYNELNLGRREEYDVLDKRRGRDPEMGGKPQRRKNPQEGLYNELQKDKMAEAYSEIGMKGERRRGKGHDGLYQGLSTATKDTYDALHMQALPPRRAKRSGSGATNFSLLKQAGDVEENPGPTSMDWIWRILFLVGAATGAHSGPQVQLQESGGGLAQAGGSLRLSCAASGRTFSMGWFRQAPGKEREFVAAITYSGGSPYYASSVRGRFTISRDNAKNTVYLQMNSLKPEDTAVYYCAANPTYGSDWNAENWGQGTQVTVSSGSGGGGSGGGGSGGGGSFEQVQLQQPGAELVKPGASVKMSCKASGYAFSSYWINWMKQKPGQGLEWIGQIYPGDGDTNYNGKFKGRATLTADTSSSTAYMQLSSLTSEDSAVYFCARSITTVVGCAMDYWGQGTSVTVSSTRIQNPDPAVYQLRDSKSSDKSVCLFTDFDSQTNVSQSKDSDVYITDKCVLDMRSMDFKSNSAVAWSNKSDFACANAFNNSIIPEDTFFPSSDVPCGTQSFGLLDPKLCYLLDGILFIYGVILTALFLRVKFSRSADAPAYQQGQNQLYNELNLGRREEYDVLDKRRGRDPEMGGKPQRRKNPQEGLYNELQKDKMAEAYSEIGMKGERRRGKGHDGLYQGLSTATKDTYDALHMQALPPR

SEQ ID NO: 15752 - protein, 1168 aa, Artificial Sequence
  Synthetic Polypeptide
MALPVTALLLPLALLLHAARPQVQLVESGGGLVQAGDSVTLSCTASGRTFSSYALAWFRQRPGKEREFVAGLRWGGPTNYADSVKDRFTISGDSAKHTMYLQMNSLKPEDTAVYYCGYNPGGWAVPSQYEYDSWGQGTQVTVSSGTGGGGSGGGGSGGGGSEFDIQMTQSPSSLSASVGDRVTITCKASDHINNWLAWYQQKPGQAPKLLIYGATTLETGVPSRFSGSGSGTDYTLTISSLQPEDFATYYCQQSWNTPWTFGQGTKLEIKRLEGKPIPNPLLGLDSTGSGEDLKNVFPPEVAVFEPSEAEISHTQKATLVCLATGFYPDHVELSWWVNGKEVHSGVSTDPQPLKEQPALNDSRYCLSSRLRVSATFWQNPRNHFRCQVQFYGLSENDEWTQDRAKPVTQIVSAEAWGRADCGSQSFGLLDPKLCYLLDGILFIYGVILTALFLRVKFSRSADAPAYQQGQNQLYNELNLGRREEYDVLDKRRGRDPEMGGKPQRRKNPQEGLYNELQKDKMAEAYSEIGMKGERRRGKGHDGLYQGLSTATKDTYDALHMQALPPRRAKRSGSGATNFSLLKQAGDVEENPGPTSMDWIWRILFLVGAATGAHSGPQVQLQESGGGLAQAGGSLRLSCAASGRTFSMGWFRQAPGKEREFVAAITYSGGSPYYASSVRGRFTISRDNAKNTVYLQMNSLKPEDTAVYYCAANPTYGSDWNAENWGQGTQVTVSSGSGGGGSGGGGSGGGGSFEQVQLQQPGAELVKPGASVKMSCKASGYAFSSYWINWMKQKPGQGLEWIGQIYPGDGDTNYNGKFKGRATLTADTSSSTAYMQLSSLTSEDSAVYFCARSITTVVGCAMDYWGQGTSVTVSSTREQKLISEEDGSGIQNPDPAVYQLRDSKSSDKSVCLFTDFDSQTNVSQSKDSDVYITDKTVLDMRSMDFKSNSAVAWSNKSDFACANAFNNSIIPEDTFFPSPESSCGTQSFGLLDPKLCYLLDGILFIYGVILTALFLRSKRSRLLHSDYMNMTPRRPGPTRKHYQPYAPPRDFAAYRSRVKFSRSADAPAYQQGQNQLYNELNLGRREEYDVLDKRRGRDPEMGGKPQRRKNPQEGLYNELQKDKMAEAYSEIGMKGERRRGKGHDGLYQGLSTATKDTYDALHMQALPPR

SEQ ID NO: 15753 - protein, 1209 aa, Artificial Sequence
  Synthetic Polypeptide
MALPVTALLLPLALLLHAARPQVQLVESGGGLVQAGDSVTLSCTASGRTFSSYALAWFRQRPGKEREFVAGLRWGGPTNYADSVKDRFTISGDSAKHTMYLQMNSLKPEDTAVYYCGYNPGGWAVPSQYEYDSWGQGTQVTVSSGTGGGGSGGGGSGGGGSEFDIQMTQSPSSLSASVGDRVTITCKASDHINNWLAWYQQKPGQAPKLLIYGATTLETGVPSRFSGSGSGTDYTLTISSLQPEDFATYYCQQSWNTPWTFGQGTKLEIKRLEGKPIPNPLLGLDSTGSGEDLKNVFPPEVAVFEPSEAEISHTQKATLVCLATGFYPDHVELSWWVNGKEVHSGVSTDPQPLKEQPALNDSRYCLSSRLRVSATFWQNPRNHFRCQVQFYGLSENDEWTQDRAKPVTQIVSAEAWGRADCGSQSFGLLDPKLCYLLDGILFIYGVILTALFLRSKRSRLLHSDYMNMTPRRPGPTRKHYQPYAPPRDFAAYRSRVKFSRSADAPAYQQGQNQLYNELNLGRREEYDVLDKRRGRDPEMGGKPQRRKNPQEGLYNELQKDKMAEAYSEIGMKGERRRGKGHDGLYQGLSTATKDTYDALHMQALPPRRAKRSGSGATNFSLLKQAGDVEENPGPTSMDWIWRILFLVGAATGAHSGPQVQLQESGGGLAQAGGSLRLSCAASGRTFSMGWFRQAPGKEREFVAAITYSGGSPYYASSVRGRFTISRDNAKNTVYLQMNSLKPEDTAVYYCAANPTYGSDWNAENWGQGTQVTVSSGSGGGGSGGGGSGGGGSFEQVQLQQPGAELVKPGASVKMSCKASGYAFSSYWINWMKQKPGQGLEWIGQIYPGDGDTNYNGKFKGRATLTADTSSSTAYMQLSSLTSEDSAVYFCARSITTVVGCAMDYWGQGTSVTVSSTREQKLISEEDGSGIQNPDPAVYQLRDSKSSDKSVCLFTDFDSQTNVSQSKDSDVYITDKTVLDMRSMDFKSNSAVAWSNKSDFACANAFNNSIIPEDTFFPSPESSCGTQSFGLLDPKLCYLLDGILFIYGVILTALFLRSKRSRLLHSDYMNMTPRRPGPTRKHYQPYAPPRDFAAYRSRVKFSRSADAPAYQQGQNQLYNELNLGRREEYDVLDKRRGRDPEMGGKPQRRKNPQEGLYNELQKDKMAEAYSEIGMKGERRRGKGHDGLYQGLSTATKDTYDALHMQALPPR

SEQ ID NO: 15754 - protein, 1170 aa, Artificial Sequence
  Synthetic Polypeptide
MALPVTALLLPLALLLHAARPQVQLVESGGGLVQAGDSVTLSCTASGRTFSSYALAWFRQRPGKEREFVAGLRWGGPTNYADSVKDRFTISGDSAKHTMYLQMNSLKPEDTAVYYCGYNPGGWAVPSQYEYDSWGQGTQVTVSSGTGGGGSGGGGSGGGGSEFDIQMTQSPSSLSASVGDRVTITCKASDHINNWLAWYQQKPGQAPKLLIYGATTLETGVPSRFSGSGSGTDYTLTISSLQPEDFATYYCQQSWNTPWTFGQGTKLEIKRLEGKPIPNPLLGLDSTGSGEDLKNVFPPEVAVFEPSEAEISHTQKATLVCLATGFYPDHVELSWWVNGKEVHSGVSTDPQPLKEQPALNDSRYCLSSRLRVSATFWQNPRNHFRCQVQFYGLSENDEWTQDRAKPVTQIVSAEAWGRADCGSQSFGLLDPKLCYLLDGILFIYGVILTALFLRVKFSRSADAPAYQQGQNQLYNELNLGRREEYDVLDKRRGRDPEMGGKPQRRKNPQEGLYNELQKDKMAEAYSEIGMKGERRRGKGHDGLYQGLSTATKDTYDALHMQALPPRRAKRSGSGATNFSLLKQAGDVEENPGPTSMDWIWRILFLVGAATGAHSGPQVQLQESGGGLAQAGGSLRLSCAASGRTFSMGWFRQAPGKEREFVAAITYSGGSPYYASSVRGRFTISRDNAKNTVYLQMNSLKPEDTAVYYCAANPTYGSDWNAENWGQGTQVTVSSGSGGGGSGGGGSGGGGSFEQVQLQQPGAELVKPGASVKMSCKASGYAFSSYWINWMKQKPGQGLEWIGQIYPGDGDTNYNGKFKGRATLTADTSSSTAYMQLSSLTSEDSAVYFCARSITTVVGCAMDYWGQGTSVTVSSTREQKLISEEDLGSGIQNPDPAVYQLRDSKSSDKSVCLFTDFDSQTNVSQSKDSDVYITDKTVLDMRSMDFKSNSAVAWSNKSDFACANAFNNSIIPEDTFFPSPESSCGTQSFGLLDPKLCYLLDGILFIYGVILTALFLKRGRKKLLYIFKQPFMRPVQTTQEEDGCSCRFPEEEEGGCELRVKFSRSADAPAYQQGQNQLYNELNLGRREEYDVLDKRRGRDPEMGGKPQRRKNPQEGLYNELQKDKMAEAYSEIGMKGERRRGKGHDGLYQGLSTATKDTYDALHMQALPPR

SEQ ID NO: 15755 - protein, 1212 aa, Artificial Sequence
  Synthetic Polypeptide
MALPVTALLLPLALLLHAARPQVQLVESGGGLVQAGDSVTLSCTASGRTFSSYALAWFRQRPGKEREFVAGLRWGGPTNYADSVKDRFTISGDSAKHTMYLQMNSLKPEDTAVYYCGYNPGGWAVPSQYEYDSWGQGTQVTVSSGTGGGGSGGGGSGGGGSEFDIQMTQSPSSLSASVGDRVTITCKASDHINNWLAWYQQKPGQAPKLLIYGATTLETGVPSRFSGSGSGTDYTLTISSLQPEDFATYYCQQSWNTPWTFGQGTKLEIKRLEGKPIPNPLLGLDSTGSGEDLKNVFPPEVAVFEPSEAEISHTQKATLVCLATGFYPDHVELSWWVNGKEVHSGVSTDPQPLKEQPALNDSRYCLSSRLRVSATFWQNPRNHFRCQVQFYGLSENDEWTQDRAKPVTQIVSAEAWGRADCGSQSFGLLDPKLCYLLDGILFIYGVILTALFLKRGRKKLLYIFKQPFMRPVQTTQEEDGCSCRFPEEEEGGCELRVKFSRSADAPAYQQGQNQLYNELNLGRREEYDVLDKRRGRDPEMGGKPQRRKNPQEGLYNELQKDKMAEAYSEIGMKGERRRGKGHDGLYQGLSTATKDTYDALHMQALPPRRAKRSGSGATNFSLLKQAGDVEENPGPTSMDWIWRILFLVGAATGAHSGPQVQLQESGGGLAQAGGSLRLSCAASGRTFSMGWFRQAPGKEREFVAAITYSGGSPYYASSVRGRFTISRDNAKNTVYLQMNSLKPEDTAVYYCAANPTYGSDWNAENWGQGTQVTVSSGSGGGGSGGGGSGGGGSFEQVQLQQPGAELVKPGASVKMSCKASGYAFSSYWINWMKQKPGQGLEWIGQIYPGDGDTNYNGKFKGRATLTADTSSSTAYMQLSSLTSEDSAVYFCARSITTVVGCAMDYWGQGTSVTVSSTREQKLISEEDLGSGIQNPDPAVYQLRDSKSSDKSVCLFTDFDSQTNVSQSKDSDVYITDKTVLDMRSMDFKSNSAVAWSNKSDFACANAFNNSIIPEDTFFPSPESSCGTQSFGLLDPKLCYLLDGILFIYGVILTALFLKRGRKKLLYIFKQPFMRPVQTTQEEDGCSCRFPEEEEGGCELRVKFSRSADAPAYQQGQNQLYNELNLGRREEYDVLDKRRGRDPEMGGKPQRRKNPQEGLYNELQKDKMAEAYSEIGMKGERRRGKGHDGLYQGLSTATKDTYDALHMQALPPR

SEQ ID NO: 15756 - protein, 1102 aa, Artificial Sequence
  Synthetic Polypeptide
MALPVTALLLPLALLLHAARPQVQLVESGGGLVQAGDSVTLSCTASGRTFSSYALAWFRQRPGKEREFVAGLRWGGPTNYADSVKDRFTISGDSAKHTMYLQMNSLKPEDTAVYYCGYNPGGWAVPSQYEYDSWGQGTQVTVSSGTGGGGSGGGGSGGGGSEFDIQMTQSPSSLSASVGDRVTITCKASDHINNWLAWYQQKPGQAPKLLIYGATTLETGVPSRFSGSGSGTDYTLTISSLQPEDFATYYCQQSWNTPWTFGQGTKLEIKRLEQSFGLLDPKLCYLLDGILFIYGVILTALFLRVKFSRSADAPAYQQGQNQLYNELNLGRREEYDVLDKRRGRDPEMGGKPQRRKNPQEGLYNELQKDKMAEAYSEIGMKGERRRGKGHDGLYQGLSTATKDTYDALHMQALPPRRAKRSGSGATNFSLLKQAGDVEENPGPTSMDWIWRILFLVGAATGAHSGPQVQLQESGGGLAQAGGSLRLSCAASGRTFSMGWFRQAPGKEREFVAAITYSGGSPYYASSVRGRFTISRDNAKNTVYLQMNSLKPEDTAVYYCAANPTYGSDWNAENWGQGTQVTVSSGSGGGGSGGGGSGGGGSFEQVQLQQPGAELVKPGASVKMSCKASGYAFSSYWINWMKQKPGQGLEWIGQIYPGDGDTNYNGKFKGRATLTADTSSSTAYMQLSSLTSEDSAVYFCARSITTVVGCAMDYWGQGTSVTVSSTRQSFGLLDPKLCYLLDGILFIYGVILTALFLRVKFSRSADAPAYQQGQNQLYNELNLGRREEYDVLDKRRGRDPEMGGKPQRRKNPQEGLYNELQKDKMAEAYSEIGMKGERRRGKGHDGLYQGLSTATKDTYDALHMQALPPRRAKRSGSGVKQTLNFDLLKLAGDVESNPGPSRGHMTEYKPTVRLATRDDVPRAVRTLAAAFADYPATRHTVDPDRHIERVTELQELFLTRVGLDIGKVWVADDGAAVAVWTTPESVEAGAVFAEIGPRMAELSGSRLAAQQQMEGLLAPHRPKEPAWFLATVGVSPDHQGKGLGSAVVLPGVEAAERAGVPAFLETSAPRNLPFYERLGFTVTADVEVPEGPRTWCMTRKPGA

SEQ ID NO: 15757 - protein, 927 aa, Artificial Sequence
  Synthetic Polypeptide
MALPVTALLLPLALLLHAARPQVQLVESGGGLVQAGDSVTLSCTASGRTFSSYALAWFRQRPGKEREFVAGLRWGGPTNYADSVKDRFTISGDSAKHTMYLQMNSLKPEDTAVYYCGYNPGGWAVPSQYEYDSWGQGTQVTVSSGTGGGGSGGGGSGGGGSEFDIQMTQSPSSLSASVGDRVTITCKASDHINNWLAWYQQKPGQAPKLLIYGATTLETGVPSRFSGSGSGTDYTLTISSLQPEDFATYYCQQSWNTPWTFGQGTKLEIKRLEGQPKANPTVTLFPPSSEELQANKATLVCLISDFYPGAVTVAWKADGSPVKAGVETTKPSKQSNNKYAASSYLSLTPEQWKSHRSYSCQVTHEGSTVEKTVAPTECSPIKTDVITMDPKDNCSKDANDTLLLQLTNTSAYYMYLLLLLKSVVYFAIITCCLLRRTAFCCNGEKSRAKRSGSGATNFSLLKQAGDVEENPGPTSMDWIWRILFLVGAATGAHSGPQVQLQESGGGLAQAGGSLRLSCAASGRTFSMGWFRQAPGKEREFVAAITYSGGSPYYASSVRGRFTISRDNAKNTVYLQMNSLKPEDTAVYYCAANPTYGSDWNAENWGQGTQVTVSSGSGGGGSGGGGSGGGGSFEQVQLQQPGAELVKPGASVKMSCKASGYAFSSYWINWMKQKPGQGLEWIGQIYPGDGDTNYNGKFKGRATLTADTSSSTAYMQLSSLTSEDSAVYFCARSITTVVGCAMDYWGQGTSVTVSSTRASTKGPSVFPLAPSSKSTSGGTAALGCLVKDYFPEPVTVSWNSGALTSGVHTFPAVLQSSGLYSLSSVVTVPSSSLGTQTYICNVNHKPSNTKVDKRVEPKSCEVKTDSTDHVKPKETENTKQPSKSCHKPKAIVHTEKVNMMSLTVLGLRMLFAKTVAVNFLLTAKLFFL

SEQ ID NO: 15758 - protein, 905 aa, Artificial Sequence
  Synthetic Polypeptide
MALPVTALLLPLALLLHAARPQVQLVESGGGLVQAGDSVTLSCTASGRTFSSYALAWFRQRPGKEREFVAGLRWGGPTNYADSVKDRFTISGDSAKHTMYLQMNSLKPEDTAVYYCGYNPGGWAVPSQYEYDSWGQGTQVTVSSGTGGGGSGGGGSGGGGSEFDIQMTQSPSSLSASVGDRVTITCKASDHINNWLAWYQQKPGQAPKLLIYGATTLETGVPSRFSGSGSGTDYTLTISSLQPEDFATYYCQQSWNTPWTFGQGTKLEIKRLEGQPKANPTVTLFPPSSEELQANKATLVCLISDFYPGAVTVAWKADGSPVKAGVETTKPSKQSNNKYAASSYLSLTPEQWKSHRSYSCQVTHEGSTVEKTVAPTECSGRADCGITSASYHQGVLSATILYEILLGKATLYAVLVSALVLMAMVKRKDSRGRAKRSGSGATNFSLLKQAGDVEENPGPTSMDWIWRILFLVGAATGAHSGPQVQLQESGGGLAQAGGSLRLSCAASGRTFSMGWFRQAPGKEREFVAAITYSGGSPYYASSVRGRFTISRDNAKNTVYLQMNSLKPEDTAVYYCAANPTYGSDWNAENWGQGTQVTVSSGSGGGGSGGGGSGGGGSFEQVQLQQPGAELVKPGASVKMSCKASGYAFSSYWINWMKQKPGQGLEWIGQIYPGDGDTNYNGKFKGRATLTADTSSSTAYMQLSSLTSEDSAVYFCARSITTVVGCAMDYWGQGTSVTVSSTRASTKGPSVFPLAPSSKSTSGGTAALGCLVKDYFPEPVTVSWNSGALTSGVHTFPAVLQSSGLYSLSSVVTVPSSSLGTQTYICNVNHKPSNTKVDKRVEPKSCIPEDTFFPSSDVPCDVKLVEKSFETDTNLNFQNLSVIGFRILLLKVAGFNLLMTLRLWSS

SEQ ID NO: 15759 - protein, 905 aa, Artificial Sequence
  Synthetic Polypeptide
MALPVTALLLPLALLLHAARPQVQLVESGGGLVQAGDSVTLSCTASGRTFSSYALAWFRQRPGKEREFVAGLRWGGPTNYADSVKDRFTISGDSAKHTMYLQMNSLKPEDTAVYYCGYNPGGWAVPSQYEYDSWGQGTQVTVSSGTGGGGSGGGGSGGGGSEFDIQMTQSPSSLSASVGDRVTITCKASDHINNWLAWYQQKPGQAPKLLIYGATTLETGVPSRFSGSGSGTDYTLTISSLQPEDFATYYCQQSWNTPWTFGQGTKLEIKRLEGQPKANPTVTLFPPSSEELQANKATLVCLISDFYPGAVTVAWKADGSPVKAGVETTKPSKQSNNKYAASSYLSLTPEQWKSHRSYSCQVTHEGSTVEKTVAPTECSGRADCGFTSESYQQGVLSATILYEILLGKATLYAVLVSALVLMAMVKRKDSRGRAKRSGSGATNFSLLKQAGDVEENPGPTSMDWIWRILFLVGAATGAHSGPQVQLQESGGGLAQAGGSLRLSCAASGRTFSMGWFRQAPGKEREFVAAITYSGGSPYYASSVRGRFTISRDNAKNTVYLQMNSLKPEDTAVYYCAANPTYGSDWNAENWGQGTQVTVSSGSGGGGSGGGGSGGGGSFEQVQLQQPGAELVKPGASVKMSCKASGYAFSSYWINWMKQKPGQGLEWIGQIYPGDGDTNYNGKFKGRATLTADTSSSTAYMQLSSLTSEDSAVYFCARSITTVVGCAMDYWGQGTSVTVSSTRASTKGPSVFPLAPSSKSTSGGTAALGCLVKDYFPEPVTVSWNSGALTSGVHTFPAVLQSSGLYSLSSVVTVPSSSLGTQTYICNVNHKPSNTKVDKRVEPKSCIPEDTFFPSPESSCDVKLVEKSFETDTNLNFQNLSVIGFRILLLKVAGFNLLMTLRLWSS

SEQ ID NO: 15760 - protein, 768 aa, Artificial Sequence
  Synthetic Polypeptide
MALPVTALLLPLALLLHAARPEVQLLESGGGLVQPGGSLRLSCAASGFTFSSYAMSWVRQAPGKGLEWVSSISGSGDYIYYADSVKGRFTISRDISKNTLYLQMNSLRAEDTAVYYCAKEGTGANSSLADYRGQGTLVTVSSGGGSGGGSQVQLVESGGGLVQAGDSVTLSCTASGRTFSSYALAWFRQRPGKEREFVAGLRWGGPTNYADSVKDRFTISGDSAKHTMYLQMNSLKPEDTAVYYCGYNPGGWAVPSQYEYDSWGQGTQVTVSSGTGGGGSGGGGSGGGGSEFDIQMTQSPSSLSASVGDRVTITCKASDHINNWLAWYQQKPGQAPKLLIYGATTLETGVPSRFSGSGSGTDYTLTISSLQPEDFATYYCQQSWNTPWTFGQGTKLEIKRGGGGSGGGGSGGGGSQVQLQQPGAELVKPGASVKMSCKASGYAFSSYWINWMKQKPGQGLEWIGQIYPGDGDTNYNGKFKGRATLTADTSSSTAYMQLSSLTSEDSAVYFCARSITTVVGCAMDYWGQGTSVTVSSTREQKLISEEDLKIEVMYPPPYLDNEKSNGTIIHVKGKHLCPSPLFPGPSKPFWVLVVVGGVLACYSLLVTVAFIIFWVRSKRSRLLHSDYMNMTPRRPGPTRKHYQPYAPPRDFAAYRSRVKFSRSADAPAYQQGQNQLYNELNLGRREEYDVLDKRRGRDPEMGGKPRRKNPQEGLYNELQKDKMAEAYSEIGMKGERRRGKGHDGLYQGLSTATKDTYDALHMQALPPR

SEQ ID NO: 15761 - protein, 774 aa, Artificial Sequence
  Synthetic Polypeptide
MALPVTALLLPLALLLHAARPEVQLLESGGGLVQPGGSLRLSCAASGFTFSSYAMSWVRQAPGKGLEWVSSISGSGDYIYYADSVKGRFTISRDISKNTLYLQMNSLRAEDTAVYYCAKEGTGANSSLADYRGQGTLVTVSSGGGSGGGSQVQLVESGGGLVQAGDSVTLSCTASGRTFSSYALAWFRQRPGKEREFVAGLRWGGPTNYADSVKDRFTISGDSAKHTMYLQMNSLKPEDTAVYYCGYNPGGWAVPSQYEYDSWGQGTQVTVSSGTGGGGSGGGGSGGGGSEFDIQMTQSPSSLSASVGDRVTITCKASDHINNWLAWYQQKPGQAPKLLIYGATTLETGVPSRFSGSGSGTDYTLTISSLQPEDFATYYCQQSWNTPWTFGQGTKLEIKRGGGGSGGGGSGGGGSQVQLQQPGAELVKPGASVKMSCKASGYAFSSYWINWMKQKPGQGLEWIGQIYPGDGDTNYNGKFKGRATLTADTSSSTAYMQLSSLTSEDSAVYFCARSITTVVGCAMDYWGQGTSVTVSSTREQKLISEEDLAKPTTTPAPRPPTPAPTIASQPLSLRPEACRPAAGGAVHTRGLDFACDIYIWAPLAGTCGVLLLSLVITLYCKRGRKKLLYIFKQPFMRPVQTTQEEDGCSCRFPEEEEGGCELRVKFSRSADAPAYQQGQNQLYNELNLGRREEYDVLDKRRGRDPEMGGKPRRKNPQEGLYNELQKDKMAEAYSEIGMKGERRRGKGHDGLYQGLSTATKDTYDALHMQALPPR

SEQ ID NO: 15762 - protein, 1187 aa, Artificial Sequence
  Synthetic Polypeptide
MALPVTALLLPLALLLHAARPEVQLLESGGGLVQPGGSLRLSCAASGFTFSSYAMSWVRQAPGKGLEWVSSISGSGDYIYYADSVKGRFTISRDISKNTLYLQMNSLRAEDTAVYYCAKEGTGANSSLADYRGQGTLVTVSSGGGSGGGSQVQLVESGGGLVQAGDSVTLSCTASGRTFSSYALAWFRQRPGKEREFVAGLRWGGPTNYADSVKDRFTISGDSAKHTMYLQMNSLKPEDTAVYYCGYNPGGWAVPSQYEYDSWGQGTQVTVSSGTGGGGSGGGGSGGGGSEFDIQMTQSPSSLSASVGDRVTITCKASDHINNWLAWYQQKPGQAPKLLIYGATTLETGVPSRFSGSGSGTDYTLTISSLQPEDFATYYCQQSWNTPWTFGQGTKLEIKRGGGGSGGGGSGGGGSQVQLQQPGAELVKPGASVKMSCKASGYAFSSYWINWMKQKPGQGLEWIGQIYPGDGDTNYNGKFKGRATLTADTSSSTAYMQLSSLTSEDSAVYFCARSITTVVGCAMDYWGQGTSVTVSSTREQKLISEEDLAKPTTTPAPRPPTPAPTIASQPLSLRPEACRPAAGGAVHTRGLDFACDIYIWAPLAGTCGVLLLSLVITLYCGRARVKFSRSADAPAYQQGQNQLYNELNLGRREEYDVLDKRRGRDPEMGGKPRRKNPQEGLYNELQKDKMAEAYSEIGMKGERRRGKGHDGLYQGLSTATKDTYDALHMQALPPRSRGSGATNFSLLKQAGDVEENPGPGIHMATYEVLCEVARKLGTDDREVVLFLLNVFIPQPTLAQLIGALRALKEEGRLTFPLLAECLFRAGRRDLLRDLLHLDPRFLERHLAGTMSYFSPYQLTVLHVDGELCARDIRSLIFLSKDTIGSRSTPQTFLHWVYCMENLDLLGPTDVDALMSMLRSLSRVDLQRQVQTLMGLHLSGPSHSQHYRHTPLETDFYDYKDDDDKTSGSGEGRGSLLTCGDVEENPGPHMTEYKPTVRLATRDDVPRAVRTLAAAFADYPATRHTVDPDRHIERVTELQELFLTRVGLDIGKVWVADDGAAVAVWTTPESVEAGAVFAEIGPRMAELSGSRLAAQQQMEGLLAPHRPKEPAWFLATVGVSPDHQGKGLGSAVVLPGVEAAERAGVPAFLETSAPRNLPFYERLGFTVTADVEVPEGPRTWCMTRKPGA

SEQ ID NO: 15763 - protein, 1127 aa, Artificial Sequence
  Synthetic Polypeptide
MALPVTALLLPLALLLHAARPEVQLLESGGGLVQPGGSLRLSCAASGFTFSSYAMSWVRQAPGKGLEWVSSISGSGDYIYYADSVKGRFTISRDISKNTLYLQMNSLRAEDTAVYYCAKEGTGANSSLADYRGQGTLVTVSSGGGSGGGSQVQLVESGGGLVQAGDSVTLSCTASGRTFSSYALAWFRQRPGKEREFVAGLRWGGPTNYADSVKDRFTISGDSAKHTMYLQMNSLKPEDTAVYYCGYNPGGWAVPSQYEYDSWGQGTQVTVSSGTGGGGSGGGGSGGGGSEFDIQMTQSPSSLSASVGDRVTITCKASDHINNWLAWYQQKPGQAPKLLIYGATTLETGVPSRFSGSGSGTDYTLTISSLQPEDFATYYCQQSWNTPWTFGQGTKLEIKRLEIQNPDPAVYQLRDSKSSDKSVCLFTDFDSQTNVSQSKDSDVYITDKCVLDMRSMDFKSNSAVAWSNKSDFACANAFNNSIIPEDTFFPSSDVPCDVKLVEKSFETDTNLNFQNLSVIGFRILLLKVAGFNLLMTLRLWSSRAKRSGSGVKQTLNFDLLKLAGDVESNPGPTSMDWIWRILFLVGAATGAHSFEQVQLQQPGAELVKPGASVKMSCKASGYAFSSYWINWMKQKPGQGLEWIGQIYPGDGDTNYNGKFKGRATLTADTSSSTAYMQLSSLTSEDSAVYFCARSITTVVGCAMDYWGQGTSVTVSSTREDLKNVFPPEVAVFEPSKAEIAHTQKATLVCLATGFYPDHVELSWWVNGKEVHSGVCTDPQPLKEQPALNDSRYCLSSRLRVSATFWQNPRNHFRCQVQFYGLSENDEWTQDRAKPVTQIVSAEAWGRADCGITSASYHQGVLSATILYEILLGKATLYAVLVSALVLMAMVKRKDSRGRAKRSGSGATNFSLLKQAGDVEENPGPSRGHMTEYKPTVRLATRDDVPRAVRTLAAAFADYPATRHTVDPDRHIERVTELQELFLTRVGLDIGKVWVADDGAAVAVWTTPESVEAGAVFAEIGPRMAELSGSRLAAQQQMEGLLAPHRPKEPAWFLATVGVSPDHQGKGLGSAVVLPGVEAAERAGVPAFLETSAPRNLPFYERLGFTVTADVEVPEGPRTWCMTRKPGA

SEQ ID NO: 15764 - protein, 1126 aa, Artificial Sequence
  Synthetic Polypeptide
MALPVTALLLPLALLLHAARPEVQLLESGGGLVQPGGSLRLSCAASGFTFSSYAMSWVRQAPGKGLEWVSSISGSGDYIYYADSVKGRFTISRDISKNTLYLQMNSLRAEDTAVYYCAKEGTGANSSLADYRGQGTLVTVSSGGGSGGGSQVQLVESGGGLVQAGDSVTLSCTASGRTFSSYALAWFRQRPGKEREFVAGLRWGGPTNYADSVKDRFTISGDSAKHTMYLQMNSLKPEDTAVYYCGYNPGGWAVPSQYEYDSWGQGTQVTVSSGTGGGGSGGGGSGGGGSEFDIQMTQSPSSLSASVGDRVTITCKASDHINNWLAWYQQKPGQAPKLLIYGATTLETGVPSRFSGSGSGTDYTLTISSLQPEDFATYYCQQSWNTPWTFGQGTKLEIKRLEDLKNVFPPEVAVFEPSKAEIAHTQKATLVCLATGFYPDHVELSWWVNGKEVHSGVCTDPQPLKEQPALNDSRYCLSSRLRVSATFWQNPRNHFRCQVQFYGLSENDEWTQDRAKPVTQIVSAEAWGRADCGITSASYHQGVLSATILYEILLGKATLYAVLVSALVLMAMVKRKDSRGRAKRSGSGATNFSLLKQAGDVEENPGPTSMDWIWRILFLVGAATGAHSFEQVQLQQPGAELVKPGASVKMSCKASGYAFSSYWINWMKQKPGQGLEWIGQIYPGDGDTNYNGKFKGRATLTADTSSSTAYMQLSSLTSEDSAVYFCARSITTVVGCAMDYWGQGTSVTVSSTRIQNPDPAVYQLRDSKSSDKSVCLFTDFDSQTNVSQSKDSDVYITDKCVLDMRSMDFKSNSAVAWSNKSDFACANAFNNSIIPEDTFFPSSDVPCDVKLVEKSFETDTNLNFQNLSVIGFRILLLKVAGFNLLMTLRLWSSRAKRSGSGVKQTLNFDLLKLAGDVESNPGPSRGHMTEYKPTVRLATRDDVPRAVRTLAAAFADYPATRHTVDPDRHIERVTELQELFLTRVGLDIGKVWVADDGAAVAVWTTPESVEAGAVFAEIGPRMAELSGSRLAAQQQMEGLLAPHRPKEPAWFLATVGVSPDHQGKGLGSAVVLPGVEAAERAGVPAFLETSAPRNLPFYERLGFTVTADVEVPEGPRTWCMTRKPGA

SEQ ID NO: 15765 - protein, 893 aa, Artificial Sequence
  Synthetic Polypeptide
MALPVTALLLPLALLLHAARPEVQLLESGGGLVQPGGSLRLSCAASGFTFSSYAMSWVRQAPGKGLEWVSSISGSGDYIYYADSVKGRFTISRDISKNTLYLQMNSLRAEDTAVYYCAKEGTGANSSLADYRGQGTLVTVSSGGGSGGGSQVQLVESGGGLVQAGDSVTLSCTASGRTFSSYALAWFRQRPGKEREFVAGLRWGGPTNYADSVKDRFTISGDSAKHTMYLQMNSLKPEDTAVYYCGYNPGGWAVPSQYEYDSWGQGTQVTVSSGTGGGGSGGGGSGGGGSEFDIQMTQSPSSLSASVGDRVTITCKASDHINNWLAWYQQKPGQAPKLLIYGATTLETGVPSRFSGSGSGTDYTLTISSLQPEDFATYYCQQSWNTPWTFGQGTKLEIKRLEDLKNVFPPEVAVFEPSEAEISHTQKATLVCLATGFYPDHVELSWWVNGKEVHSGVCTDPQPLKEQPALNDSRYCLSSRLRVSATFWQNPRNHFRCQVQFYGLSENDEWTQDRAKPVTQIVSAEAWGRADCGFTSESYQQGVLSATILYEILLGKATLYAVLVSALVLMAMVKRKDSRGRAKRSGSGATNFSLLKQAGDVEENPGPTSMDWIWRILFLVGAATGAHSFEQVQLQQPGAELVKPGASVKMSCKASGYAFSSYWINWMKQKPGQGLEWIGQIYPGDGDTNYNGKFKGRATLTADTSSSTAYMQLSSLTSEDSAVYFCARSITTVVGCAMDYWGQGTSVTVSSTRIQNPDPAVYQLRDSKSSDKSVCLFTDFDSQTNVSQSKDSDVYITDKCVLDMRSMDFKSNSAVAWSNKSDFACANAFNNSIIPEDTFFPSPESSCDVKLVEKSFETDTNLNFQNLSVIGFRILLLKVAGFNLLMTLRLWSS

SEQ ID NO: 15766 - protein, 1118 aa, Artificial Sequence
  Synthetic Polypeptide
MALPVTALLLPLALLLHAARPEVQLLESGGGLVQPGGSLRLSCAASGFTFSSYAMSWVRQAPGKGLEWVSSISGSGDYIYYADSVKGRFTISRDISKNTLYLQMNSLRAEDTAVYYCAKEGTGANSSLADYRGQGTLVTVSSGGGSGGGSQVQLVESGGGLVQAGDSVTLSCTASGRTFSSYALAWFRQRPGKEREFVAGLRWGGPTNYADSVKDRFTISGDSAKHTMYLQMNSLKPEDTAVYYCGYNPGGWAVPSQYEYDSWGQGTQVTVSSGTGGGGSGGGGSGGGGSEFDIQMTQSPSSLSASVGDRVTITCKASDHINNWLAWYQQKPGQAPKLLIYGATTLETGVPSRFSGSGSGTDYTLTISSLQPEDFATYYCQQSWNTPWTFGQGTKLEIKRLEDLKNVFPPEVAVFEPSEAEISHTQKATLVCLATGFYPDHVELSWWVNGKEVHSGVCTDPQPLKEQPALNDSRYCLSSRLRVSATFWQNPRNHFRCQVQFYGLSENDEWTQDRAKPVTQIVSAEAWGRADCGFTSESYQQGVLSATILYEILLGKATLYAVLVSALVLMAMVKRKDSRGRAKRSGSGATNFSLLKQAGDVEENPGPTSMDWIWRILFLVGAATGAHSFEQVQLQQPGAELVKPGASVKMSCKASGYAFSSYWINWMKQKPGQGLEWIGQIYPGDGDTNYNGKFKGRATLTADTSSSTAYMQLSSLTSEDSAVYFCARSITTVVGCAMDYWGQGTSVTVSSTRIQNPDPAVYQLRDSKSSDKSVCLFTDFDSQTNVSQSKDSDVYITDKCVLDMRSMDFKSNSAVAWSNKSDFACANAFNNSIIPEDTFFPSPESSCDVKLVEKSFETDTNLNFQNLSVIGFRILLLKVAGFNLLMTLRLWSSRAKRSGSGVKQTLNFDLLKLAGDVESNPGPSRGGIHTMATYEVLCEVARKLGTDDREVVLFLLNVFIPQPTLAQLIGALRALKEEGRLTFPLLAECLFRAGRRDLLRDLLHLDPRFLERHLAGTMSYFSPYQLTVLHVDGELCARDIRSLIFLSKDTIGSRSTPQTFLHWVYCMENLDLLGPTDVDALMSMLRSLSRVDLQRQVQTLMGLHLSGPSHSQHYRHTP

SEQ ID NO: 15767 - protein, 897 aa, Artificial Sequence
  Synthetic Polypeptide
MALPVTALLLPLALLLHAARPEVQLLESGGGLVQPGGSLRLSCAASGFTFSSYAMSWVRQAPGKGLEWVSSISGSGDYIYYADSVKGRFTISRDISKNTLYLQMNSLRAEDTAVYYCAKEGTGANSSLADYRGQGTLVTVSSGGGSGGGSQVQLVESGGGLVQAGDSVTLSCTASGRTFSSYALAWFRQRPGKEREFVAGLRWGGPTNYADSVKDRFTISGDSAKHTMYLQMNSLKPEDTAVYYCGYNPGGWAVPSQYEYDSWGQGTQVTVSSGTGGGGSGGGGSGGGGSEFDIQMTQSPSSLSASVGDRVTITCKASDHINNWLAWYQQKPGQAPKLLIYGATTLETGVPSRFSGSGSGTDYTLTISSLQPEDFATYYCQQSWNTPWTFGQGTKLEIKRLEIQNPDPAVYQLRDSKSSDKSVCLFTDFDSQTNVSQSKDSDVYITDKCVLDMRSMDFKSNSAVAWSNKSDFACANAFNNSIIPEDTFFPSPESSCDVKLVEKSFETDTNLNFQNLSVIGFRILLLKVAGFNLLMTLRLWSSRAKRSGSGVKQTLNFDLLKLAGDVESNPGPTSMDWIWRILFLVGAATGAHSFEQVQLQQPGAELVKPGASVKMSCKASGYAFSSYWINWMKQKPGQGLEWIGQIYPGDGDTNYNGKFKGRATLTADTSSSTAYMQLSSLTSEDSAVYFCARSITTVVGCAMDYWGQGTSVTVSSTREDLKNVFPPEVAVFEPSEAEISHTQKATLVCLATGFYPDHVELSWWVNGKEVHSGVCTDPQPLKEQPALNDSRYCLSSRLRVSATFWQNPRNHFRCQVQFYGLSENDEWTQDRAKPVTQIVSAEAWGRADCGFTSESYQQGVLSATILYEILLGKATLYAVLVSALVLMAMVKRKDSRG

SEQ ID NO: 15768 - protein, 1119 aa, Artificial Sequence
  Synthetic Polypeptide
MALPVTALLLPLALLLHAARPEVQLLESGGGLVQPGGSLRLSCAASGFTFSSYAMSWVRQAPGKGLEWVSSISGSGDYIYYADSVKGRFTISRDISKNTLYLQMNSLRAEDTAVYYCAKEGTGANSSLADYRGQGTLVTVSSGGGSGGGSQVQLVESGGGLVQAGDSVTLSCTASGRTFSSYALAWFRQRPGKEREFVAGLRWGGPTNYADSVKDRFTISGDSAKHTMYLQMNSLKPEDTAVYYCGYNPGGWAVPSQYEYDSWGQGTQVTVSSGTGGGGSGGGGSGGGGSEFDIQMTQSPSSLSASVGDRVTITCKASDHINNWLAWYQQKPGQAPKLLIYGATTLETGVPSRFSGSGSGTDYTLTISSLQPEDFATYYCQQSWNTPWTFGQGTKLEIKRLEIQNPDPAVYQLRDSKSSDKSVCLFTDFDSQTNVSQSKDSDVYITDKCVLDMRSMDFKSNSAVAWSNKSDFACANAFNNSIIPEDTFFPSPESSCDVKLVEKSFETDTNLNFQNLSVIGFRILLLKVAGFNLLMTLRLWSSRAKRSGSGVKQTLNFDLLKLAGDVESNPGPTSMDWIWRILFLVGAATGAHSFEQVQLQQPGAELVKPGASVKMSCKASGYAFSSYWINWMKQKPGQGLEWIGQIYPGDGDTNYNGKFKGRATLTADTSSSTAYMQLSSLTSEDSAVYFCARSITTVVGCAMDYWGQGTSVTVSSTREDLKNVFPPEVAVFEPSEAEISHTQKATLVCLATGFYPDHVELSWWVNGKEVHSGVCTDPQPLKEQPALNDSRYCLSSRLRVSATFWQNPRNHFRCQVQFYGLSENDEWTQDRAKPVTQIVSAEAWGRADCGFTSESYQQGVLSATILYEILLGKATLYAVLVSALVLMAMVKRKDSRGRAKRSGSGATNFSLLKQAGDVEENPGPSRGGIHTMATYEVLCEVARKLGTDDREVVLFLLNVFIPQPTLAQLIGALRALKEEGRLTFPLLAECLFRAGRRDLLRDLLHLDPRFLERHLAGTMSYFSPYQLTVLHVDGELCARDIRSLIFLSKDTIGSRSTPQTFLHWVYCMENLDLLGPTDVDALMSMLRSLSRVDLQRQVQTLMGLHLSGPSHSQHYRHTP

SEQ ID NO: 15769 - protein, 1171 aa, Artificial Sequence
  Synthetic Polypeptide
MALPVTALLLPLALLLHAARPLEGKPIPNPLLGLDSTGSGEDLKNVFPPEVAVFEPSKAEIAHTQKATLVCLATGFYPDHVELSWWVNGKEVHSGVCTDPQPLKEQPALNDSRYCLSSRLRVSATFWQNPRNHFRCQVQFYGLSENDEWTQDRAKPVTQIVSAEAWGRADCGITSASYHQGVLSATILYEILLGKATLYAVLVSALVLMAMVKRKDSRGRAKRSGSGATNFSLLKQAGDVEENPGPTSMALPVTALLLPLALLLHAARPEVQLLESGGGLVQPGGSLRLSCAASGFTFSSYAMSWVRQAPGKGLEWVSSISGSGDYIYYADSVKGRFTISRDISKNTLYLQMNSLRAEDTAVYYCAKEGTGANSSLADYRGQGTLVTVSSGGGSGGGSQVQLVESGGGLVQAGDSVTLSCTASGRTFSSYALAWFRQRPGKEREFVAGLRWGGPTNYADSVKDRFTISGDSAKHTMYLQMNSLKPEDTAVYYCGYNPGGWAVPSQYEYDSWGQGTQVTVSSGTGGGGSGGGGSGGGGSEFDIQMTQSPSSLSASVGDRVTITCKASDHINNWLAWYQQKPGQAPKLLIYGATTLETGVPSRFSGSGSGTDYTLTISSLQPEDFATYYCQQSWNTPWTFGQGTKLEIKRGGGGSGGGGSGGGGSQVQLQQPGAELVKPGASVKMSCKASGYAFSSYWINWMKQKPGQGLEWIGQIYPGDGDTNYNGKFKGRATLTADTSSSTAYMQLSSLTSEDSAVYFCARSITTVVGCAMDYWGQGTSVTVSSTREQKLISEEDGSGIQNPDPAVYQLRDSKSSDKSVCLFTDFDSQTNVSQSKDSDVYITDKCVLDMRSMDFKSNSAVAWSNKSDFACANAFNNSIIPEDTFFPSSDVPCDVKLVEKSFETDTNLNFQNLSVIGFRILLLKVAGFNLLMTLRLWSSRAKRSGSGVKQTLNFDLLKLAGDVESNPGPSRGHMTEYKPTVRLATRDDVPRAVRTLAAAFADYPATRHTVDPDRHIERVTELQELFLTRVGLDIGKVWVADDGAAVAVWTTPESVEAGAVFAEIGPRMAELSGSRLAAQQQMEGLLAPHRPKEPAWFLATVGVSPDHQGKGLGSAVVLPGVEAAERAGVPAFLETSAPRNLPFYERLGFTVTADVEVPEGPRTWCMTRKPGA

SEQ ID NO: 15770 - protein, 1172 aa, Artificial Sequence
  Synthetic Polypeptide
MALPVTALLLPLALLLHAARPLEQKLISEEDLGSGDRPDPAVYQLRDSKSSDKSVCLFTDFDSQTNVSQSKDSDVYITDKCVLDMRSMDFKSNSAVAWSNKSDFACANAFNNSIIPEDTFFPSPESSCDVKLVEKSFETDTNLNFQNLSVIGFRILLLKVAGFNLLMTLRLWSSSSRAKRSGSGVKQTLNFDLLKLAGDVESNPGPTSMALPVTALLLPLALLLHAARPEVQLLESGGGLVQPGGSLRLSCAASGFTFSSYAMSWVRQAPGKGLEWVSSISGSGDYIYYADSVKGRFTISRDISKNTLYLQMNSLRAEDTAVYYCAKEGTGANSSLADYRGQGTLVTVSSGGGSGGGSQVQLVESGGGLVQAGDSVTLSCTASGRTFSSYALAWFRQRPGKEREFVAGLRWGGPTNYADSVKDRFTISGDSAKHTMYLQMNSLKPEDTAVYYCGYNPGGWAVPSQYEYDSWGQGTQVTVSSGTGGGGSGGGGSGGGGSEFDIQMTQSPSSLSASVGDRVTITCKASDHINNWLAWYQQKPGQAPKLLIYGATTLETGVPSRFSGSGSGTDYTLTISSLQPEDFATYYCQQSWNTPWTFGQGTKLEIKRGGGGSGGGGSGGGGSQVQLQQPGAELVKPGASVKMSCKASGYAFSSYWINWMKQKPGQGLEWIGQIYPGDGDTNYNGKFKGRATLTADTSSSTAYMQLSSLTSEDSAVYFCARSITTVVGCAMDYWGQGTSVTVSSTRGKPIPNPLLGLDSTGSGEDLKNVFPPEVAVFEPSEAEISHTQKATLVCLATGFYPDHVELSWWVNGKEVHSGVCTDPQPLKEQPALNDSRYCLSSRLRVSATFWQNPRNHFRCQVQFYGLSENDEWTQDRAKPVTQIVSAEAWGRADCGFTSESYQQGVLSATILYEILLGKATLYAVLVSALVLMAMVKRKDSRGRAKRSGSGATNFSLLKQAGDVEENPGPSRGHMTEYKPTVRLATRDDVPRAVRTLAAAFADYPATRHTVDPDRHIERVTELQELFLTRVGLDIGKVWVADDGAAVAVWTTPESVEAGAVFAEIGPRMAELSGSRLAAQQQMEGLLAPHRPKEPAWFLATVGVSPDHQGKGLGSAVVLPGVEAAERAGVPAFLETSAPRNLPFYERLGFTVTADVEVPEGPRTWCMTRKPGA

SEQ ID NO: 15771 - protein, 1126 aa, Artificial Sequence
  Synthetic Polypeptide
MALPVTALLLPLALLLHAARPEVQLLESGGGLVQPGGSLRLSCAASGFTFSSYAMSWVRQAPGKGLEWVSSISGSGDYIYYADSVKGRFTISRDISKNTLYLQMNSLRAEDTAVYYCAKEGTGANSSLADYRGQGTLVTVSSGGGSGGGSQVQLVESGGGLVQAGDSVTLSCTASGRTFSSYALAWFRQRPGKEREFVAGLRWGGPTNYADSVKDRFTISGDSAKHTMYLQMNSLKPEDTAVYYCGYNPGGWAVPSQYEYDSWGQGTQVTVSSGTGGGGSGGGGSGGGGSEFDIQMTQSPSSLSASVGDRVTITCKASDHINNWLAWYQQKPGQAPKLLIYGATTLETGVPSRFSGSGSGTDYTLTISSLQPEDFATYYCQQSWNTPWTFGQGTKLEIKRLEDLKNVFPPEVAVFEPSEAEISHTQKATLVCLATGFYPDHVELSWWVNGKEVHSGVSTDPQPLKEQPALNDSRYCLSSRLRVSATFWQNPRNHFRCQVQFYGLSENDEWTQDRAKPVTQIVSAEAWGRADCGFTSESYQQGVLSATILYEILLGKATLYAVLVSALVLMAMVKRKDSRGRAKRSGSGATNFSLLKQAGDVEENPGPTSMDWIWRILFLVGAATGAHSFEQVQLQQPGAELVKPGASVKMSCKASGYAFSSYWINWMKQKPGQGLEWIGQIYPGDGDTNYNGKFKGRATLTADTSSSTAYMQLSSLTSEDSAVYFCARSITTVVGCAMDYWGQGTSVTVSSTRIQNPDPAVYQLRDSKSSDKSVCLFTDFDSQTNVSQSKDSDVYITDKTVLDMRSMDFKSNSAVAWSNKSDFACANAFNNSIIPEDTFFPSPESSCDVKLVEKSFETDTNLNFQNLSVIGFRILLLKVAGFNLLMTLRLWSSRAKRSGSGVKQTLNFDLLKLAGDVESNPGPSRGHMTEYKPTVRLATRDDVPRAVRTLAAAFADYPATRHTVDPDRHIERVTELQELFLTRVGLDIGKVWVADDGAAVAVWTTPESVEAGAVFAEIGPRMAELSGSRLAAQQQMEGLLAPHRPKEPAWFLATVGVSPDHQGKGLGSAVVLPGVEAAERAGVPAFLETSAPRNLPFYERLGFTVTADVEVPEGPRTWCMTRKPGA

SEQ ID NO: 15772 - protein, 1208 aa, Artificial Sequence
  Synthetic Polypeptide
MALPVTALLLPLALLLHAARPEVQLLESGGGLVQPGGSLRLSCAASGFTFSSYAMSWVRQAPGKGLEWVSSISGSGDYIYYADSVKGRFTISRDISKNTLYLQMNSLRAEDTAVYYCAKEGTGANSSLADYRGQGTLVTVSSGGGSGGGSQVQLVESGGGLVQAGDSVTLSCTASGRTFSSYALAWFRQRPGKEREFVAGLRWGGPTNYADSVKDRFTISGDSAKHTMYLQMNSLKPEDTAVYYCGYNPGGWAVPSQYEYDSWGQGTQVTVSSGTGGGGSGGGGSGGGGSEFDIQMTQSPSSLSASVGDRVTITCKASDHINNWLAWYQQKPGQAPKLLIYGATTLETGVPSRFSGSGSGTDYTLTISSLQPEDFATYYCQQSWNTPWTFGQGTKLEIKRLEDLKNVFPPEVAVFEPSEAEISHTQKATLVCLATGFYPDHVELSWWVNGKEVHSGVSTDPQPLKEQPALNDSRYCLSSRLRVSATFWQNPRNHFRCQVQFYGLSENDEWTQDRAKPVTQIVSAEAWGRADCGFTSESYQQGVLSATILYEILLGKATLYAVLVSALVLMAMVKRKDSRGRAKRSGSGATNFSLLKQAGDVEENPGPTSMDWIWRILFLVGAATGAHSFEQVQLQQPGAELVKPGASVKMSCKASGYAFSSYWINWMKQKPGQGLEWIGQIYPGDGDTNYNGKFKGRATLTADTSSSTAYMQLSSLTSEDSAVYFCARSITTVVGCAMDYWGQGTSVTVSSTREQKLISEEDGSGTPFPSLAPPIMLLVDGKQQMVVVCLVLDVAPPGLDSPIWFSAGNGSALDAFTYGPSPATDGTWTNLAHLSLPSEELASWEPLVCHTGPGAEGHSRSTQPMHLSGEASTARTCPQEPLRGTPGGALWLGVLRLLLFKLLLFDLLLTCSCLCDPAGPLPSPATTTRLRALGSHRLHPATETGGREATSSPRPQPRDRRWGDTPPGRKPGSPVRAKRSGSGVKQTLNFDLLKLAGDVESNPGPSRGHMTEYKPTVRLATRDDVPRAVRTLAAAFADYPATRHTVDPDRHIERVTELQELFLTRVGLDIGKVWVADDGAAVAVWTTPESVEAGAVFAEIGPRMAELSGSRLAAQQQMEGLLAPHRPKEPAWFLATVGVSPDHQGKGLGSAVVLPGVEAAERAGVPAFLETSAPRNLPFYERLGFTVTADVEVPEGPRTWCMTRKPGA

SEQ ID NO: 15773 - protein, 1226 aa, Artificial Sequence
  Synthetic Polypeptide
MALPVTALLLPLALLLHAARPLEDLKNVFPPEVAVFEPSEAEISHTQKATLVCLATGFYPDHVELSWWVNGKEVHSGVSTDPQPLKEQPALNDSRYCLSSRLRVSATFWQNPRNHFRCQVQFYGLSENDEWTQDRAKPVTQIVSAEAWGRADCGFTSESYQQGVLSATILYEILLGKATLYAVLVSALVLMAMVKRKDSRGRAKRSGSGATNFSLLKQAGDVEENPGPTSMALPVTALLLPLALLLHAARPEVQLLESGGGLVQPGGSLRLSCAASGFTFSSYAMSWVRQAPGKGLEWVSSISGSGDYIYYADSVKGRFTISRDISKNTLYLQMNSLRAEDTAVYYCAKEGTGANSSLADYRGQGTLVTVSSGGGSGGGSQVQLVESGGGLVQAGDSVTLSCTASGRTFSSYALAWFRQRPGKEREFVAGLRWGGPTNYADSVKDRFTISGDSAKHTMYLQMNSLKPEDTAVYYCGYNPGGWAVPSQYEYDSWGQGTQVTVSSGTGGGGSGGGGSGGGGSEFDIQMTQSPSSLSASVGDRVTITCKASDHINNWLAWYQQKPGQAPKLLIYGATTLETGVPSRFSGSGSGTDYTLTISSLQPEDFATYYCQQSWNTPWTFGQGTKLEIKRGGGGSGGGGSGGGGSQVQLQQPGAELVKPGASVKMSCKASGYAFSSYWINWMKQKPGQGLEWIGQIYPGDGDTNYNGKFKGRATLTADTSSSTAYMQLSSLTSEDSAVYFCARSITTVVGCAMDYWGQGTSVTVSSTREQKLISEEDLGSGTPFPSLAPPIMLLVDGKQQMVVVCLVLDVAPPGLDSPIWFSAGNGSALDAFTYGPSPATDGTWTNLAHLSLPSEELASWEPLVCHTGPGAEGHSRSTQPMHLSGEASTARTCPQEPLRGTPGGALWLGVLRLLLFKLLLFDLLLTCSCLCDPAGPLPSPATTTRLRALGSHRLHPATETGGREATSSPRPQPRDRRWGDTPPGRKPGSPVRAKRSGSGVKQTLNFDLLKLAGDVESNPGPSRSRGHMTEYKPTVRLATRDDVPRAVRTLAAAFADYPATRHTVDPDRHIERVTELQELFLTRVGLDIGKVWVADDGAAVAVWTTPESVEAGAVFAEIGPRMAELSGSRLAAQQQMEGLLAPHRPKEPAWFLATVGVSPDHQGKGLGSAVVLPGVEAAERAGVPAFLETSAPRNLPFYERLGFTVTADVEVPEGPRTWCMTRKPGA

SEQ ID NO: 15774 - protein, 1163 aa, Artificial Sequence
  Synthetic Polypeptide
MALPVTALLLPLALLLHAARPEVQLLESGGGLVQPGGSLRLSCAASGFTFSSYAMSWVRQAPGKGLEWVSSISGSGDYIYYADSVKGRFTISRDISKNTLYLQMNSLRAEDTAVYYCAKEGTGANSSLADYRGQGTLVTVSSGGGSGGGSQVQLVESGGGLVQAGDSVTLSCTASGRTFSSYALAWFRQRPGKEREFVAGLRWGGPTNYADSVKDRFTISGDSAKHTMYLQMNSLKPEDTAVYYCGYNPGGWAVPSQYEYDSWGQGTQVTVSSGTGGGGSGGGGSGGGGSEFDIQMTQSPSSLSASVGDRVTITCKASDHINNWLAWYQQKPGQAPKLLIYGATTLETGVPSRFSGSGSGTDYTLTISSLQPEDFATYYCQQSWNTPWTFGQGTKLEIKRLEGKPIPNPLLGLDSTGSGDKQLDADVSPKPTIFLPSIAETKLQKAGTYLCLLEKFFPDVIKIHWQEKKSNTILGSQEGNTMKTNDTYMKFSWLTVPEKSLDKEHRCIVRHENNKNGVDQEIIFPPIKTDVITMDPKDNCSKDANDTLLLQLTNTSAYYMYLLLLLKSVVYFAIITCCLLRRTAFCCNGEKSRAKRSGSGATNFSLLKQAGDVEENPGPTSMDWIWRILFLVGAATGAHSFEQVQLQQPGAELVKPGASVKMSCKASGYAFSSYWINWMKQKPGQGLEWIGQIYPGDGDTNYNGKFKGRATLTADTSSSTAYMQLSSLTSEDSAVYFCARSITTVVGCAMDYWGQGTSVTVSSTREQKLISEEDGSGSQPHTKPSVFVMKNGTNVACLVKEFYPKDIRINLVSSKKITEFDPAIVISPSGKYNAVKLGKYEDSNSVTCSVQHDNKTVHSTDFEVKTDSTDHVKPKETENTKQPSKSCHKPKAIVHTEKVNMMSLTVLGLRMLFAKTVAVNFLLTAKLFFLRAKRSGSGVKQTLNFDLLKLAGDVESNPGPSRGHMTEYKPTVRLATRDDVPRAVRTLAAAFADYPATRHTVDPDRHIERVTELQELFLTRVGLDIGKVWVADDGAAVAVWTTPESVEAGAVFAEIGPRMAELSGSRLAAQQQMEGLLAPHRPKEPAWFLATVGVSPDHQGKGLGSAVVLPGVEAAERAGVPAFLETSAPRNLPFYERLGFTVTADVEVPEGPRTWCMTRKPGA

SEQ ID NO: 15775 - protein, 901 aa, Artificial Sequence
  Synthetic Polypeptide
MALPVTALLLPLALLLHAARPEVQLLESGGGLVQPGGSLRLSCAASGFTFSSYAMSWVRQAPGKGLEWVSSISGSGDYIYYADSVKGRFTISRDISKNTLYLQMNSLRAEDTAVYYCAKEGTGANSSLADYRGQGTLVTVSSGGGSGGGSQVQLVESGGGLVQAGDSVTLSCTASGRTFSSYALAWFRQRPGKEREFVAGLRWGGPTNYADSVKDRFTISGDSAKHTMYLQMNSLKPEDTAVYYCGYNPGGWAVPSQYEYDSWGQGTQVTVSSGTGGGGSGGGGSGGGGSEFDIQMTQSPSSLSASVGDRVTITCKASDHINNWLAWYQQKPGQAPKLLIYGATTLETGVPSRFSGSGSGTDYTLTISSLQPEDFATYYCQQSWNTPWTFGQGTKLEIKRLESQPHTKPSVFVMKNGTNVACLVKEFYPKDIRINLVSSKKITEFDPAIVISPSGKYNAVKLGKYEDSNSVTCSVQHDNKTVHSTDFEVKTDSTDHVKPKETENTKQPSKSCHKPKAIVHTEKVNMMSLTVLGLRMLFAKTVAVNFLLTAKLFFLRAKRSGSGATNFSLLKQAGDVEENPGPTSMDWIWRILFLVGAATGAHSFEQVQLQQPGAELVKPGASVKMSCKASGYAFSSYWINWMKQKPGQGLEWIGQIYPGDGDTNYNGKFKGRATLTADTSSSTAYMQLSSLTSEDSAVYFCARSITTVVGCAMDYWGQGTSVTVSSTRDKQLDADVSPKPTIFLPSIAETKLQKAGTYLCLLEKFFPDVIKIHWQEKKSNTILGSQEGNTMKTNDTYMKFSWLTVPEKSLDKEHRCIVRHENNKNGVDQEIIFPPIKTDVITMDPKDNCSKDANDTLLLQLTNTSAYYMYLLLLLKSVVYFAIITCCLLRRTAFCCNGEKS

SEQ ID NO: 15776 - protein, 1178 aa, Artificial Sequence
  Synthetic Polypeptide
MALPVTALLLPLALLLHAARPLEGKPIPNPLLGLDSTGSGDKQLDADVSPKPTIFLPSIAETKLQKAGTYLCLLEKFFPDVIKIHWQEKKSNTILGSQEGNTMKTNDTYMKFSWLTVPEKSLDKEHRCIVRHENNKNGVDQEIIFPPIKTDVITMDPKDNCSKDANDTLLLQLTNTSAYYMYLLLLLKSVVYFAIITCCLLRRTAFCCNGEKSRAKRSGSGATNFSLLKQAGDVEENPGPTSMALPVTALLLPLALLLHAARPEVQLLESGGGLVQPGGSLRLSCAASGFTFSSYAMSWVRQAPGKGLEWVSSISGSGDYIYYADSVKGRFTISRDISKNTLYLQMNSLRAEDTAVYYCAKEGTGANSSLADYRGQGTLVTVSSGGGSGGGSQVQLVESGGGLVQAGDSVTLSCTASGRTFSSYALAWFRQRPGKEREFVAGLRWGGPTNYADSVKDRFTISGDSAKHTMYLQMNSLKPEDTAVYYCGYNPGGWAVPSQYEYDSWGQGTQVTVSSGTGGGGSGGGGSGGGGSEFDIQMTQSPSSLSASVGDRVTITCKASDHINNWLAWYQQKPGQAPKLLIYGATTLETGVPSRFSGSGSGTDYTLTISSLQPEDFATYYCQQSWNTPWTFGQGTKLEIKRGGGGSGGGGSGGGGSQVQLQQPGAELVKPGASVKMSCKASGYAFSSYWINWMKQKPGQGLEWIGQIYPGDGDTNYNGKFKGRATLTADTSSSTAYMQLSSLTSEDSAVYFCARSITTVVGCAMDYWGQGTSVTVSSTREQKLISEEDGSGSQPHTKPSVFVMKNGTNVACLVKEFYPKDIRINLVSSKKITEFDPAIVISPSGKYNAVKLGKYEDSNSVTCSVQHDNKTVHSTDFEVKTDSTDHVKPKETENTKQPSKSCHKPKAIVHTEKVNMMSLTVLGLRMLFAKTVAVNFLLTAKLFFLRAKRSGSGVKQTLNFDLLKLAGDVESNPGPSRGHMTEYKPTVRLATRDDVPRAVRTLAAAFADYPATRHTVDPDRHIERVTELQELFLTRVGLDIGKVWVADDGAAVAVWTTPESVEAGAVFAEIGPRMAELSGSRLAAQQQMEGLLAPHRPKEPAWFLATVGVSPDHQGKGLGSAVVLPGVEAAERAGVPAFLETSAPRNLPFYERLGFTVTADVEVPEGPRTWCMTRKPGA

SEQ ID NO: 15777 - protein, 1303 aa, Artificial Sequence
  Synthetic Polypeptide
MALPVTALLLPLALLLHAARPEVQLLESGGGLVQPGGSLRLSCAASGFTFSSYAMSWVRQAPGKGLEWVSSISGSGDYIYYADSVKGRFTISRDISKNTLYLQMNSLRAEDTAVYYCAKEGTGANSSLADYRGQGTLVTVSSGGGSGGGSQVQLVESGGGLVQAGDSVTLSCTASGRTFSSYALAWFRQRPGKEREFVAGLRWGGPTNYADSVKDRFTISGDSAKHTMYLQMNSLKPEDTAVYYCGYNPGGWAVPSQYEYDSWGQGTQVTVSSGTGGGGSGGGGSGGGGSEFDIQMTQSPSSLSASVGDRVTITCKASDHINNWLAWYQQKPGQAPKLLIYGATTLETGVPSRFSGSGSGTDYTLTISSLQPEDFATYYCQQSWNTPWTFGQGTKLEIKRGQPKANPTVTLFPPSSEELQANKATLVCLISDFYPGAVTVAWKADGSPVKAGVETTKPSKQSNNKYAASSYLSLTPEQWKSHRSYSCQVTHEGSTVEKTVAPTECSGSQSFGLLDPKLCYLLDGILFIYGVILTALFLRVKFSRSADAPAYQQGQNQLYNELNLGRREEYDVLDKRRGRDPEMGGKPQRRKNPQEGLYNELQKDKMAEAYSEIGMKGERRRGKGHDGLYQGLSTATKDTYDALHMQALPPRRAKRSGSGATNFSLLKQAGDVEENPGPTSMDWIWRILFLVGAATGAHSFEQVQLQQPGAELVKPGASVKMSCKASGYAFSSYWINWMKQKPGQGLEWIGQIYPGDGDTNYNGKFKGRATLTADTSSSTAYMQLSSLTSEDSAVYFCARSITTVVGCAMDYWGQGTSVTVSSASTKGPSVFPLAPSSKSTSGGTAALGCLVKDYFPEPVTVSWNSGALTSGVHTFPAVLQSSGLYSLSSVVTVPSSSLGTQTYICNVNHKPSNTKVDKRVEPKSCGTQSFGLLDPKLCYLLDGILFIYGVILTALFLRVKFSRSADAPAYQQGQNQLYNELNLGRREEYDVLDKRRGRDPEMGGKPQRRKNPQEGLYNELQKDKMAEAYSEIGMKGERRRGKGHDGLYQGLSTATKDTYDALHMQALPPRRAKRSGSGVKQTLNFDLLKLAGDVESNPGPSRGHMTEYKPTVRLATRDDVPRAVRTLAAAFADYPATRHTVDPDRHIERVTELQELFLTRVGLDIGKVWVADDGAAVAVWTTPESVEAGAVFAEIGPRMAELSGSRLAAQQQMEGLLAPHRPKEPAWFLATVGVSPDHQGKGLGSAVVLPGVEAAERAGVPAFLETSAPRNLPFYERLGFTVTADVEVPEGPRTWCMTRKPGA

SEQ ID NO: 15778 - protein, 1089 aa, Artificial Sequence
  Synthetic Polypeptide
MALPVTALLLPLALLLHAARPEVQLLESGGGLVQPGGSLRLSCAASGFTFSSYAMSWVRQAPGKGLEWVSSISGSGDYIYYADSVKGRFTISRDISKNTLYLQMNSLRAEDTAVYYCAKEGTGANSSLADYRGQGTLVTVSSGGGSGGGSQVQLVESGGGLVQAGDSVTLSCTASGRTFSSYALAWFRQRPGKEREFVAGLRWGGPTNYADSVKDRFTISGDSAKHTMYLQMNSLKPEDTAVYYCGYNPGGWAVPSQYEYDSWGQGTQVTVSSGTGGGGSGGGGSGGGGSEFDIQMTQSPSSLSASVGDRVTITCKASDHINNWLAWYQQKPGQAPKLLIYGATTLETGVPSRFSGSGSGTDYTLTISSLQPEDFATYYCQQSWNTPWTFGQGTKLEIKRLEDLKNVFPPEVAVFEPSEAEISHTQKATLVCLATGFYPDHVELSWWVNGKEVHSGVSTDPQPLKEQPALNDSRYCLSSRLRVSATFWQNPRNHFRCQVQFYGLSENDEWTQDRAKPVTQIVSAEAWGRADCGSQSFGLLDPKLCYLLDGILFIYGVILTALFLRVKFSRSADAPAYQQGQNQLYNELNLGRREEYDVLDKRRGRDPEMGGKPQRRKNPQEGLYNELQKDKMAEAYSEIGMKGERRRGKGHDGLYQGLSTATKDTYDALHMQALPPRRAKRSGSGATNFSLLKQAGDVEENPGPTSMDWIWRILFLVGAATGAHSFEQVQLQQPGAELVKPGASVKMSCKASGYAFSSYWINWMKQKPGQGLEWIGQIYPGDGDTNYNGKFKGRATLTADTSSSTAYMQLSSLTSEDSAVYFCARSITTVVGCAMDYWGQGTSVTVSSTRIQNPDPAVYQLRDSKSSDKSVCLFTDFDSQTNVSQSKDSDVYITDKTVLDMRSMDFKSNSAVAWSNKSDFACANAFNNSIIPEDTFFPSPESSCGTQSFGLLDPKLCYLLDGILFIYGVILTALFLRVKFSRSADAPAYQQGQNQLYNELNLGRREEYDVLDKRRGRDPEMGGKPQRRKNPQEGLYNELQKDKMAEAYSEIGMKGERRRGKGHDGLYQGLSTATKDTYDALHMQALPPR

SEQ ID NO: 15779 - protein, 1089 aa, Artificial Sequence
  Synthetic Polypeptide
MALPVTALLLPLALLLHAARPEVQLLESGGGLVQPGGSLRLSCAASGFTFSSYAMSWVRQAPGKGLEWVSSISGSGDYIYYADSVKGRFTISRDISKNTLYLQMNSLRAEDTAVYYCAKEGTGANSSLADYRGQGTLVTVSSGGGSGGGSQVQLVESGGGLVQAGDSVTLSCTASGRTFSSYALAWFRQRPGKEREFVAGLRWGGPTNYADSVKDRFTISGDSAKHTMYLQMNSLKPEDTAVYYCGYNPGGWAVPSQYEYDSWGQGTQVTVSSGTGGGGSGGGGSGGGGSEFDIQMTQSPSSLSASVGDRVTITCKASDHINNWLAWYQQKPGQAPKLLIYGATTLETGVPSRFSGSGSGTDYTLTISSLQPEDFATYYCQQSWNTPWTFGQGTKLEIKRLEDLKNVFPPEVAVFEPSKAEIAHTQKATLVCLATGFYPDHVELSWWVNGKEVHSGVCTDPQPLKEQPALNDSRYCLSSRLRVSATFWQNPRNHFRCQVQFYGLSENDEWTQDRAKPVTQIVSAEAWGRADCGSQSFGLLDPKLCYLLDGILFIYGVILTALFLRVKFSRSADAPAYQQGQNQLYNELNLGRREEYDVLDKRRGRDPEMGGKPQRRKNPQEGLYNELQKDKMAEAYSEIGMKGERRRGKGHDGLYQGLSTATKDTYDALHMQALPPRRAKRSGSGATNFSLLKQAGDVEENPGPTSMDWIWRILFLVGAATGAHSFEQVQLQQPGAELVKPGASVKMSCKASGYAFSSYWINWMKQKPGQGLEWIGQIYPGDGDTNYNGKFKGRATLTADTSSSTAYMQLSSLTSEDSAVYFCARSITTVVGCAMDYWGQGTSVTVSSTRIQNPDPAVYQLRDSKSSDKSVCLFTDFDSQTNVSQSKDSDVYITDKCVLDMRSMDFKSNSAVAWSNKSDFACANAFNNSIIPEDTFFPSSDVPCGTQSFGLLDPKLCYLLDGILFIYGVILTALFLRVKFSRSADAPAYQQGQNQLYNELNLGRREEYDVLDKRRGRDPEMGGKPQRRKNPQEGLYNELQKDKMAEAYSEIGMKGERRRGKGHDGLYQGLSTATKDTYDALHMQALPPR

SEQ ID NO: 15780 - protein, 1160 aa, Artificial Sequence
  Synthetic Polypeptide
MALPVTALLLPLALLLHAARPEVQLLESGGGLVQPGGSLRLSCAASGFTFSSYAMSWVRQAPGKGLEWVSSISGSGDYIYYADSVKGRFTISRDISKNTLYLQMNSLRAEDTAVYYCAKEGTGANSSLADYRGQGTLVTVSSGGGSGGGSQVQLVESGGGLVQAGDSVTLSCTASGRTFSSYALAWFRQRPGKEREFVAGLRWGGPTNYADSVKDRFTISGDSAKHTMYLQMNSLKPEDTAVYYCGYNPGGWAVPSQYEYDSWGQGTQVTVSSGTGGGGSGGGGSGGGGSEFDIQMTQSPSSLSASVGDRVTITCKASDHINNWLAWYQQKPGQAPKLLIYGATTLETGVPSRFSGSGSGTDYTLTISSLQPEDFATYYCQQSWNTPWTFGQGTKLEIKRLEGKPIPNPLLGLDSTGSGEDLKNVFPPEVAVFEPSEAEISHTQKATLVCLATGFYPDHVELSWWVNGKEVHSGVSTDPQPLKEQPALNDSRYCLSSRLRVSATFWQNPRNHFRCQVQFYGLSENDEWTQDRAKPVTQIVSAEAWGRADCGSQSFGLLDPKLCYLLDGILFIYGVILTALFLRVKFSRSADAPAYQQGQNQLYNELNLGRREEYDVLDKRRGRDPEMGGKPQRRKNPQEGLYNELQKDKMAEAYSEIGMKGERRRGKGHDGLYQGLSTATKDTYDALHMQALPPRRAKRSGSGATNFSLLKQAGDVEENPGPTSMDWIWRILFLVGAATGAHSFEQVQLQQPGAELVKPGASVKMSCKASGYAFSSYWINWMKQKPGQGLEWIGQIYPGDGDTNYNGKFKGRATLTADTSSSTAYMQLSSLTSEDSAVYFCARSITTVVGCAMDYWGQGTSVTVSSTREQKLISEEDGSGIQNPDPAVYQLRDSKSSDKSVCLFTDFDSQTNVSQSKDSDVYITDKTVLDMRSMDFKSNSAVAWSNKSDFACANAFNNSIIPEDTFFPSPESSCGTQSFGLLDPKLCYLLDGILFIYGVILTALFLRSKRSRLLHSDYMNMTPRRPGPTRKHYQPYAPPRDFAAYRSRVKFSRSADAPAYQQGQNQLYNELNLGRREEYDVLDKRRGRDPEMGGKPQRRKNPQEGLYNELQKDKMAEAYSEIGMKGERRRGKGHDGLYQGLSTATKDTYDALHMQALPPR

SEQ ID NO: 15781 - protein, 1201 aa, Artificial Sequence
  Synthetic Polypeptide
MALPVTALLLPLALLLHAARPEVQLLESGGGLVQPGGSLRLSCAASGFTFSSYAMSWVRQAPGKGLEWVSSISGSGDYIYYADSVKGRFTISRDISKNTLYLQMNSLRAEDTAVYYCAKEGTGANSSLADYRGQGTLVTVSSGGGSGGGSQVQLVESGGGLVQAGDSVTLSCTASGRTFSSYALAWFRQRPGKEREFVAGLRWGGPTNYADSVKDRFTISGDSAKHTMYLQMNSLKPEDTAVYYCGYNPGGWAVPSQYEYDSWGQGTQVTVSSGTGGGGSGGGGSGGGGSEFDIQMTQSPSSLSASVGDRVTITCKASDHINNWLAWYQQKPGQAPKLLIYGATTLETGVPSRFSGSGSGTDYTLTISSLQPEDFATYYCQQSWNTPWTFGQGTKLEIKRLEGKPIPNPLLGLDSTGSGEDLKNVFPPEVAVFEPSEAEISHTQKATLVCLATGFYPDHVELSWWVNGKEVHSGVSTDPQPLKEQPALNDSRYCLSSRLRVSATFWQNPRNHFRCQVQFYGLSENDEWTQDRAKPVTQIVSAEAWGRADCGSQSFGLLDPKLCYLLDGILFIYGVILTALFLRSKRSRLLHSDYMNMTPRRPGPTRKHYQPYAPPRDFAAYRSRVKFSRSADAPAYQQGQNQLYNELNLGRREEYDVLDKRRGRDPEMGGKPQRRKNPQEGLYNELQKDKMAEAYSEIGMKGERRRGKGHDGLYQGLSTATKDTYDALHMQALPPRRAKRSGSGATNFSLLKQAGDVEENPGPTSMDWIWRILFLVGAATGAHSFEQVQLQQPGAELVKPGASVKMSCKASGYAFSSYWINWMKQKPGQGLEWIGQIYPGDGDTNYNGKFKGRATLTADTSSSTAYMQLSSLTSEDSAVYFCARSITTVVGCAMDYWGQGTSVTVSSTREQKLISEEDGSGIQNPDPAVYQLRDSKSSDKSVCLFTDFDSQTNVSQSKDSDVYITDKTVLDMRSMDFKSNSAVAWSNKSDFACANAFNNSIIPEDTFFPSPESSCGTQSFGLLDPKLCYLLDGILFIYGVILTALFLRSKRSRLLHSDYMNMTPRRPGPTRKHYQPYAPPRDFAAYRSRVKFSRSADAPAYQQGQNQLYNELNLGRREEYDVLDKRRGRDPEMGGKPQRRKNPQEGLYNELQKDKMAEAYSEIGMKGERRRGKGHDGLYQGLSTATKDTYDALHMQALPPR

SEQ ID NO: 15782 - protein, 1162 aa, Artificial Sequence
  Synthetic Polypeptide
MALPVTALLLPLALLLHAARPEVQLLESGGGLVQPGGSLRLSCAASGFTFSSYAMSWVRQAPGKGLEWVSSISGSGDYIYYADSVKGRFTISRDISKNTLYLQMNSLRAEDTAVYYCAKEGTGANSSLADYRGQGTLVTVSSGGGSGGGSQVQLVESGGGLVQAGDSVTLSCTASGRTFSSYALAWFRQRPGKEREFVAGLRWGGPTNYADSVKDRFTISGDSAKHTMYLQMNSLKPEDTAVYYCGYNPGGWAVPSQYEYDSWGQGTQVTVSSGTGGGGSGGGGSGGGGSEFDIQMTQSPSSLSASVGDRVTITCKASDHINNWLAWYQQKPGQAPKLLIYGATTLETGVPSRFSGSGSGTDYTLTISSLQPEDFATYYCQQSWNTPWTFGQGTKLEIKRLEGKPIPNPLLGLDSTGSGEDLKNVFPPEVAVFEPSEAEISHTQKATLVCLATGFYPDHVELSWWVNGKEVHSGVSTDPQPLKEQPALNDSRYCLSSRLRVSATFWQNPRNHFRCQVQFYGLSENDEWTQDRAKPVTQIVSAEAWGRADCGSQSFGLLDPKLCYLLDGILFIYGVILTALFLRVKFSRSADAPAYQQGQNQLYNELNLGRREEYDVLDKRRGRDPEMGGKPQRRKNPQEGLYNELQKDKMAEAYSEIGMKGERRRGKGHDGLYQGLSTATKDTYDALHMQALPPRRAKRSGSGATNFSLLKQAGDVEENPGPTSMDWIWRILFLVGAATGAHSFEQVQLQQPGAELVKPGASVKMSCKASGYAFSSYWINWMKQKPGQGLEWIGQIYPGDGDTNYNGKFKGRATLTADTSSSTAYMQLSSLTSEDSAVYFCARSITTVVGCAMDYWGQGTSVTVSSTREQKLISEEDLGSGIQNPDPAVYQLRDSKSSDKSVCLFTDFDSQTNVSQSKDSDVYITDKTVLDMRSMDFKSNSAVAWSNKSDFACANAFNNSIIPEDTFFPSPESSCGTQSFGLLDPKLCYLLDGILFIYGVILTALFLKRGRKKLLYIFKQPFMRPVQTTQEEDGCSCRFPEEEEGGCELRVKFSRSADAPAYQQGQNQLYNELNLGRREEYDVLDKRRGRDPEMGGKPQRRKNPQEGLYNELQKDKMAEAYSEIGMKGERRRGKGHDGLYQGLSTATKDTYDALHMQALPPR

SEQ ID NO: 15783 - protein, 1204 aa, Artificial Sequence
  Synthetic Polypeptide
MALPVTALLLPLALLLHAARPEVQLLESGGGLVQPGGSLRLSCAASGFTFSSYAMSWVRQAPGKGLEWVSSISGSGDYIYYADSVKGRFTISRDISKNTLYLQMNSLRAEDTAVYYCAKEGTGANSSLADYRGQGTLVTVSSGGGSGGGSQVQLVESGGGLVQAGDSVTLSCTASGRTFSSYALAWFRQRPGKEREFVAGLRWGGPTNYADSVKDRFTISGDSAKHTMYLQMNSLKPEDTAVYYCGYNPGGWAVPSQYEYDSWGQGTQVTVSSGTGGGGSGGGGSGGGGSEFDIQMTQSPSSLSASVGDRVTITCKASDHINNWLAWYQQKPGQAPKLLIYGATTLETGVPSRFSGSGSGTDYTLTISSLQPEDFATYYCQQSWNTPWTFGQGTKLEIKRLEGKPIPNPLLGLDSTGSGEDLKNVFPPEVAVFEPSEAEISHTQKATLVCLATGFYPDHVELSWWVNGKEVHSGVSTDPQPLKEQPALNDSRYCLSSRLRVSATFWQNPRNHFRCQVQFYGLSENDEWTQDRAKPVTQIVSAEAWGRADCGSQSFGLLDPKLCYLLDGILFIYGVILTALFLKRGRKKLLYIFKQPFMRPVQTTQEEDGCSCRFPEEEEGGCELRVKFSRSADAPAYQQGQNQLYNELNLGRREEYDVLDKRRGRDPEMGGKPQRRKNPQEGLYNELQKDKMAEAYSEIGMKGERRRGKGHDGLYQGLSTATKDTYDALHMQALPPRRAKRSGSGATNFSLLKQAGDVEENPGPTSMDWIWRILFLVGAATGAHSFEQVQLQQPGAELVKPGASVKMSCKASGYAFSSYWINWMKQKPGQGLEWIGQIYPGDGDTNYNGKFKGRATLTADTSSSTAYMQLSSLTSEDSAVYFCARSITTVVGCAMDYWGQGTSVTVSSTREQKLISEEDLGSGIQNPDPAVYQLRDSKSSDKSVCLFTDFDSQTNVSQSKDSDVYITDKTVLDMRSMDFKSNSAVAWSNKSDFACANAFNNSIIPEDTFFPSPESSCGTQSFGLLDPKLCYLLDGILFIYGVILTALFLKRGRKKLLYIFKQPFMRPVQTTQEEDGCSCRFPEEEEGGCELRVKFSRSADAPAYQQGQNQLYNELNLGRREEYDVLDKRRGRDPEMGGKPQRRKNPQEGLYNELQKDKMAEAYSEIGMKGERRRGKGHDGLYQGLSTATKDTYDALHMQALPPR

SEQ ID NO: 15784 - protein, 1094 aa, Artificial Sequence
  Synthetic Polypeptide
MALPVTALLLPLALLLHAARPEVQLLESGGGLVQPGGSLRLSCAASGFTFSSYAMSWVRQAPGKGLEWVSSISGSGDYIYYADSVKGRFTISRDISKNTLYLQMNSLRAEDTAVYYCAKEGTGANSSLADYRGQGTLVTVSSGGGSGGGSQVQLVESGGGLVQAGDSVTLSCTASGRTFSSYALAWFRQRPGKEREFVAGLRWGGPTNYADSVKDRFTISGDSAKHTMYLQMNSLKPEDTAVYYCGYNPGGWAVPSQYEYDSWGQGTQVTVSSGTGGGGSGGGGSGGGGSEFDIQMTQSPSSLSASVGDRVTITCKASDHINNWLAWYQQKPGQAPKLLIYGATTLETGVPSRFSGSGSGTDYTLTISSLQPEDFATYYCQQSWNTPWTFGQGTKLEIKRLEQSFGLLDPKLCYLLDGILFIYGVILTALFLRVKFSRSADAPAYQQGQNQLYNELNLGRREEYDVLDKRRGRDPEMGGKPQRRKNPQEGLYNELQKDKMAEAYSEIGMKGERRRGKGHDGLYQGLSTATKDTYDALHMQALPPRRAKRSGSGATNFSLLKQAGDVEENPGPTSMDWIWRILFLVGAATGAHSFEQVQLQQPGAELVKPGASVKMSCKASGYAFSSYWINWMKQKPGQGLEWIGQIYPGDGDTNYNGKFKGRATLTADTSSSTAYMQLSSLTSEDSAVYFCARSITTVVGCAMDYWGQGTSVTVSSTRQSFGLLDPKLCYLLDGILFIYGVILTALFLRVKFSRSADAPAYQQGQNQLYNELNLGRREEYDVLDKRRGRDPEMGGKPQRRKNPQEGLYNELQKDKMAEAYSEIGMKGERRRGKGHDGLYQGLSTATKDTYDALHMQALPPRRAKRSGSGVKQTLNFDLLKLAGDVESNPGPSRGHMTEYKPTVRLATRDDVPRAVRTLAAAFADYPATRHTVDPDRHIERVTELQELFLTRVGLDIGKVWVADDGAAVAVWTTPESVEAGAVFAEIGPRMAELSGSRLAAQQQMEGLLAPHRPKEPAWFLATVGVSPDHQGKGLGSAVVLPGVEAAERAGVPAFLETSAPRNLPFYERLGFTVTADVEVPEGPRTWCMTRKPGA

SEQ ID NO: 15785 - protein, 919 aa, Artificial Sequence
  Synthetic Polypeptide
MALPVTALLLPLALLLHAARPEVQLLESGGGLVQPGGSLRLSCAASGFTFSSYAMSWVRQAPGKGLEWVSSISGSGDYIYYADSVKGRFTISRDISKNTLYLQMNSLRAEDTAVYYCAKEGTGANSSLADYRGQGTLVTVSSGGGSGGGSQVQLVESGGGLVQAGDSVTLSCTASGRTFSSYALAWFRQRPGKEREFVAGLRWGGPTNYADSVKDRFTISGDSAKHTMYLQMNSLKPEDTAVYYCGYNPGGWAVPSQYEYDSWGQGTQVTVSSGTGGGGSGGGGSGGGGSEFDIQMTQSPSSLSASVGDRVTITCKASDHINNWLAWYQQKPGQAPKLLIYGATTLETGVPSRFSGSGSGTDYTLTISSLQPEDFATYYCQQSWNTPWTFGQGTKLEIKRLEGQPKANPTVTLFPPSSEELQANKATLVCLISDFYPGAVTVAWKADGSPVKAGVETTKPSKQSNNKYAASSYLSLTPEQWKSHRSYSCQVTHEGSTVEKTVAPTECSPIKTDVITMDPKDNCSKDANDTLLLQLTNTSAYYMYLLLLLKSVVYFAIITCCLLRRTAFCCNGEKSRAKRSGSGATNFSLLKQAGDVEENPGPTSMDWIWRILFLVGAATGAHSFEQVQLQQPGAELVKPGASVKMSCKASGYAFSSYWINWMKQKPGQGLEWIGQIYPGDGDTNYNGKFKGRATLTADTSSSTAYMQLSSLTSEDSAVYFCARSITTVVGCAMDYWGQGTSVTVSSTRASTKGPSVFPLAPSSKSTSGGTAALGCLVKDYFPEPVTVSWNSGALTSGVHTFPAVLQSSGLYSLSSVVTVPSSSLGTQTYICNVNHKPSNTKVDKRVEPKSCEVKTDSTDHVKPKETENTKQPSKSCHKPKAIVHTEKVNMMSLTVLGLRMLFAKTVAVNFLLTAKLFFL

SEQ ID NO: 15786 - protein, 897 aa, Artificial Sequence
  Synthetic Polypeptide
MALPVTALLLPLALLLHAARPEVQLLESGGGLVQPGGSLRLSCAASGFTFSSYAMSWVRQAPGKGLEWVSSISGSGDYIYYADSVKGRFTISRDISKNTLYLQMNSLRAEDTAVYYCAKEGTGANSSLADYRGQGTLVTVSSGGGSGGGSQVQLVESGGGLVQAGDSVTLSCTASGRTFSSYALAWFRQRPGKEREFVAGLRWGGPTNYADSVKDRFTISGDSAKHTMYLQMNSLKPEDTAVYYCGYNPGGWAVPSQYEYDSWGQGTQVTVSSGTGGGGSGGGGSGGGGSEFDIQMTQSPSSLSASVGDRVTITCKASDHINNWLAWYQQKPGQAPKLLIYGATTLETGVPSRFSGSGSGTDYTLTISSLQPEDFATYYCQQSWNTPWTFGQGTKLEIKRLEGQPKANPTVTLFPPSSEELQANKATLVCLISDFYPGAVTVAWKADGSPVKAGVETTKPSKQSNNKYAASSYLSLTPEQWKSHRSYSCQVTHEGSTVEKTVAPTECSGRADCGITSASYHQGVLSATILYEILLGKATLYAVLVSALVLMAMVKRKDSRGRAKRSGSGATNFSLLKQAGDVEENPGPTSMDWIWRILFLVGAATGAHSFEQVQLQQPGAELVKPGASVKMSCKASGYAFSSYWINWMKQKPGQGLEWIGQIYPGDGDTNYNGKFKGRATLTADTSSSTAYMQLSSLTSEDSAVYFCARSITTVVGCAMDYWGQGTSVTVSSTRASTKGPSVFPLAPSSKSTSGGTAALGCLVKDYFPEPVTVSWNSGALTSGVHTFPAVLQSSGLYSLSSVVTVPSSSLGTQTYICNVNHKPSNTKVDKRVEPKSCIPEDTFFPSSDVPCDVKLVEKSFETDTNLNFQNLSVIGFRILLLKVAGFNLLMTLRLWSS

SEQ ID NO: 15787 - protein, 897 aa, Artificial Sequence
  Synthetic Polypeptide
MALPVTALLLPLALLLHAARPEVQLLESGGGLVQPGGSLRLSCAASGFTFSSYAMSWVRQAPGKGLEWVSSISGSGDYIYYADSVKGRFTISRDISKNTLYLQMNSLRAEDTAVYYCAKEGTGANSSLADYRGQGTLVTVSSGGGSGGGSQVQLVESGGGLVQAGDSVTLSCTASGRTFSSYALAWFRQRPGKEREFVAGLRWGGPTNYADSVKDRFTISGDSAKHTMYLQMNSLKPEDTAVYYCGYNPGGWAVPSQYEYDSWGQGTQVTVSSGTGGGGSGGGGSGGGGSEFDIQMTQSPSSLSASVGDRVTITCKASDHINNWLAWYQQKPGQAPKLLIYGATTLETGVPSRFSGSGSGTDYTLTISSLQPEDFATYYCQQSWNTPWTFGQGTKLEIKRLEGQPKANPTVTLFPPSSEELQANKATLVCLISDFYPGAVTVAWKADGSPVKAGVETTKPSKQSNNKYAASSYLSLTPEQWKSHRSYSCQVTHEGSTVEKTVAPTECSGRADCGFTSESYQQGVLSATILYEILLGKATLYAVLVSALVLMAMVKRKDSRGRAKRSGSGATNFSLLKQAGDVEENPGPTSMDWIWRILFLVGAATGAHSFEQVQLQQPGAELVKPGASVKMSCKASGYAFSSYWINWMKQKPGQGLEWIGQIYPGDGDTNYNGKFKGRATLTADTSSSTAYMQLSSLTSEDSAVYFCARSITTVVGCAMDYWGQGTSVTVSSTRASTKGPSVFPLAPSSKSTSGGTAALGCLVKDYFPEPVTVSWNSGALTSGVHTFPAVLQSSGLYSLSSVVTVPSSSLGTQTYICNVNHKPSNTKVDKRVEPKSCIPEDTFFPSPESSCDVKLVEKSFETDTNLNFQNLSVIGFRILLLKVAGFNLLMTLRLWSS

SEQ ID NO: 15788 - protein, 723 aa, Artificial Sequence
  Synthetic Polypeptide
MALPVTALLLPLALLLHAARPEVQLLESGGGLVQPGGSLRLSCAASGFTFSSYAMSWVRQAPGKGLEWVSSISGSGDYIYYADSVKGRFTISRDISKNTLYLQMNSLRAEDTAVYYCAKEGTGANSSLADYRGQGTLVTVSSGGGSGGGSQVQLVESGGGLVQAGDSVTLSCTASGRTFSSYALAWFRQRPGKEREFVAGLRWGGPTNYADSVKDRFTISGDSAKHTMYLQMNSLKPEDTAVYYCGYNPGGWAVPSQYEYDSWGQGTQVTVSSGTGGGGSGGGGSGGGGSEFDIQMTQSPSSLSASVGDRVTITCKASDHINNWLAWYQQKPGQAPKLLIYGATTLETGVPSRFSGSGSGTDYTLTISSLQPEDFATYYCQQSWNTPWTFGQGTKLEIKRGGGGSGGGGSGGGGSQVQLQQPGAELVKPGASVKMSCKASGYAFSSYWINWMKQKPGQGLEWIGQIYPGDGDTNYNGKFKGRATLTADTSSSTAYMQLSSLTSEDSAVYFCARSITTVVGCAMDYWGQGTSVTVSSTRDGNEEMGGITQTPYKVSISGTTVILTCPQYPGSEILWQHNDKNIGGDEDDKNIGSDEDHLSLKEFSELEQSGYYVCYPRGSKPEDANFYLYLRARVCENCMEMDVMSVATIVIVDICITGGLLLLVYYWSKNRKAKAKPVTRGAGAGGRQRGQNKERPPPVPNPDYEPIRKGQRDLYSGLNQRRI

SEQ ID NO: 15789 - protein, 688 aa, Artificial Sequence
  Synthetic Polypeptide
MALPVTALLLPLALLLHAARPEVQLLESGGGLVQPGGSLRLSCAASGFTFSSYAMSWVRQAPGKGLEWVSSISGSGDYIYYADSVKGRFTISRDISKNTLYLQMNSLRAEDTAVYYCAKEGTGANSSLADYRGQGTLVTVSSGGGSGGGSQVQLVESGGGLVQAGDSVTLSCTASGRTFSSYALAWFRQRPGKEREFVAGLRWGGPTNYADSVKDRFTISGDSAKHTMYLQMNSLKPEDTAVYYCGYNPGGWAVPSQYEYDSWGQGTQVTVSSGTGGGGSGGGGSGGGGSEFDIQMTQSPSSLSASVGDRVTITCKASDHINNWLAWYQQKPGQAPKLLIYGATTLETGVPSRFSGSGSGTDYTLTISSLQPEDFATYYCQQSWNTPWTFGQGTKLEIKRGGGGSGGGGSGGGGSQVQLQQPGAELVKPGASVKMSCKASGYAFSSYWINWMKQKPGQGLEWIGQIYPGDGDTNYNGKFKGRATLTADTSSSTAYMQLSSLTSEDSAVYFCARSITTVVGCAMDYWGQGTSVTVSSTRFKIPIEELEDRVFVNCNTSITWVEGTVGTLLSDITRLDLGKRILDPRGIYRCNGTDIYKDKESTVQVHYRMCQSCVELDPATVAGIIVTDVIATLLLALGVFCFAGHETGRLSGAADTQALLRNDQVYQPLRDRDDAQYSHLGGNWARNK

SEQ ID NO: 15790 - protein, 698 aa, Artificial Sequence
  Synthetic Polypeptide
MALPVTALLLPLALLLHAARPEVQLLESGGGLVQPGGSLRLSCAASGFTFSSYAMSWVRQAPGKGLEWVSSISGSGDYIYYADSVKGRFTISRDISKNTLYLQMNSLRAEDTAVYYCAKEGTGANSSLADYRGQGTLVTVSSGGGSGGGSQVQLVESGGGLVQAGDSVTLSCTASGRTFSSYALAWFRQRPGKEREFVAGLRWGGPTNYADSVKDRFTISGDSAKHTMYLQMNSLKPEDTAVYYCGYNPGGWAVPSQYEYDSWGQGTQVTVSSGTGGGGSGGGGSGGGGSEFDIQMTQSPSSLSASVGDRVTITCKASDHINNWLAWYQQKPGQAPKLLIYGATTLETGVPSRFSGSGSGTDYTLTISSLQPEDFATYYCQQSWNTPWTFGQGTKLEIKRGGGGSGGGGSGGGGSQVQLQQPGAELVKPGASVKMSCKASGYAFSSYWINWMKQKPGQGLEWIGQIYPGDGDTNYNGKFKGRATLTADTSSSTAYMQLSSLTSEDSAVYFCARSITTVVGCAMDYWGQGTSVTVSSTRQSIKGNHLVKVYDYQEDGSVLLTCDAEAKNITWFKDGKMIGFLTEDKKKWNLGSNAKDPRGMYQCKGSQNKSKPLQVYYRMCQNCIELNAATISGFLFAEIVSIFVLAVGVYFIAGQDGVRQSRASDKQTLLPNDQLYQPLKDREDDQYSHLQGNQLRRN

SEQ ID NO: 15791 - protein, 681 aa, Artificial Sequence
  Synthetic Polypeptide
MALPVTALLLPLALLLHAARPEVQLLESGGGLVQPGGSLRLSCAASGFTFSSYAMSWVRQAPGKGLEWVSSISGSGDYIYYADSVKGRFTISRDISKNTLYLQMNSLRAEDTAVYYCAKEGTGANSSLADYRGQGTLVTVSSGGGSGGGSQVQLVESGGGLVQAGDSVTLSCTASGRTFSSYALAWFRQRPGKEREFVAGLRWGGPTNYADSVKDRFTISGDSAKHTMYLQMNSLKPEDTAVYYCGYNPGGWAVPSQYEYDSWGQGTQVTVSSGTGGGGSGGGGSGGGGSEFDIQMTQSPSSLSASVGDRVTITCKASDHINNWLAWYQQKPGQAPKLLIYGATTLETGVPSRFSGSGSGTDYTLTISSLQPEDFATYYCQQSWNTPWTFGQGTKLEIKRGGGGSGGGGSGGGGSQVQLQQPGAELVKPGASVKMSCKASGYAFSSYWINWMKQKPGQGLEWIGQIYPGDGDTNYNGKFKGRATLTADTSSSTAYMQLSSLTSEDSAVYFCARSITTVVGCAMDYWGQGTSVTVSSTRQSFGLLDPKLCYLLDGILFIYGVILTALFLRVKFSRSADAPAYQQGQNQLYNELNLGRREEYDVLDKRRGRDPEMGGKPQRRKNPQEGLYNELQKDKMAEAYSEIGMKGERRRGKGHDGLYQGLSTATKDTYDALHMQALPPR

SEQ ID NO: 15792 - protein, 914 aa, Artificial Sequence
  Synthetic Polypeptide
MALPVTALLLPLALLLHAARPEVQLLESGGGLVQPGGSLRLSCAASGFTFSSYAMSWVRQAPGKGLEWVSSISGSGDYIYYADSVKGRFTISRDISKNTLYLQMNSLRAEDTAVYYCAKEGTGANSSLADYRGQGTLVTVSSGGGSGGGSQVQLVESGGGLVQAGDSVTLSCTASGRTFSSYALAWFRQRPGKEREFVAGLRWGGPTNYADSVKDRFTISGDSAKHTMYLQMNSLKPEDTAVYYCGYNPGGWAVPSQYEYDSWGQGTQVTVSSGTGGGGSGGGGSGGGGSEFDIQMTQSPSSLSASVGDRVTITCKASDHINNWLAWYQQKPGQAPKLLIYGATTLETGVPSRFSGSGSGTDYTLTISSLQPEDFATYYCQQSWNTPWTFGQGTKLEIKRGGGGSGGGGSGGGGSQVQLQQPGAELVKPGASVKMSCKASGYAFSSYWINWMKQKPGQGLEWIGQIYPGDGDTNYNGKFKGRATLTADTSSSTAYMQLSSLTSEDSAVYFCARSITTVVGCAMDYWGQGTSVTVSSTRGSGIQNPDPAVYQLRDSKSSDKSVCLFTDFDSQTNVSQSKDSDVYITDKTVLDMRSMDFKSNSAVAWSNKSDFACANAFNNSIIPEDTFFPSPESSCDVKLVEKSFETDTNLNFQNLSVIGFRILLLKVAGFNLLMTLRLWSSRAKRSGSGVKQTLNFDLLKLAGDVESNPGPSRGHMTEYKPTVRLATRDDVPRAVRTLAAAFADYPATRHTVDPDRHIERVTELQELFLTRVGLDIGKVWVADDGAAVAVWTTPESVEAGAVFAEIGPRMAELSGSRLAAQQQMEGLLAPHRPKEPAWFLATVGVSPDHQGKGLGSAVVLPGVEAAERAGVPAFLETSAPRNLPFYERLGFTVTADVEVPEGPRTWCMTRKPGA

SEQ ID NO: 15793 - protein, 946 aa, Artificial Sequence
  Synthetic Polypeptide
MALPVTALLLPLALLLHAARPEVQLLESGGGLVQPGGSLRLSCAASGFTFSSYAMSWVRQAPGKGLEWVSSISGSGDYIYYADSVKGRFTISRDISKNTLYLQMNSLRAEDTAVYYCAKEGTGANSSLADYRGQGTLVTVSSGGGSGGGSQVQLVESGGGLVQAGDSVTLSCTASGRTFSSYALAWFRQRPGKEREFVAGLRWGGPTNYADSVKDRFTISGDSAKHTMYLQMNSLKPEDTAVYYCGYNPGGWAVPSQYEYDSWGQGTQVTVSSGTGGGGSGGGGSGGGGSEFDIQMTQSPSSLSASVGDRVTITCKASDHINNWLAWYQQKPGQAPKLLIYGATTLETGVPSRFSGSGSGTDYTLTISSLQPEDFATYYCQQSWNTPWTFGQGTKLEIKRGGGGSGGGGSGGGGSQVQLQQPGAELVKPGASVKMSCKASGYAFSSYWINWMKQKPGQGLEWIGQIYPGDGDTNYNGKFKGRATLTADTSSSTAYMQLSSLTSEDSAVYFCARSITTVVGCAMDYWGQGTSVTVSSLEDLKNVFPPEVAVFEPSEAEISHTQKATLVCLATGFYPDHVELSWWVNGKEVHSGVSTDPQPLKEQPALNDSRYCLSSRLRVSATFWQNPRNHFRCQVQFYGLSENDEWTQDRAKPVTQIVSAEAWGRADCGFTSESYQQGVLSATILYEILLGKATLYAVLVSALVLMAMVKRKDSRGRAKRSGSGATNFSLLKQAGDVEENPGPTRGHMTEYKPTVRLATRDDVPRAVRTLAAAFADYPATRHTVDPDRHIERVTELQELFLTRVGLDIGKVWVADDGAAVAVWTTPESVEAGAVFAEIGPRMAELSGSRLAAQQQMEGLLAPHRPKEPAWFLATVGVSPDHQGKGLGSAVVLPGVEAAERAGVPAFLETSAPRNLPFYERLGFTVTADVEVPEGPRTWCMTRKPGA

SEQ ID NO: 15794 - protein, 996 aa, Artificial Sequence
  Synthetic Polypeptide
MALPVTALLLPLALLLHAARPEVQLLESGGGLVQPGGSLRLSCAASGFTFSSYAMSWVRQAPGKGLEWVSSISGSGDYIYYADSVKGRFTISRDISKNTLYLQMNSLRAEDTAVYYCAKEGTGANSSLADYRGQGTLVTVSSGGGSGGGSQVQLVESGGGLVQAGDSVTLSCTASGRTFSSYALAWFRQRPGKEREFVAGLRWGGPTNYADSVKDRFTISGDSAKHTMYLQMNSLKPEDTAVYYCGYNPGGWAVPSQYEYDSWGQGTQVTVSSGTGGGGSGGGGSGGGGSEFDIQMTQSPSSLSASVGDRVTITCKASDHINNWLAWYQQKPGQAPKLLIYGATTLETGVPSRFSGSGSGTDYTLTISSLQPEDFATYYCQQSWNTPWTFGQGTKLEIKRGGGGSGGGGSGGGGSQVQLQQPGAELVKPGASVKMSCKASGYAFSSYWINWMKQKPGQGLEWIGQIYPGDGDTNYNGKFKGRATLTADTSSSTAYMQLSSLTSEDSAVYFCARSITTVVGCAMDYWGQGTSVTVSSTREQKLISEEDLGSGTPFPSLAPPIMLLVDGKQQMVVVCLVLDVAPPGLDSPIWFSAGNGSALDAFTYGPSPATDGTWTNLAHLSLPSEELASWEPLVCHTGPGAEGHSRSTQPMHLSGEASTARTCPQEPLRGTPGGALWLGVLRLLLFKLLLFDLLLTCSCLCDPAGPLPSPATTTRLRALGSHRLHPATETGGREATSSPRPQPRDRRWGDTPPGRKPGSPVRAKRSGSGVKQTLNFDLLKLAGDVESNPGPSRSRGHMTEYKPTVRLATRDDVPRAVRTLAAAFADYPATRHTVDPDRHIERVTELQELFLTRVGLDIGKVWVADDGAAVAVWTTPESVEAGAVFAEIGPRMAELSGSRLAAQQQMEGLLAPHRPKEPAWFLATVGVSPDHQGKGLGSAVVLPGVEAAERAGVPAFLETSAPRNLPFYERLGFTVTADVEVPEGPRTWCMTRKPGA

SEQ ID NO: 15795 - protein, 810 aa, Artificial Sequence
  Synthetic Polypeptide
MALPVTALLLPLALLLHAARPEVQLLESGGGLVQPGGSLRLSCAASGFTFSSYAMSWVRQAPGKGLEWVSSISGSGDYIYYADSVKGRFTISRDISKNTLYLQMNSLRAEDTAVYYCAKEGTGANSSLADYRGQGTLVTVSSGGGSGGGSQVQLVESGGGLVQAGDSVTLSCTASGRTFSSYALAWFRQRPGKEREFVAGLRWGGPTNYADSVKDRFTISGDSAKHTMYLQMNSLKPEDTAVYYCGYNPGGWAVPSQYEYDSWGQGTQVTVSSGTGGGGSGGGGSGGGGSEFDIQMTQSPSSLSASVGDRVTITCKASDHINNWLAWYQQKPGQAPKLLIYGATTLETGVPSRFSGSGSGTDYTLTISSLQPEDFATYYCQQSWNTPWTFGQGTKLEIKRLEDLKNVFPPEVAVFEPSEAEISHTQKATLVCLATGFYPDHVELSWWVNGKEVHSGVSTDPQPLKEQPALNDSRYCLSSRLRVSATFWQNPRNHFRCQVQFYGLSENDEWTQDRAKPVTQIVSAEAWGRADCGFTSESYQQGVLSATILYEILLGKATLYAVLVSALVLMAMVKRKDSRGRAKRSGSGATNFSLLKQAGDVEENPGPTRGHMTEYKPTVRLATRDDVPRAVRTLAAAFADYPATRHTVDPDRHIERVTELQELFLTRVGLDIGKVWVADDGAAVAVWTTPESVEAGAVFAEIGPRMAELSGSRLAAQQQMEGLLAPHRPKEPAWFLATVGVSPDHQGKGLGSAVVLPGVEAAERAGVPAFLETSAPRNLPFYERLGFTVTADVEVPEGPRTWCMTRKPGA

SEQ ID NO: 15796 - protein, 580 aa, Artificial Sequence
  Synthetic Polypeptide
MALPVTALLLPLALLLHAARPEVQLLESGGGLVQPGGSLRLSCAASGFTFSSYAMSWVRQAPGKGLEWVSSISGSGDYIYYADSVKGRFTISRDISKNTLYLQMNSLRAEDTAVYYCAKEGTGANSSLADYRGQGTLVTVSSGGGSGGGSQVQLVESGGGLVQAGDSVTLSCTASGRTFSSYALAWFRQRPGKEREFVAGLRWGGPTNYADSVKDRFTISGDSAKHTMYLQMNSLKPEDTAVYYCGYNPGGWAVPSQYEYDSWGQGTQVTVSSGTGGGGSGGGGSGGGGSEFDIQMTQSPSSLSASVGDRVTITCKASDHINNWLAWYQQKPGQAPKLLIYGATTLETGVPSRFSGSGSGTDYTLTISSLQPEDFATYYCQQSWNTPWTFGQGTKLEIKRLEDLKNVFPPEVAVFEPSEAEISHTQKATLVCLATGFYPDHVELSWWVNGKEVHSGVSTDPQPLKEQPALNDSRYCLSSRLRVSATFWQNPRNHFRCQVQFYGLSENDEWTQDRAKPVTQIVSAEAWGRADCGFTSESYQQGVLSATILYEILLGKATLYAVLVSALVLMAMVKRKDSRG

SEQ ID NO: 15797 - protein, 828 aa, Artificial Sequence
  Synthetic Polypeptide
MALPVTALLLPLALLLHAARPEVQLLESGGGLVQPGGSLRLSCAASGFTFSSYAMSWVRQAPGKGLEWVSSISGSGDYIYYADSVKGRFTISRDISKNTLYLQMNSLRAEDTAVYYCAKEGTGANSSLADYRGQGTLVTVSSGGGSGGGSQVQLVESGGGLVQAGDSVTLSCTASGRTFSSYALAWFRQRPGKEREFVAGLRWGGPTNYADSVKDRFTISGDSAKHTMYLQMNSLKPEDTAVYYCGYNPGGWAVPSQYEYDSWGQGTQVTVSSGTGGGGSGGGGSGGGGSEFDIQMTQSPSSLSASVGDRVTITCKASDHINNWLAWYQQKPGQAPKLLIYGATTLETGVPSRFSGSGSGTDYTLTISSLQPEDFATYYCQQSWNTPWTFGQGTKLEIKRLEGKPIPNPLLGLDSTGSGEDLKNVFPPEVAVFEPSEAEISHTQKATLVCLATGFYPDHVELSWWVNGKEVHSGVCTDPQPLKEQPALNDSRYCLSSRLRVSATFWQNPRNHFRCQVQFYGLSENDEWTQDRAKPVTQIVSAEAWGRADCGFTSESYQQGVLSATILYEILLGKATLYAVLVSALVLMAMVKRKDSRGRAKRSGSGATNFSLLKQAGDVEENPGPTRGHMTEYKPTVRLATRDDVPRAVRTLAAAFADYPATRHTVDPDRHIERVTELQELFLTRVGLDIGKVWVADDGAAVAVWTTPESVEAGAVFAEIGPRMAELSGSRLAAQQQMEGLLAPHRPKEPAWFLATVGVSPDHQGKGLGSAVVLPGVEAAERAGVPAFLETSAPRNLPFYERLGFTVTADVEVPEGPRTWCMTRKPGA

SEQ ID NO: 15798 - protein, 598 aa, Artificial Sequence
  Synthetic Polypeptide
MALPVTALLLPLALLLHAARPEVQLLESGGGLVQPGGSLRLSCAASGFTFSSYAMSWVRQAPGKGLEWVSSISGSGDYIYYADSVKGRFTISRDISKNTLYLQMNSLRAEDTAVYYCAKEGTGANSSLADYRGQGTLVTVSSGGGSGGGSQVQLVESGGGLVQAGDSVTLSCTASGRTFSSYALAWFRQRPGKEREFVAGLRWGGPTNYADSVKDRFTISGDSAKHTMYLQMNSLKPEDTAVYYCGYNPGGWAVPSQYEYDSWGQGTQVTVSSGTGGGGSGGGGSGGGGSEFDIQMTQSPSSLSASVGDRVTITCKASDHINNWLAWYQQKPGQAPKLLIYGATTLETGVPSRFSGSGSGTDYTLTISSLQPEDFATYYCQQSWNTPWTFGQGTKLEIKRLEGKPIPNPLLGLDSTGSGEDLKNVFPPEVAVFEPSEAEISHTQKATLVCLATGFYPDHVELSWWVNGKEVHSGVCTDPQPLKEQPALNDSRYCLSSRLRVSATFWQNPRNHFRCQVQFYGLSENDEWTQDRAKPVTQIVSAEAWGRADCGFTSESYQQGVLSATILYEILLGKATLYAVLVSALVLMAMVKRKDSRG

SEQ ID NO: 15799 - protein, 914 aa, Artificial Sequence
  Synthetic Polypeptide
MALPVTALLLPLALLLHAARPEVQLLESGGGLVQPGGSLRLSCAASGFTFSSYAMSWVRQAPGKGLEWVSSISGSGDYIYYADSVKGRFTISRDISKNTLYLQMNSLRAEDTAVYYCAKEGTGANSSLADYRGQGTLVTVSSGGGSGGGSQVQLVESGGGLVQAGDSVTLSCTASGRTFSSYALAWFRQRPGKEREFVAGLRWGGPTNYADSVKDRFTISGDSAKHTMYLQMNSLKPEDTAVYYCGYNPGGWAVPSQYEYDSWGQGTQVTVSSGTGGGGSGGGGSGGGGSEFDIQMTQSPSSLSASVGDRVTITCKASDHINNWLAWYQQKPGQAPKLLIYGATTLETGVPSRFSGSGSGTDYTLTISSLQPEDFATYYCQQSWNTPWTFGQGTKLEIKRGGGGSGGGGSGGGGSQVQLQQPGAELVKPGASVKMSCKASGYAFSSYWINWMKQKPGQGLEWIGQIYPGDGDTNYNGKFKGRATLTADTSSSTAYMQLSSLTSEDSAVYFCARSITTVVGCAMDYWGQGTSVTVSSTRGSGIQNPDPAVYQLRDSKSSDKSVCLFTDFDSQTNVSQSKDSDVYITDKTVLDMRSMDFKSNSAVAWSNKSDFACANAFNNSIIPEDTFFPSSDVPCDVKLVEKSFETDTNLNFQNLSVIGFRILLLKVAGFNLLMTLRLWSSRAKRSGSGVKQTLNFDLLKLAGDVESNPGPSRGHMTEYKPTVRLATRDDVPRAVRTLAAAFADYPATRHTVDPDRHIERVTELQELFLTRVGLDIGKVWVADDGAAVAVWTTPESVEAGAVFAEIGPRMAELSGSRLAAQQQMEGLLAPHRPKEPAWFLATVGVSPDHQGKGLGSAVVLPGVEAAERAGVPAFLETSAPRNLPFYERLGFTVTADVEVPEGPRTWCMTRKPGA

SEQ ID NO: 15800 - protein, 946 aa, Artificial Sequence
  Synthetic Polypeptide
MALPVTALLLPLALLLHAARPEVQLLESGGGLVQPGGSLRLSCAASGFTFSSYAMSWVRQAPGKGLEWVSSISGSGDYIYYADSVKGRFTISRDISKNTLYLQMNSLRAEDTAVYYCAKEGTGANSSLADYRGQGTLVTVSSGGGSGGGSQVQLVESGGGLVQAGDSVTLSCTASGRTFSSYALAWFRQRPGKEREFVAGLRWGGPTNYADSVKDRFTISGDSAKHTMYLQMNSLKPEDTAVYYCGYNPGGWAVPSQYEYDSWGQGTQVTVSSGTGGGGSGGGGSGGGGSEFDIQMTQSPSSLSASVGDRVTITCKASDHINNWLAWYQQKPGQAPKLLIYGATTLETGVPSRFSGSGSGTDYTLTISSLQPEDFATYYCQQSWNTPWTFGQGTKLEIKRGGGGSGGGGSGGGGSQVQLQQPGAELVKPGASVKMSCKASGYAFSSYWINWMKQKPGQGLEWIGQIYPGDGDTNYNGKFKGRATLTADTSSSTAYMQLSSLTSEDSAVYFCARSITTVVGCAMDYWGQGTSVTVSSLEDLKNVFPPEVAVFEPSKAEIAHTQKATLVCLATGFYPDHVELSWWVNGKEVHSGVSTDPQPLKEQPALNDSRYCLSSRLRVSATFWQNPRNHFRCQVQFYGLSENDEWTQDRAKPVTQIVSAEAWGRADCGITSASYHQGVLSATILYEILLGKATLYAVLVSALVLMAMVKRKDSRGRAKRSGSGATNFSLLKQAGDVEENPGPTRGHMTEYKPTVRLATRDDVPRAVRTLAAAFADYPATRHTVDPDRHIERVTELQELFLTRVGLDIGKVWVADDGAAVAVWTTPESVEAGAVFAEIGPRMAELSGSRLAAQQQMEGLLAPHRPKEPAWFLATVGVSPDHQGKGLGSAVVLPGVEAAERAGVPAFLETSAPRNLPFYERLGFTVTADVEVPEGPRTWCMTRKPGA

SEQ ID NO: 15801 - protein, 1264 aa, Artificial Sequence
  Synthetic Polypeptide
MALPVTALLLPLALLLHAARPEVQLLESGGGLVQPGGSLRLSCAASGFTFSSYAMSWVRQAPGKGLEWVSSISGSGDYIYYADSVKGRFTISRDISKNTLYLQMNSLRAEDTAVYYCAKEGTGANSSLADYRGQGTLVTVSSGGGSGGGSQVQLVESGGGLVQAGDSVTLSCTASGRTFSSYALAWFRQRPGKEREFVAGLRWGGPTNYADSVKDRFTISGDSAKHTMYLQMNSLKPEDTAVYYCGYNPGGWAVPSQYEYDSWGQGTQVTVSSGTGGGGSGGGGSGGGGSEFDIQMTQSPSSLSASVGDRVTITCKASDHINNWLAWYQQKPGQAPKLLIYGATTLETGVPSRFSGSGSGTDYTLTISSLQPEDFATYYCQQSWNTPWTFGQGTKLEIKRLEIQNPDPAVYQLRDSKSSDKSVCLFTDFDSQTNVSQSKDSDVYITDKCVLDMRSMDFKSNSAVAWSNKSDFACANAFNNSIIPEDTFFPSSDVPCDVKLVEKSFETDTNLNFQNLSVIGFRILLLKVAGFNLLMTLRLWSSRAKRSGSGVKQTLNFDLLKLAGDVESNPGPTSMDWIWRILFLVGAATGAHSGPQVQLQESGGGLAQAGGSLRLSCAASGRTFSMGWFRQAPGKEREFVAAITYSGGSPYYASSVRGRFTISRDNAKNTVYLQMNSLKPEDTAVYYCAANPTYGSDWNAENWGQGTQVTVSSGSGGGGSGGGGSGGGGSFEQVQLQQPGAELVKPGASVKMSCKASGYAFSSYWINWMKQKPGQGLEWIGQIYPGDGDTNYNGKFKGRATLTADTSSSTAYMQLSSLTSEDSAVYFCARSITTVVGCAMDYWGQGTSVTVSSTREDLKNVFPPEVAVFEPSKAEIAHTQKATLVCLATGFYPDHVELSWWVNGKEVHSGVCTDPQPLKEQPALNDSRYCLSSRLRVSATFWQNPRNHFRCQVQFYGLSENDEWTQDRAKPVTQIVSAEAWGRADCGITSASYHQGVLSATILYEILLGKATLYAVLVSALVLMAMVKRKDSRGRAKRSGSGATNFSLLKQAGDVEENPGPSRGHMTEYKPTVRLATRDDVPRAVRTLAAAFADYPATRHTVDPDRHIERVTELQELFLTRVGLDIGKVWVADDGAAVAVWTTPESVEAGAVFAEIGPRMAELSGSRLAAQQQMEGLLAPHRPKEPAWFLATVGVSPDHQGKGLGSAVVLPGVEAAERAGVPAFLETSAPRNLPFYERLGFTVTADVEVPEGPRTWCMTRKPGA

SEQ ID NO: 15802 - protein, 1263 aa, Artificial Sequence
  Synthetic Polypeptide
MALPVTALLLPLALLLHAARPEVQLLESGGGLVQPGGSLRLSCAASGFTFSSYAMSWVRQAPGKGLEWVSSISGSGDYIYYADSVKGRFTISRDISKNTLYLQMNSLRAEDTAVYYCAKEGTGANSSLADYRGQGTLVTVSSGGGSGGGSQVQLVESGGGLVQAGDSVTLSCTASGRTFSSYALAWFRQRPGKEREFVAGLRWGGPTNYADSVKDRFTISGDSAKHTMYLQMNSLKPEDTAVYYCGYNPGGWAVPSQYEYDSWGQGTQVTVSSGTGGGGSGGGGSGGGGSEFDIQMTQSPSSLSASVGDRVTITCKASDHINNWLAWYQQKPGQAPKLLIYGATTLETGVPSRFSGSGSGTDYTLTISSLQPEDFATYYCQQSWNTPWTFGQGTKLEIKRLEDLKNVFPPEVAVFEPSKAEIAHTQKATLVCLATGFYPDHVELSWWVNGKEVHSGVCTDPQPLKEQPALNDSRYCLSSRLRVSATFWQNPRNHFRCQVQFYGLSENDEWTQDRAKPVTQIVSAEAWGRADCGITSASYHQGVLSATILYEILLGKATLYAVLVSALVLMAMVKRKDSRGRAKRSGSGATNFSLLKQAGDVEENPGPTSMDWIWRILFLVGAATGAHSGPQVQLQESGGGLAQAGGSLRLSCAASGRTFSMGWFRQAPGKEREFVAAITYSGGSPYYASSVRGRFTISRDNAKNTVYLQMNSLKPEDTAVYYCAANPTYGSDWNAENWGQGTQVTVSSGSGGGGSGGGGSGGGGSFEQVQLQQPGAELVKPGASVKMSCKASGYAFSSYWINWMKQKPGQGLEWIGQIYPGDGDTNYNGKFKGRATLTADTSSSTAYMQLSSLTSEDSAVYFCARSITTVVGCAMDYWGQGTSVTVSSTRIQNPDPAVYQLRDSKSSDKSVCLFTDFDSQTNVSQSKDSDVYITDKCVLDMRSMDFKSNSAVAWSNKSDFACANAFNNSIIPEDTFFPSSDVPCDVKLVEKSFETDTNLNFQNLSVIGFRILLLKVAGFNLLMTLRLWSSRAKRSGSGVKQTLNFDLLKLAGDVESNPGPSRGHMTEYKPTVRLATRDDVPRAVRTLAAAFADYPATRHTVDPDRHIERVTELQELFLTRVGLDIGKVWVADDGAAVAVWTTPESVEAGAVFAEIGPRMAELSGSRLAAQQQMEGLLAPHRPKEPAWFLATVGVSPDHQGKGLGSAVVLPGVEAAERAGVPAFLETSAPRNLPFYERLGFTVTADVEVPEGPRTWCMTRKPGA

SEQ ID NO: 15803 - protein, 1263 aa, Artificial Sequence
  Synthetic Polypeptide
MALPVTALLLPLALLLHAARPEVQLLESGGGLVQPGGSLRLSCAASGFTFSSYAMSWVRQAPGKGLEWVSSISGSGDYIYYADSVKGRFTISRDISKNTLYLQMNSLRAEDTAVYYCAKEGTGANSSLADYRGQGTLVTVSSGGGSGGGSQVQLVESGGGLVQAGDSVTLSCTASGRTFSSYALAWFRQRPGKEREFVAGLRWGGPTNYADSVKDRFTISGDSAKHTMYLQMNSLKPEDTAVYYCGYNPGGWAVPSQYEYDSWGQGTQVTVSSGTGGGGSGGGGSGGGGSEFDIQMTQSPSSLSASVGDRVTITCKASDHINNWLAWYQQKPGQAPKLLIYGATTLETGVPSRFSGSGSGTDYTLTISSLQPEDFATYYCQQSWNTPWTFGQGTKLEIKRLEDLKNVFPPEVAVFEPSEAEISHTQKATLVCLATGFYPDHVELSWWVNGKEVHSGVCTDPQPLKEQPALNDSRYCLSSRLRVSATFWQNPRNHFRCQVQFYGLSENDEWTQDRAKPVTQIVSAEAWGRADCGFTSESYQQGVLSATILYEILLGKATLYAVLVSALVLMAMVKRKDSRGRAKRSGSGATNFSLLKQAGDVEENPGPTSMDWIWRILFLVGAATGAHSGPQVQLQESGGGLAQAGGSLRLSCAASGRTFSMGWFRQAPGKEREFVAAITYSGGSPYYASSVRGRFTISRDNAKNTVYLQMNSLKPEDTAVYYCAANPTYGSDWNAENWGQGTQVTVSSGSGGGGSGGGGSGGGGSFEQVQLQQPGAELVKPGASVKMSCKASGYAFSSYWINWMKQKPGQGLEWIGQIYPGDGDTNYNGKFKGRATLTADTSSSTAYMQLSSLTSEDSAVYFCARSITTVVGCAMDYWGQGTSVTVSSTRIQNPDPAVYQLRDSKSSDKSVCLFTDFDSQTNVSQSKDSDVYITDKCVLDMRSMDFKSNSAVAWSNKSDFACANAFNNSIIPEDTFFPSPESSCDVKLVEKSFETDTNLNFQNLSVIGFRILLLKVAGFNLLMTLRLWSSRAKRSGSGVKQTLNFDLLKLAGDVESNPGPSRGHMTEYKPTVRLATRDDVPRAVRTLAAAFADYPATRHTVDPDRHIERVTELQELFLTRVGLDIGKVWVADDGAAVAVWTTPESVEAGAVFAEIGPRMAELSGSRLAAQQQMEGLLAPHRPKEPAWFLATVGVSPDHQGKGLGSAVVLPGVEAAERAGVPAFLETSAPRNLPFYERLGFTVTADVEVPEGPRTWCMTRKPGA

SEQ ID NO: 15804 - protein, 1030 aa, Artificial Sequence
  Synthetic Polypeptide
MALPVTALLLPLALLLHAARPEVQLLESGGGLVQPGGSLRLSCAASGFTFSSYAMSWVRQAPGKGLEWVSSISGSGDYIYYADSVKGRFTISRDISKNTLYLQMNSLRAEDTAVYYCAKEGTGANSSLADYRGQGTLVTVSSGGGSGGGSQVQLVESGGGLVQAGDSVTLSCTASGRTFSSYALAWFRQRPGKEREFVAGLRWGGPTNYADSVKDRFTISGDSAKHTMYLQMNSLKPEDTAVYYCGYNPGGWAVPSQYEYDSWGQGTQVTVSSGTGGGGSGGGGSGGGGSEFDIQMTQSPSSLSASVGDRVTITCKASDHINNWLAWYQQKPGQAPKLLIYGATTLETGVPSRFSGSGSGTDYTLTISSLQPEDFATYYCQQSWNTPWTFGQGTKLEIKRLEDLKNVFPPEVAVFEPSEAEISHTQKATLVCLATGFYPDHVELSWWVNGKEVHSGVCTDPQPLKEQPALNDSRYCLSSRLRVSATFWQNPRNHFRCQVQFYGLSENDEWTQDRAKPVTQIVSAEAWGRADCGFTSESYQQGVLSATILYEILLGKATLYAVLVSALVLMAMVKRKDSRGRAKRSGSGATNFSLLKQAGDVEENPGPTSMDWIWRILFLVGAATGAHSGPQVQLQESGGGLAQAGGSLRLSCAASGRTFSMGWFRQAPGKEREFVAAITYSGGSPYYASSVRGRFTISRDNAKNTVYLQMNSLKPEDTAVYYCAANPTYGSDWNAENWGQGTQVTVSSGSGGGGSGGGGSGGGGSFEQVQLQQPGAELVKPGASVKMSCKASGYAFSSYWINWMKQKPGQGLEWIGQIYPGDGDTNYNGKFKGRATLTADTSSSTAYMQLSSLTSEDSAVYFCARSITTVVGCAMDYWGQGTSVTVSSTRIQNPDPAVYQLRDSKSSDKSVCLFTDFDSQTNVSQSKDSDVYITDKCVLDMRSMDFKSNSAVAWSNKSDFACANAFNNSIIPEDTFFPSPESSCDVKLVEKSFETDTNLNFQNLSVIGFRILLLKVAGFNLLMTLRLWSS

SEQ ID NO: 15805 - protein, 1255 aa, Artificial Sequence
  Synthetic Polypeptide
MALPVTALLLPLALLLHAARPEVQLLESGGGLVQPGGSLRLSCAASGFTFSSYAMSWVRQAPGKGLEWVSSISGSGDYIYYADSVKGRFTISRDISKNTLYLQMNSLRAEDTAVYYCAKEGTGANSSLADYRGQGTLVTVSSGGGSGGGSQVQLVESGGGLVQAGDSVTLSCTASGRTFSSYALAWFRQRPGKEREFVAGLRWGGPTNYADSVKDRFTISGDSAKHTMYLQMNSLKPEDTAVYYCGYNPGGWAVPSQYEYDSWGQGTQVTVSSGTGGGGSGGGGSGGGGSEFDIQMTQSPSSLSASVGDRVTITCKASDHINNWLAWYQQKPGQAPKLLIYGATTLETGVPSRFSGSGSGTDYTLTISSLQPEDFATYYCQQSWNTPWTFGQGTKLEIKRLEDLKNVFPPEVAVFEPSEAEISHTQKATLVCLATGFYPDHVELSWWVNGKEVHSGVCTDPQPLKEQPALNDSRYCLSSRLRVSATFWQNPRNHFRCQVQFYGLSENDEWTQDRAKPVTQIVSAEAWGRADCGFTSESYQQGVLSATILYEILLGKATLYAVLVSALVLMAMVKRKDSRGRAKRSGSGATNFSLLKQAGDVEENPGPTSMDWIWRILFLVGAATGAHSGPQVQLQESGGGLAQAGGSLRLSCAASGRTFSMGWFRQAPGKEREFVAAITYSGGSPYYASSVRGRFTISRDNAKNTVYLQMNSLKPEDTAVYYCAANPTYGSDWNAENWGQGTQVTVSSGSGGGGSGGGGSGGGGSFEQVQLQQPGAELVKPGASVKMSCKASGYAFSSYWINWMKQKPGQGLEWIGQIYPGDGDTNYNGKFKGRATLTADTSSSTAYMQLSSLTSEDSAVYFCARSITTVVGCAMDYWGQGTSVTVSSTRIQNPDPAVYQLRDSKSSDKSVCLFTDFDSQTNVSQSKDSDVYITDKCVLDMRSMDFKSNSAVAWSNKSDFACANAFNNSIIPEDTFFPSPESSCDVKLVEKSFETDTNLNFQNLSVIGFRILLLKVAGFNLLMTLRLWSSRAKRSGSGVKQTLNFDLLKLAGDVESNPGPSRGGIHTMATYEVLCEVARKLGTDDREVVLFLLNVFIPQPTLAQLIGALRALKEEGRLTFPLLAECLFRAGRRDLLRDLLHLDPRFLERHLAGTMSYFSPYQLTVLHVDGELCARDIRSLIFLSKDTIGSRSTPQTFLHWVYCMENLDLLGPTDVDALMSMLRSLSRVDLQRQVQTLMGLHLSGPSHSQHYRHTP

SEQ ID NO: 15806 - protein, 1034 aa, Artificial Sequence
  Synthetic Polypeptide
MALPVTALLLPLALLLHAARPEVQLLESGGGLVQPGGSLRLSCAASGFTFSSYAMSWVRQAPGKGLEWVSSISGSGDYIYYADSVKGRFTISRDISKNTLYLQMNSLRAEDTAVYYCAKEGTGANSSLADYRGQGTLVTVSSGGGSGGGSQVQLVESGGGLVQAGDSVTLSCTASGRTFSSYALAWFRQRPGKEREFVAGLRWGGPTNYADSVKDRFTISGDSAKHTMYLQMNSLKPEDTAVYYCGYNPGGWAVPSQYEYDSWGQGTQVTVSSGTGGGGSGGGGSGGGGSEFDIQMTQSPSSLSASVGDRVTITCKASDHINNWLAWYQQKPGQAPKLLIYGATTLETGVPSRFSGSGSGTDYTLTISSLQPEDFATYYCQQSWNTPWTFGQGTKLEIKRLEIQNPDPAVYQLRDSKSSDKSVCLFTDFDSQTNVSQSKDSDVYITDKCVLDMRSMDFKSNSAVAWSNKSDFACANAFNNSIIPEDTFFPSPESSCDVKLVEKSFETDTNLNFQNLSVIGFRILLLKVAGFNLLMTLRLWSSRAKRSGSGVKQTLNFDLLKLAGDVESNPGPTSMDWIWRILFLVGAATGAHSGPQVQLQESGGGLAQAGGSLRLSCAASGRTFSMGWFRQAPGKEREFVAAITYSGGSPYYASSVRGRFTISRDNAKNTVYLQMNSLKPEDTAVYYCAANPTYGSDWNAENWGQGTQVTVSSGSGGGGSGGGGSGGGGSFEQVQLQQPGAELVKPGASVKMSCKASGYAFSSYWINWMKQKPGQGLEWIGQIYPGDGDTNYNGKFKGRATLTADTSSSTAYMQLSSLTSEDSAVYFCARSITTVVGCAMDYWGQGTSVTVSSTREDLKNVFPPEVAVFEPSEAEISHTQKATLVCLATGFYPDHVELSWWVNGKEVHSGVCTDPQPLKEQPALNDSRYCLSSRLRVSATFWQNPRNHFRCQVQFYGLSENDEWTQDRAKPVTQIVSAEAWGRADCGFTSESYQQGVLSATILYEILLGKATLYAVLVSALVLMAMVKRKDSRG

SEQ ID NO: 15807 - protein, 1256 aa, Artificial Sequence
  Synthetic Polypeptide
MALPVTALLLPLALLLHAARPEVQLLESGGGLVQPGGSLRLSCAASGFTFSSYAMSWVRQAPGKGLEWVSSISGSGDYIYYADSVKGRFTISRDISKNTLYLQMNSLRAEDTAVYYCAKEGTGANSSLADYRGQGTLVTVSSGGGSGGGSQVQLVESGGGLVQAGDSVTLSCTASGRTFSSYALAWFRQRPGKEREFVAGLRWGGPTNYADSVKDRFTISGDSAKHTMYLQMNSLKPEDTAVYYCGYNPGGWAVPSQYEYDSWGQGTQVTVSSGTGGGGSGGGGSGGGGSEFDIQMTQSPSSLSASVGDRVTITCKASDHINNWLAWYQQKPGQAPKLLIYGATTLETGVPSRFSGSGSGTDYTLTISSLQPEDFATYYCQQSWNTPWTFGQGTKLEIKRLEIQNPDPAVYQLRDSKSSDKSVCLFTDFDSQTNVSQSKDSDVYITDKCVLDMRSMDFKSNSAVAWSNKSDFACANAFNNSIIPEDTFFPSPESSCDVKLVEKSFETDTNLNFQNLSVIGFRILLLKVAGFNLLMTLRLWSSRAKRSGSGVKQTLNFDLLKLAGDVESNPGPTSMDWIWRILFLVGAATGAHSGPQVQLQESGGGLAQAGGSLRLSCAASGRTFSMGWFRQAPGKEREFVAAITYSGGSPYYASSVRGRFTISRDNAKNTVYLQMNSLKPEDTAVYYCAANPTYGSDWNAENWGQGTQVTVSSGSGGGGSGGGGSGGGGSFEQVQLQQPGAELVKPGASVKMSCKASGYAFSSYWINWMKQKPGQGLEWIGQIYPGDGDTNYNGKFKGRATLTADTSSSTAYMQLSSLTSEDSAVYFCARSITTVVGCAMDYWGQGTSVTVSSTREDLKNVFPPEVAVFEPSEAEISHTQKATLVCLATGFYPDHVELSWWVNGKEVHSGVCTDPQPLKEQPALNDSRYCLSSRLRVSATFWQNPRNHFRCQVQFYGLSENDEWTQDRAKPVTQIVSAEAWGRADCGFTSESYQQGVLSATILYEILLGKATLYAVLVSALVLMAMVKRKDSRGRAKRSGSGATNFSLLKQAGDVEENPGPSRGGIHTMATYEVLCEVARKLGTDDREVVLFLLNVFIPQPTLAQLIGALRALKEEGRLTFPLLAECLFRAGRRDLLRDLLHLDPRFLERHLAGTMSYFSPYQLTVLHVDGELCARDIRSLIFLSKDTIGSRSTPQTFLHWVYCMENLDLLGPTDVDALMSMLRSLSRVDLQRQVQTLMGLHLSGPSHSQHYRHTP

SEQ ID NO: 15808 - protein, 1263 aa, Artificial Sequence
  Synthetic Polypeptide
MALPVTALLLPLALLLHAARPEVQLLESGGGLVQPGGSLRLSCAASGFTFSSYAMSWVRQAPGKGLEWVSSISGSGDYIYYADSVKGRFTISRDISKNTLYLQMNSLRAEDTAVYYCAKEGTGANSSLADYRGQGTLVTVSSGGGSGGGSQVQLVESGGGLVQAGDSVTLSCTASGRTFSSYALAWFRQRPGKEREFVAGLRWGGPTNYADSVKDRFTISGDSAKHTMYLQMNSLKPEDTAVYYCGYNPGGWAVPSQYEYDSWGQGTQVTVSSGTGGGGSGGGGSGGGGSEFDIQMTQSPSSLSASVGDRVTITCKASDHINNWLAWYQQKPGQAPKLLIYGATTLETGVPSRFSGSGSGTDYTLTISSLQPEDFATYYCQQSWNTPWTFGQGTKLEIKRLEDLKNVFPPEVAVFEPSEAEISHTQKATLVCLATGFYPDHVELSWWVNGKEVHSGVSTDPQPLKEQPALNDSRYCLSSRLRVSATFWQNPRNHFRCQVQFYGLSENDEWTQDRAKPVTQIVSAEAWGRADCGFTSESYQQGVLSATILYEILLGKATLYAVLVSALVLMAMVKRKDSRGRAKRSGSGATNFSLLKQAGDVEENPGPTSMDWIWRILFLVGAATGAHSGPQVQLQESGGGLAQAGGSLRLSCAASGRTFSMGWFRQAPGKEREFVAAITYSGGSPYYASSVRGRFTISRDNAKNTVYLQMNSLKPEDTAVYYCAANPTYGSDWNAENWGQGTQVTVSSGSGGGGSGGGGSGGGGSFEQVQLQQPGAELVKPGASVKMSCKASGYAFSSYWINWMKQKPGQGLEWIGQIYPGDGDTNYNGKFKGRATLTADTSSSTAYMQLSSLTSEDSAVYFCARSITTVVGCAMDYWGQGTSVTVSSTRIQNPDPAVYQLRDSKSSDKSVCLFTDFDSQTNVSQSKDSDVYITDKTVLDMRSMDFKSNSAVAWSNKSDFACANAFNNSIIPEDTFFPSPESSCDVKLVEKSFETDTNLNFQNLSVIGFRILLLKVAGFNLLMTLRLWSSRAKRSGSGVKQTLNFDLLKLAGDVESNPGPSRGHMTEYKPTVRLATRDDVPRAVRTLAAAFADYPATRHTVDPDRHIERVTELQELFLTRVGLDIGKVWVADDGAAVAVWTTPESVEAGAVFAEIGPRMAELSGSRLAAQQQMEGLLAPHRPKEPAWFLATVGVSPDHQGKGLGSAVVLPGVEAAERAGVPAFLETSAPRNLPFYERLGFTVTADVEVPEGPRTWCMTRKPGA

SEQ ID NO: 15809 - protein, 1345 aa, Artificial Sequence
  Synthetic Polypeptide
MALPVTALLLPLALLLHAARPEVQLLESGGGLVQPGGSLRLSCAASGFTFSSYAMSWVRQAPGKGLEWVSSISGSGDYIYYADSVKGRFTISRDISKNTLYLQMNSLRAEDTAVYYCAKEGTGANSSLADYRGQGTLVTVSSGGGSGGGSQVQLVESGGGLVQAGDSVTLSCTASGRTFSSYALAWFRQRPGKEREFVAGLRWGGPTNYADSVKDRFTISGDSAKHTMYLQMNSLKPEDTAVYYCGYNPGGWAVPSQYEYDSWGQGTQVTVSSGTGGGGSGGGGSGGGGSEFDIQMTQSPSSLSASVGDRVTITCKASDHINNWLAWYQQKPGQAPKLLIYGATTLETGVPSRFSGSGSGTDYTLTISSLQPEDFATYYCQQSWNTPWTFGQGTKLEIKRLEDLKNVFPPEVAVFEPSEAEISHTQKATLVCLATGFYPDHVELSWWVNGKEVHSGVSTDPQPLKEQPALNDSRYCLSSRLRVSATFWQNPRNHFRCQVQFYGLSENDEWTQDRAKPVTQIVSAEAWGRADCGFTSESYQQGVLSATILYEILLGKATLYAVLVSALVLMAMVKRKDSRGRAKRSGSGATNFSLLKQAGDVEENPGPTSMDWIWRILFLVGAATGAHSGPQVQLQESGGGLAQAGGSLRLSCAASGRTFSMGWFRQAPGKEREFVAAITYSGGSPYYASSVRGRFTISRDNAKNTVYLQMNSLKPEDTAVYYCAANPTYGSDWNAENWGQGTQVTVSSGSGGGGSGGGGSGGGGSFEQVQLQQPGAELVKPGASVKMSCKASGYAFSSYWINWMKQKPGQGLEWIGQIYPGDGDTNYNGKFKGRATLTADTSSSTAYMQLSSLTSEDSAVYFCARSITTVVGCAMDYWGQGTSVTVSSTREQKLISEEDGSGTPFPSLAPPIMLLVDGKQQMVVVCLVLDVAPPGLDSPIWFSAGNGSALDAFTYGPSPATDGTWTNLAHLSLPSEELASWEPLVCHTGPGAEGHSRSTQPMHLSGEASTARTCPQEPLRGTPGGALWLGVLRLLLFKLLLFDLLLTCSCLCDPAGPLPSPATTTRLRALGSHRLHPATETGGREATSSPRPQPRDRRWGDTPPGRKPGSPVRAKRSGSGVKQTLNFDLLKLAGDVESNPGPSRGHMTEYKPTVRLATRDDVPRAVRTLAAAFADYPATRHTVDPDRHIERVTELQELFLTRVGLDIGKVWVADDGAAVAVWTTPESVEAGAVFAEIGPRMAELSGSRLAAQQQMEGLLAPHRPKEPAWFLATVGVSPDHQGKGLGSAVVLPGVEAAERAGVPAFLETSAPRNLPFYERLGFTVTADVEVPEGPRTWCMTRKPGA

SEQ ID NO: 15810 - protein, 1300 aa, Artificial Sequence
  Synthetic Polypeptide
MALPVTALLLPLALLLHAARPEVQLLESGGGLVQPGGSLRLSCAASGFTFSSYAMSWVRQAPGKGLEWVSSISGSGDYIYYADSVKGRFTISRDISKNTLYLQMNSLRAEDTAVYYCAKEGTGANSSLADYRGQGTLVTVSSGGGSGGGSQVQLVESGGGLVQAGDSVTLSCTASGRTFSSYALAWFRQRPGKEREFVAGLRWGGPTNYADSVKDRFTISGDSAKHTMYLQMNSLKPEDTAVYYCGYNPGGWAVPSQYEYDSWGQGTQVTVSSGTGGGGSGGGGSGGGGSEFDIQMTQSPSSLSASVGDRVTITCKASDHINNWLAWYQQKPGQAPKLLIYGATTLETGVPSRFSGSGSGTDYTLTISSLQPEDFATYYCQQSWNTPWTFGQGTKLEIKRLEGKPIPNPLLGLDSTGSGDKQLDADVSPKPTIFLPSIAETKLQKAGTYLCLLEKFFPDVIKIHWQEKKSNTILGSQEGNTMKTNDTYMKFSWLTVPEKSLDKEHRCIVRHENNKNGVDQEIIFPPIKTDVITMDPKDNCSKDANDTLLLQLTNTSAYYMYLLLLLKSVVYFAIITCCLLRRTAFCCNGEKSRAKRSGSGATNFSLLKQAGDVEENPGPTSMDWIWRILFLVGAATGAHSGPQVQLQESGGGLAQAGGSLRLSCAASGRTFSMGWFRQAPGKEREFVAAITYSGGSPYYASSVRGRFTISRDNAKNTVYLQMNSLKPEDTAVYYCAANPTYGSDWNAENWGQGTQVTVSSGSGGGGSGGGGSGGGGSFEQVQLQQPGAELVKPGASVKMSCKASGYAFSSYWINWMKQKPGQGLEWIGQIYPGDGDTNYNGKFKGRATLTADTSSSTAYMQLSSLTSEDSAVYFCARSITTVVGCAMDYWGQGTSVTVSSTREQKLISEEDGSGSQPHTKPSVFVMKNGTNVACLVKEFYPKDIRINLVSSKKITEFDPAIVISPSGKYNAVKLGKYEDSNSVTCSVQHDNKTVHSTDFEVKTDSTDHVKPKETENTKQPSKSCHKPKAIVHTEKVNMMSLTVLGLRMLFAKTVAVNFLLTAKLFFLRAKRSGSGVKQTLNFDLLKLAGDVESNPGPSRGHMTEYKPTVRLATRDDVPRAVRTLAAAFADYPATRHTVDPDRHIERVTELQELFLTRVGLDIGKVWVADDGAAVAVWTTPESVEAGAVFAEIGPRMAELSGSRLAAQQQMEGLLAPHRPKEPAWFLATVGVSPDHQGKGLGSAVVLPGVEAAERAGVPAFLETSAPRNLPFYERLGFTVTADVEVPEGPRTWCMTRKPGA

SEQ ID NO: 15811 - protein, 1038 aa, Artificial Sequence
  Synthetic Polypeptide
MALPVTALLLPLALLLHAARPEVQLLESGGGLVQPGGSLRLSCAASGFTFSSYAMSWVRQAPGKGLEWVSSISGSGDYIYYADSVKGRFTISRDISKNTLYLQMNSLRAEDTAVYYCAKEGTGANSSLADYRGQGTLVTVSSGGGSGGGSQVQLVESGGGLVQAGDSVTLSCTASGRTFSSYALAWFRQRPGKEREFVAGLRWGGPTNYADSVKDRFTISGDSAKHTMYLQMNSLKPEDTAVYYCGYNPGGWAVPSQYEYDSWGQGTQVTVSSGTGGGGSGGGGSGGGGSEFDIQMTQSPSSLSASVGDRVTITCKASDHINNWLAWYQQKPGQAPKLLIYGATTLETGVPSRFSGSGSGTDYTLTISSLQPEDFATYYCQQSWNTPWTFGQGTKLEIKRLESQPHTKPSVFVMKNGTNVACLVKEFYPKDIRINLVSSKKITEFDPAIVISPSGKYNAVKLGKYEDSNSVTCSVQHDNKTVHSTDFEVKTDSTDHVKPKETENTKQPSKSCHKPKAIVHTEKVNMMSLTVLGLRMLFAKTVAVNFLLTAKLFFLRAKRSGSGATNFSLLKQAGDVEENPGPTSMDWIWRILFLVGAATGAHSGPQVQLQESGGGLAQAGGSLRLSCAASGRTFSMGWFRQAPGKEREFVAAITYSGGSPYYASSVRGRFTISRDNAKNTVYLQMNSLKPEDTAVYYCAANPTYGSDWNAENWGQGTQVTVSSGSGGGGSGGGGSGGGGSFEQVQLQQPGAELVKPGASVKMSCKASGYAFSSYWINWMKQKPGQGLEWIGQIYPGDGDTNYNGKFKGRATLTADTSSSTAYMQLSSLTSEDSAVYFCARSITTVVGCAMDYWGQGTSVTVSSTRDKQLDADVSPKPTIFLPSIAETKLQKAGTYLCLLEKFFPDVIKIHWQEKKSNTILGSQEGNTMKTNDTYMKFSWLTVPEKSLDKEHRCIVRHENNKNGVDQEIIFPPIKTDVITMDPKDNCSKDANDTLLLQLTNTSAYYMYLLLLLKSVVYFAIITCCLLRRTAFCCNGEKS

SEQ ID NO: 15812 - protein, 1440 aa, Artificial Sequence
  Synthetic Polypeptide
MALPVTALLLPLALLLHAARPEVQLLESGGGLVQPGGSLRLSCAASGFTFSSYAMSWVRQAPGKGLEWVSSISGSGDYIYYADSVKGRFTISRDISKNTLYLQMNSLRAEDTAVYYCAKEGTGANSSLADYRGQGTLVTVSSGGGSGGGSQVQLVESGGGLVQAGDSVTLSCTASGRTFSSYALAWFRQRPGKEREFVAGLRWGGPTNYADSVKDRFTISGDSAKHTMYLQMNSLKPEDTAVYYCGYNPGGWAVPSQYEYDSWGQGTQVTVSSGTGGGGSGGGGSGGGGSEFDIQMTQSPSSLSASVGDRVTITCKASDHINNWLAWYQQKPGQAPKLLIYGATTLETGVPSRFSGSGSGTDYTLTISSLQPEDFATYYCQQSWNTPWTFGQGTKLEIKRGQPKANPTVTLFPPSSEELQANKATLVCLISDFYPGAVTVAWKADGSPVKAGVETTKPSKQSNNKYAASSYLSLTPEQWKSHRSYSCQVTHEGSTVEKTVAPTECSGSQSFGLLDPKLCYLLDGILFIYGVILTALFLRVKFSRSADAPAYQQGQNQLYNELNLGRREEYDVLDKRRGRDPEMGGKPQRRKNPQEGLYNELQKDKMAEAYSEIGMKGERRRGKGHDGLYQGLSTATKDTYDALHMQALPPRRAKRSGSGATNFSLLKQAGDVEENPGPTSMDWIWRILFLVGAATGAHSGPQVQLQESGGGLAQAGGSLRLSCAASGRTFSMGWFRQAPGKEREFVAAITYSGGSPYYASSVRGRFTISRDNAKNTVYLQMNSLKPEDTAVYYCAANPTYGSDWNAENWGQGTQVTVSSGSGGGGSGGGGSGGGGSFEQVQLQQPGAELVKPGASVKMSCKASGYAFSSYWINWMKQKPGQGLEWIGQIYPGDGDTNYNGKFKGRATLTADTSSSTAYMQLSSLTSEDSAVYFCARSITTVVGCAMDYWGQGTSVTVSSASTKGPSVFPLAPSSKSTSGGTAALGCLVKDYFPEPVTVSWNSGALTSGVHTFPAVLQSSGLYSLSSVVTVPSSSLGTQTYICNVNHKPSNTKVDKRVEPKSCGTQSFGLLDPKLCYLLDGILFIYGVILTALFLRVKFSRSADAPAYQQGQNQLYNELNLGRREEYDVLDKRRGRDPEMGGKPQRRKNPQEGLYNELQKDKMAEAYSEIGMKGERRRGKGHDGLYQGLSTATKDTYDALHMQALPPRRAKRSGSGVKQTLNFDLLKLAGDVESNPGPSRGHMTEYKPTVRLATRDDVPRAVRTLAAAFADYPATRHTVDPDRHIERVTELQELFLTRVGLDIGKVWVADDGAAVAVWTTPESVEAGAVFAEIGPRMAELSGSRLAAQQQMEGLLAPHRPKEPAWFLATVGVSPDHQGKGLGSAVVLPGVEAAERAGVPAFLETSAPRNLPFYERLGFTVTADVEVPEGPRTWCMTRKPGA

SEQ ID NO: 15813 - protein, 1226 aa, Artificial Sequence
  Synthetic Polypeptide
MALPVTALLLPLALLLHAARPEVQLLESGGGLVQPGGSLRLSCAASGFTFSSYAMSWVRQAPGKGLEWVSSISGSGDYIYYADSVKGRFTISRDISKNTLYLQMNSLRAEDTAVYYCAKEGTGANSSLADYRGQGTLVTVSSGGGSGGGSQVQLVESGGGLVQAGDSVTLSCTASGRTFSSYALAWFRQRPGKEREFVAGLRWGGPTNYADSVKDRFTISGDSAKHTMYLQMNSLKPEDTAVYYCGYNPGGWAVPSQYEYDSWGQGTQVTVSSGTGGGGSGGGGSGGGGSEFDIQMTQSPSSLSASVGDRVTITCKASDHINNWLAWYQQKPGQAPKLLIYGATTLETGVPSRFSGSGSGTDYTLTISSLQPEDFATYYCQQSWNTPWTFGQGTKLEIKRLEDLKNVFPPEVAVFEPSEAEISHTQKATLVCLATGFYPDHVELSWWVNGKEVHSGVSTDPQPLKEQPALNDSRYCLSSRLRVSATFWQNPRNHFRCQVQFYGLSENDEWTQDRAKPVTQIVSAEAWGRADCGSQSFGLLDPKLCYLLDGILFIYGVILTALFLRVKFSRSADAPAYQQGQNQLYNELNLGRREEYDVLDKRRGRDPEMGGKPQRRKNPQEGLYNELQKDKMAEAYSEIGMKGERRRGKGHDGLYQGLSTATKDTYDALHMQALPPRRAKRSGSGATNFSLLKQAGDVEENPGPTSMDWIWRILFLVGAATGAHSGPQVQLQESGGGLAQAGGSLRLSCAASGRTFSMGWFRQAPGKEREFVAAITYSGGSPYYASSVRGRFTISRDNAKNTVYLQMNSLKPEDTAVYYCAANPTYGSDWNAENWGQGTQVTVSSGSGGGGSGGGGSGGGGSFEQVQLQQPGAELVKPGASVKMSCKASGYAFSSYWINWMKQKPGQGLEWIGQIYPGDGDTNYNGKFKGRATLTADTSSSTAYMQLSSLTSEDSAVYFCARSITTVVGCAMDYWGQGTSVTVSSTRIQNPDPAVYQLRDSKSSDKSVCLFTDFDSQTNVSQSKDSDVYITDKTVLDMRSMDFKSNSAVAWSNKSDFACANAFNNSIIPEDTFFPSPESSCGTQSFGLLDPKLCYLLDGILFIYGVILTALFLRVKFSRSADAPAYQQGQNQLYNELNLGRREEYDVLDKRRGRDPEMGGKPQRRKNPQEGLYNELQKDKMAEAYSEIGMKGERRRGKGHDGLYQGLSTATKDTYDALHMQALPPR

SEQ ID NO: 15814 - protein, 1226 aa, Artificial Sequence
  Synthetic Polypeptide
MALPVTALLLPLALLLHAARPEVQLLESGGGLVQPGGSLRLSCAASGFTFSSYAMSWVRQAPGKGLEWVSSISGSGDYIYYADSVKGRFTISRDISKNTLYLQMNSLRAEDTAVYYCAKEGTGANSSLADYRGQGTLVTVSSGGGSGGGSQVQLVESGGGLVQAGDSVTLSCTASGRTFSSYALAWFRQRPGKEREFVAGLRWGGPTNYADSVKDRFTISGDSAKHTMYLQMNSLKPEDTAVYYCGYNPGGWAVPSQYEYDSWGQGTQVTVSSGTGGGGSGGGGSGGGGSEFDIQMTQSPSSLSASVGDRVTITCKASDHINNWLAWYQQKPGQAPKLLIYGATTLETGVPSRFSGSGSGTDYTLTISSLQPEDFATYYCQQSWNTPWTFGQGTKLEIKRLEDLKNVFPPEVAVFEPSKAEIAHTQKATLVCLATGFYPDHVELSWWVNGKEVHSGVCTDPQPLKEQPALNDSRYCLSSRLRVSATFWQNPRNHFRCQVQFYGLSENDEWTQDRAKPVTQIVSAEAWGRADCGSQSFGLLDPKLCYLLDGILFIYGVILTALFLRVKFSRSADAPAYQQGQNQLYNELNLGRREEYDVLDKRRGRDPEMGGKPQRRKNPQEGLYNELQKDKMAEAYSEIGMKGERRRGKGHDGLYQGLSTATKDTYDALHMQALPPRRAKRSGSGATNFSLLKQAGDVEENPGPTSMDWIWRILFLVGAATGAHSGPQVQLQESGGGLAQAGGSLRLSCAASGRTFSMGWFRQAPGKEREFVAAITYSGGSPYYASSVRGRFTISRDNAKNTVYLQMNSLKPEDTAVYYCAANPTYGSDWNAENWGQGTQVTVSSGSGGGGSGGGGSGGGGSFEQVQLQQPGAELVKPGASVKMSCKASGYAFSSYWINWMKQKPGQGLEWIGQIYPGDGDTNYNGKFKGRATLTADTSSSTAYMQLSSLTSEDSAVYFCARSITTVVGCAMDYWGQGTSVTVSSTRIQNPDPAVYQLRDSKSSDKSVCLFTDFDSQTNVSQSKDSDVYITDKCVLDMRSMDFKSNSAVAWSNKSDFACANAFNNSIIPEDTFFPSSDVPCGTQSFGLLDPKLCYLLDGILFIYGVILTALFLRVKFSRSADAPAYQQGQNQLYNELNLGRREEYDVLDKRRGRDPEMGGKPQRRKNPQEGLYNELQKDKMAEAYSEIGMKGERRRGKGHDGLYQGLSTATKDTYDALHMQALPPR

SEQ ID NO: 15815 - protein, 1297 aa, Artificial Sequence
  Synthetic Polypeptide
MALPVTALLLPLALLLHAARPEVQLLESGGGLVQPGGSLRLSCAASGFTFSSYAMSWVRQAPGKGLEWVSSISGSGDYIYYADSVKGRFTISRDISKNTLYLQMNSLRAEDTAVYYCAKEGTGANSSLADYRGQGTLVTVSSGGGSGGGSQVQLVESGGGLVQAGDSVTLSCTASGRTFSSYALAWFRQRPGKEREFVAGLRWGGPTNYADSVKDRFTISGDSAKHTMYLQMNSLKPEDTAVYYCGYNPGGWAVPSQYEYDSWGQGTQVTVSSGTGGGGSGGGGSGGGGSEFDIQMTQSPSSLSASVGDRVTITCKASDHINNWLAWYQQKPGQAPKLLIYGATTLETGVPSRFSGSGSGTDYTLTISSLQPEDFATYYCQQSWNTPWTFGQGTKLEIKRLEGKPIPNPLLGLDSTGSGEDLKNVFPPEVAVFEPSEAEISHTQKATLVCLATGFYPDHVELSWWVNGKEVHSGVSTDPQPLKEQPALNDSRYCLSSRLRVSATFWQNPRNHFRCQVQFYGLSENDEWTQDRAKPVTQIVSAEAWGRADCGSQSFGLLDPKLCYLLDGILFIYGVILTALFLRVKFSRSADAPAYQQGQNQLYNELNLGRREEYDVLDKRRGRDPEMGGKPQRRKNPQEGLYNELQKDKMAEAYSEIGMKGERRRGKGHDGLYQGLSTATKDTYDALHMQALPPRRAKRSGSGATNFSLLKQAGDVEENPGPTSMDWIWRILFLVGAATGAHSGPQVQLQESGGGLAQAGGSLRLSCAASGRTFSMGWFRQAPGKEREFVAAITYSGGSPYYASSVRGRFTISRDNAKNTVYLQMNSLKPEDTAVYYCAANPTYGSDWNAENWGQGTQVTVSSGSGGGGSGGGGSGGGGSFEQVQLQQPGAELVKPGASVKMSCKASGYAFSSYWINWMKQKPGQGLEWIGQIYPGDGDTNYNGKFKGRATLTADTSSSTAYMQLSSLTSEDSAVYFCARSITTVVGCAMDYWGQGTSVTVSSTREQKLISEEDGSGIQNPDPAVYQLRDSKSSDKSVCLFTDFDSQTNVSQSKDSDVYITDKTVLDMRSMDFKSNSAVAWSNKSDFACANAFNNSIIPEDTFFPSPESSCGTQSFGLLDPKLCYLLDGILFIYGVILTALFLRSKRSRLLHSDYMNMTPRRPGPTRKHYQPYAPPRDFAAYRSRVKFSRSADAPAYQQGQNQLYNELNLGRREEYDVLDKRRGRDPEMGGKPQRRKNPQEGLYNELQKDKMAEAYSEIGMKGERRRGKGHDGLYQGLSTATKDTYDALHMQALPPR

SEQ ID NO: 15816 - protein, 1338 aa, Artificial Sequence
  Synthetic Polypeptide
MALPVTALLLPLALLLHAARPEVQLLESGGGLVQPGGSLRLSCAASGFTFSSYAMSWVRQAPGKGLEWVSSISGSGDYIYYADSVKGRFTISRDISKNTLYLQMNSLRAEDTAVYYCAKEGTGANSSLADYRGQGTLVTVSSGGGSGGGSQVQLVESGGGLVQAGDSVTLSCTASGRTFSSYALAWFRQRPGKEREFVAGLRWGGPTNYADSVKDRFTISGDSAKHTMYLQMNSLKPEDTAVYYCGYNPGGWAVPSQYEYDSWGQGTQVTVSSGTGGGGSGGGGSGGGGSEFDIQMTQSPSSLSASVGDRVTITCKASDHINNWLAWYQQKPGQAPKLLIYGATTLETGVPSRFSGSGSGTDYTLTISSLQPEDFATYYCQQSWNTPWTFGQGTKLEIKRLEGKPIPNPLLGLDSTGSGEDLKNVFPPEVAVFEPSEAEISHTQKATLVCLATGFYPDHVELSWWVNGKEVHSGVSTDPQPLKEQPALNDSRYCLSSRLRVSATFWQNPRNHFRCQVQFYGLSENDEWTQDRAKPVTQIVSAEAWGRADCGSQSFGLLDPKLCYLLDGILFIYGVILTALFLRSKRSRLLHSDYMNMTPRRPGPTRKHYQPYAPPRDFAAYRSRVKFSRSADAPAYQQGQNQLYNELNLGRREEYDVLDKRRGRDPEMGGKPQRRKNPQEGLYNELQKDKMAEAYSEIGMKGERRRGKGHDGLYQGLSTATKDTYDALHMQALPPRRAKRSGSGATNFSLLKQAGDVEENPGPTSMDWIWRILFLVGAATGAHSGPQVQLQESGGGLAQAGGSLRLSCAASGRTFSMGWFRQAPGKEREFVAAITYSGGSPYYASSVRGRFTISRDNAKNTVYLQMNSLKPEDTAVYYCAANPTYGSDWNAENWGQGTQVTVSSGSGGGGSGGGGSGGGGSFEQVQLQQPGAELVKPGASVKMSCKASGYAFSSYWINWMKQKPGQGLEWIGQIYPGDGDTNYNGKFKGRATLTADTSSSTAYMQLSSLTSEDSAVYFCARSITTVVGCAMDYWGQGTSVTVSSTREQKLISEEDGSGIQNPDPAVYQLRDSKSSDKSVCLFTDFDSQTNVSQSKDSDVYITDKTVLDMRSMDFKSNSAVAWSNKSDFACANAFNNSIIPEDTFFPSPESSCGTQSFGLLDPKLCYLLDGILFIYGVILTALFLRSKRSRLLHSDYMNMTPRRPGPTRKHYQPYAPPRDFAAYRSRVKFSRSADAPAYQQGQNQLYNELNLGRREEYDVLDKRRGRDPEMGGKPQRRKNPQEGLYNELQKDKMAEAYSEIGMKGERRRGKGHDGLYQGLSTATKDTYDALHMQALPPR

SEQ ID NO: 15817 - protein, 1299 aa, Artificial Sequence
  Synthetic Polypeptide
MALPVTALLLPLALLLHAARPEVQLLESGGGLVQPGGSLRLSCAASGFTFSSYAMSWVRQAPGKGLEWVSSISGSGDYIYYADSVKGRFTISRDISKNTLYLQMNSLRAEDTAVYYCAKEGTGANSSLADYRGQGTLVTVSSGGGSGGGSQVQLVESGGGLVQAGDSVTLSCTASGRTFSSYALAWFRQRPGKEREFVAGLRWGGPTNYADSVKDRFTISGDSAKHTMYLQMNSLKPEDTAVYYCGYNPGGWAVPSQYEYDSWGQGTQVTVSSGTGGGGSGGGGSGGGGSEFDIQMTQSPSSLSASVGDRVTITCKASDHINNWLAWYQQKPGQAPKLLIYGATTLETGVPSRFSGSGSGTDYTLTISSLQPEDFATYYCQQSWNTPWTFGQGTKLEIKRLEGKPIPNPLLGLDSTGSGEDLKNVFPPEVAVFEPSEAEISHTQKATLVCLATGFYPDHVELSWWVNGKEVHSGVSTDPQPLKEQPALNDSRYCLSSRLRVSATFWQNPRNHFRCQVQFYGLSENDEWTQDRAKPVTQIVSAEAWGRADCGSQSFGLLDPKLCYLLDGILFIYGVILTALFLRVKFSRSADAPAYQQGQNQLYNELNLGRREEYDVLDKRRGRDPEMGGKPQRRKNPQEGLYNELQKDKMAEAYSEIGMKGERRRGKGHDGLYQGLSTATKDTYDALHMQALPPRRAKRSGSGATNFSLLKQAGDVEENPGPTSMDWIWRILFLVGAATGAHSGPQVQLQESGGGLAQAGGSLRLSCAASGRTFSMGWFRQAPGKEREFVAAITYSGGSPYYASSVRGRFTISRDNAKNTVYLQMNSLKPEDTAVYYCAANPTYGSDWNAENWGQGTQVTVSSGSGGGGSGGGGSGGGGSFEQVQLQQPGAELVKPGASVKMSCKASGYAFSSYWINWMKQKPGQGLEWIGQIYPGDGDTNYNGKFKGRATLTADTSSSTAYMQLSSLTSEDSAVYFCARSITTVVGCAMDYWGQGTSVTVSSTREQKLISEEDLGSGIQNPDPAVYQLRDSKSSDKSVCLFTDFDSQTNVSQSKDSDVYITDKTVLDMRSMDFKSNSAVAWSNKSDFACANAFNNSIIPEDTFFPSPESSCGTQSFGLLDPKLCYLLDGILFIYGVILTALFLKRGRKKLLYIFKQPFMRPVQTTQEEDGCSCRFPEEEEGGCELRVKFSRSADAPAYQQGQNQLYNELNLGRREEYDVLDKRRGRDPEMGGKPQRRKNPQEGLYNELQKDKMAEAYSEIGMKGERRRGKGHDGLYQGLSTATKDTYDALHMQALPPR

SEQ ID NO: 15818 - protein, 1341 aa, Artificial Sequence
  Synthetic Polypeptide
MALPVTALLLPLALLLHAARPEVQLLESGGGLVQPGGSLRLSCAASGFTFSSYAMSWVRQAPGKGLEWVSSISGSGDYIYYADSVKGRFTISRDISKNTLYLQMNSLRAEDTAVYYCAKEGTGANSSLADYRGQGTLVTVSSGGGSGGGSQVQLVESGGGLVQAGDSVTLSCTASGRTFSSYALAWFRQRPGKEREFVAGLRWGGPTNYADSVKDRFTISGDSAKHTMYLQMNSLKPEDTAVYYCGYNPGGWAVPSQYEYDSWGQGTQVTVSSGTGGGGSGGGGSGGGGSEFDIQMTQSPSSLSASVGDRVTITCKASDHINNWLAWYQQKPGQAPKLLIYGATTLETGVPSRFSGSGSGTDYTLTISSLQPEDFATYYCQQSWNTPWTFGQGTKLEIKRLEGKPIPNPLLGLDSTGSGEDLKNVFPPEVAVFEPSEAEISHTQKATLVCLATGFYPDHVELSWWVNGKEVHSGVSTDPQPLKEQPALNDSRYCLSSRLRVSATFWQNPRNHFRCQVQFYGLSENDEWTQDRAKPVTQIVSAEAWGRADCGSQSFGLLDPKLCYLLDGILFIYGVILTALFLKRGRKKLLYIFKQPFMRPVQTTQEEDGCSCRFPEEEEGGCELRVKFSRSADAPAYQQGQNQLYNELNLGRREEYDVLDKRRGRDPEMGGKPQRRKNPQEGLYNELQKDKMAEAYSEIGMKGERRRGKGHDGLYQGLSTATKDTYDALHMQALPPRRAKRSGSGATNFSLLKQAGDVEENPGPTSMDWIWRILFLVGAATGAHSGPQVQLQESGGGLAQAGGSLRLSCAASGRTFSMGWFRQAPGKEREFVAAITYSGGSPYYASSVRGRFTISRDNAKNTVYLQMNSLKPEDTAVYYCAANPTYGSDWNAENWGQGTQVTVSSGSGGGGSGGGGSGGGGSFEQVQLQQPGAELVKPGASVKMSCKASGYAFSSYWINWMKQKPGQGLEWIGQIYPGDGDTNYNGKFKGRATLTADTSSSTAYMQLSSLTSEDSAVYFCARSITTVVGCAMDYWGQGTSVTVSSTREQKLISEEDLGSGIQNPDPAVYQLRDSKSSDKSVCLFTDFDSQTNVSQSKDSDVYITDKTVLDMRSMDFKSNSAVAWSNKSDFACANAFNNSIIPEDTFFPSPESSCGTQSFGLLDPKLCYLLDGILFIYGVILTALFLKRGRKKLLYIFKQPFMRPVQTTQEEDGCSCRFPEEEEGGCELRVKFSRSADAPAYQQGQNQLYNELNLGRREEYDVLDKRRGRDPEMGGKPQRRKNPQEGLYNELQKDKMAEAYSEIGMKGERRRGKGHDGLYQGLSTATKDTYDALHMQALPPR

SEQ ID NO: 15819 - protein, 1231 aa, Artificial Sequence
  Synthetic Polypeptide
MALPVTALLLPLALLLHAARPEVQLLESGGGLVQPGGSLRLSCAASGFTFSSYAMSWVRQAPGKGLEWVSSISGSGDYIYYADSVKGRFTISRDISKNTLYLQMNSLRAEDTAVYYCAKEGTGANSSLADYRGQGTLVTVSSGGGSGGGSQVQLVESGGGLVQAGDSVTLSCTASGRTFSSYALAWFRQRPGKEREFVAGLRWGGPTNYADSVKDRFTISGDSAKHTMYLQMNSLKPEDTAVYYCGYNPGGWAVPSQYEYDSWGQGTQVTVSSGTGGGGSGGGGSGGGGSEFDIQMTQSPSSLSASVGDRVTITCKASDHINNWLAWYQQKPGQAPKLLIYGATTLETGVPSRFSGSGSGTDYTLTISSLQPEDFATYYCQQSWNTPWTFGQGTKLEIKRLEQSFGLLDPKLCYLLDGILFIYGVILTALFLRVKFSRSADAPAYQQGQNQLYNELNLGRREEYDVLDKRRGRDPEMGGKPQRRKNPQEGLYNELQKDKMAEAYSEIGMKGERRRGKGHDGLYQGLSTATKDTYDALHMQALPPRRAKRSGSGATNFSLLKQAGDVEENPGPTSMDWIWRILFLVGAATGAHSGPQVQLQESGGGLAQAGGSLRLSCAASGRTFSMGWFRQAPGKEREFVAAITYSGGSPYYASSVRGRFTISRDNAKNTVYLQMNSLKPEDTAVYYCAANPTYGSDWNAENWGQGTQVTVSSGSGGGGSGGGGSGGGGSFEQVQLQQPGAELVKPGASVKMSCKASGYAFSSYWINWMKQKPGQGLEWIGQIYPGDGDTNYNGKFKGRATLTADTSSSTAYMQLSSLTSEDSAVYFCARSITTVVGCAMDYWGQGTSVTVSSTRQSFGLLDPKLCYLLDGILFIYGVILTALFLRVKFSRSADAPAYQQGQNQLYNELNLGRREEYDVLDKRRGRDPEMGGKPQRRKNPQEGLYNELQKDKMAEAYSEIGMKGERRRGKGHDGLYQGLSTATKDTYDALHMQALPPRRAKRSGSGVKQTLNFDLLKLAGDVESNPGPSRGHMTEYKPTVRLATRDDVPRAVRTLAAAFADYPATRHTVDPDRHIERVTELQELFLTRVGLDIGKVWVADDGAAVAVWTTPESVEAGAVFAEIGPRMAELSGSRLAAQQQMEGLLAPHRPKEPAWFLATVGVSPDHQGKGLGSAVVLPGVEAAERAGVPAFLETSAPRNLPFYERLGFTVTADVEVPEGPRTWCMTRKPGA

SEQ ID NO: 15820 - protein, 1056 aa, Artificial Sequence
  Synthetic Polypeptide
MALPVTALLLPLALLLHAARPEVQLLESGGGLVQPGGSLRLSCAASGFTFSSYAMSWVRQAPGKGLEWVSSISGSGDYIYYADSVKGRFTISRDISKNTLYLQMNSLRAEDTAVYYCAKEGTGANSSLADYRGQGTLVTVSSGGGSGGGSQVQLVESGGGLVQAGDSVTLSCTASGRTFSSYALAWFRQRPGKEREFVAGLRWGGPTNYADSVKDRFTISGDSAKHTMYLQMNSLKPEDTAVYYCGYNPGGWAVPSQYEYDSWGQGTQVTVSSGTGGGGSGGGGSGGGGSEFDIQMTQSPSSLSASVGDRVTITCKASDHINNWLAWYQQKPGQAPKLLIYGATTLETGVPSRFSGSGSGTDYTLTISSLQPEDFATYYCQQSWNTPWTFGQGTKLEIKRLEGQPKANPTVTLFPPSSEELQANKATLVCLISDFYPGAVTVAWKADGSPVKAGVETTKPSKQSNNKYAASSYLSLTPEQWKSHRSYSCQVTHEGSTVEKTVAPTECSPIKTDVITMDPKDNCSKDANDTLLLQLTNTSAYYMYLLLLLKSVVYFAIITCCLLRRTAFCCNGEKSRAKRSGSGATNFSLLKQAGDVEENPGPTSMDWIWRILFLVGAATGAHSGPQVQLQESGGGLAQAGGSLRLSCAASGRTFSMGWFRQAPGKEREFVAAITYSGGSPYYASSVRGRFTISRDNAKNTVYLQMNSLKPEDTAVYYCAANPTYGSDWNAENWGQGTQVTVSSGSGGGGSGGGGSGGGGSFEQVQLQQPGAELVKPGASVKMSCKASGYAFSSYWINWMKQKPGQGLEWIGQIYPGDGDTNYNGKFKGRATLTADTSSSTAYMQLSSLTSEDSAVYFCARSITTVVGCAMDYWGQGTSVTVSSTRASTKGPSVFPLAPSSKSTSGGTAALGCLVKDYFPEPVTVSWNSGALTSGVHTFPAVLQSSGLYSLSSVVTVPSSSLGTQTYICNVNHKPSNTKVDKRVEPKSCEVKTDSTDHVKPKETENTKQPSKSCHKPKAIVHTEKVNMMSLTVLGLRMLFAKTVAVNFLLTAKLFFL

SEQ ID NO: 15821 - protein, 1034 aa, Artificial Sequence
  Synthetic Polypeptide
MALPVTALLLPLALLLHAARPEVQLLESGGGLVQPGGSLRLSCAASGFTFSSYAMSWVRQAPGKGLEWVSSISGSGDYIYYADSVKGRFTISRDISKNTLYLQMNSLRAEDTAVYYCAKEGTGANSSLADYRGQGTLVTVSSGGGSGGGSQVQLVESGGGLVQAGDSVTLSCTASGRTFSSYALAWFRQRPGKEREFVAGLRWGGPTNYADSVKDRFTISGDSAKHTMYLQMNSLKPEDTAVYYCGYNPGGWAVPSQYEYDSWGQGTQVTVSSGTGGGGSGGGGSGGGGSEFDIQMTQSPSSLSASVGDRVTITCKASDHINNWLAWYQQKPGQAPKLLIYGATTLETGVPSRFSGSGSGTDYTLTISSLQPEDFATYYCQQSWNTPWTFGQGTKLEIKRLEGQPKANPTVTLFPPSSEELQANKATLVCLISDFYPGAVTVAWKADGSPVKAGVETTKPSKQSNNKYAASSYLSLTPEQWKSHRSYSCQVTHEGSTVEKTVAPTECSGRADCGITSASYHQGVLSATILYEILLGKATLYAVLVSALVLMAMVKRKDSRGRAKRSGSGATNFSLLKQAGDVEENPGPTSMDWIWRILFLVGAATGAHSGPQVQLQESGGGLAQAGGSLRLSCAASGRTFSMGWFRQAPGKEREFVAAITYSGGSPYYASSVRGRFTISRDNAKNTVYLQMNSLKPEDTAVYYCAANPTYGSDWNAENWGQGTQVTVSSGSGGGGSGGGGSGGGGSFEQVQLQQPGAELVKPGASVKMSCKASGYAFSSYWINWMKQKPGQGLEWIGQIYPGDGDTNYNGKFKGRATLTADTSSSTAYMQLSSLTSEDSAVYFCARSITTVVGCAMDYWGQGTSVTVSSTRASTKGPSVFPLAPSSKSTSGGTAALGCLVKDYFPEPVTVSWNSGALTSGVHTFPAVLQSSGLYSLSSVVTVPSSSLGTQTYICNVNHKPSNTKVDKRVEPKSCIPEDTFFPSSDVPCDVKLVEKSFETDTNLNFQNLSVIGFRILLLKVAGFNLLMTLRLWSS

SEQ ID NO: 15822 - protein, 1034 aa, Artificial Sequence
  Synthetic Polypeptide
MALPVTALLLPLALLLHAARPEVQLLESGGGLVQPGGSLRLSCAASGFTFSSYAMSWVRQAPGKGLEWVSSISGSGDYIYYADSVKGRFTISRDISKNTLYLQMNSLRAEDTAVYYCAKEGTGANSSLADYRGQGTLVTVSSGGGSGGGSQVQLVESGGGLVQAGDSVTLSCTASGRTFSSYALAWFRQRPGKEREFVAGLRWGGPTNYADSVKDRFTISGDSAKHTMYLQMNSLKPEDTAVYYCGYNPGGWAVPSQYEYDSWGQGTQVTVSSGTGGGGSGGGGSGGGGSEFDIQMTQSPSSLSASVGDRVTITCKASDHINNWLAWYQQKPGQAPKLLIYGATTLETGVPSRFSGSGSGTDYTLTISSLQPEDFATYYCQQSWNTPWTFGQGTKLEIKRLEGQPKANPTVTLFPPSSEELQANKATLVCLISDFYPGAVTVAWKADGSPVKAGVETTKPSKQSNNKYAASSYLSLTPEQWKSHRSYSCQVTHEGSTVEKTVAPTECSGRADCGFTSESYQQGVLSATILYEILLGKATLYAVLVSALVLMAMVKRKDSRGRAKRSGSGATNFSLLKQAGDVEENPGPTSMDWIWRILFLVGAATGAHSGPQVQLQESGGGLAQAGGSLRLSCAASGRTFSMGWFRQAPGKEREFVAAITYSGGSPYYASSVRGRFTISRDNAKNTVYLQMNSLKPEDTAVYYCAANPTYGSDWNAENWGQGTQVTVSSGSGGGGSGGGGSGGGGSFEQVQLQQPGAELVKPGASVKMSCKASGYAFSSYWINWMKQKPGQGLEWIGQIYPGDGDTNYNGKFKGRATLTADTSSSTAYMQLSSLTSEDSAVYFCARSITTVVGCAMDYWGQGTSVTVSSTRASTKGPSVFPLAPSSKSTSGGTAALGCLVKDYFPEPVTVSWNSGALTSGVHTFPAVLQSSGLYSLSSVVTVPSSSLGTQTYICNVNHKPSNTKVDKRVEPKSCIPEDTFFPSPESSCDVKLVEKSFETDTNLNFQNLSVIGFRILLLKVAGFNLLMTLRLWSS

SEQ ID NO: 15823 - protein, 1000 aa, Artificial Sequence
  Synthetic Polypeptide
MALPVTALLLPLALLLHAARPEVQLLESGGGLVQPGGSLRLSCAASGFTFSSYAMSWVRQAPGKGLEWVSSISGSGDYIYYADSVKGRFTISRDISKNTLYLQMNSLRAEDTAVYYCAKEGTGANSSLADYRGQGTLVTVSSGGGSGGGSQVQLVESGGGLVQAGDSVTLSCTASGRTFSSYALAWFRQRPGKEREFVAGLRWGGPTNYADSVKDRFTISGDSAKHTMYLQMNSLKPEDTAVYYCGYNPGGWAVPSQYEYDSWGQGTQVTVSSLEGQPKANPTVTLFPPSSEELQANKATLVCLISDFYPGAVTVAWKADGSPVKAGVETTKPSKQSNNKYAASSYLSLTPEQWKSHRSYSCQVTHEGSTVEKTVAPTECSGRADCGFTSESYQQGVLSATILYEILLGKATLYAVLVSALVLMAMVKRKDSRGRAKRSGSGATNFSLLKQAGDVEENPGPTSMDWIWRILFLVGAATGAHSGPQVQLQESGGGLAQAGGSLRLSCAASGRTFSMGWFRQAPGKEREFVAAITYSGGSPYYASSVRGRFTISRDNAKNTVYLQMNSLKPEDTAVYYCAANPTYGSDWNAENWGQGTQVTVSSTRASTKGPSVFPLAPSSKSTSGGTAALGCLVKDYFPEPVTVSWNSGALTSGVHTFPAVLQSSGLYSLSSVVTVPSSSLGTQTYICNVNHKPSNTKVDKRVEPKSCIPEDTFFPSPESSCDVKLVEKSFETDTNLNFQNLSVIGFRILLLKVAGFNLLMTLRLWSSRAKRSGSGVKQTLNFDLLKLAGDVESNPGPSRGHMTEYKPTVRLATRDDVPRAVRTLAAAFADYPATRHTVDPDRHIERVTELQELFLTRVGLDIGKVWVADDGAAVAVWTTPESVEAGAVFAEIGPRMAELSGSRLAAQQQMEGLLAPHRPKEPAWFLATVGVSPDHQGKGLGSAVVLPGVEAAERAGVPAFLETSAPRNLPFYERLGFTVTADVEVPEGPRTWCMTRKPGA

SEQ ID NO: 15824 - protein, 767 aa, Artificial Sequence
  Synthetic Polypeptide
MALPVTALLLPLALLLHAARPEVQLLESGGGLVQPGGSLRLSCAASGFTFSSYAMSWVRQAPGKGLEWVSSISGSGDYIYYADSVKGRFTISRDISKNTLYLQMNSLRAEDTAVYYCAKEGTGANSSLADYRGQGTLVTVSSGGGSGGGSQVQLVESGGGLVQAGDSVTLSCTASGRTFSSYALAWFRQRPGKEREFVAGLRWGGPTNYADSVKDRFTISGDSAKHTMYLQMNSLKPEDTAVYYCGYNPGGWAVPSQYEYDSWGQGTQVTVSSLEGQPKANPTVTLFPPSSEELQANKATLVCLISDFYPGAVTVAWKADGSPVKAGVETTKPSKQSNNKYAASSYLSLTPEQWKSHRSYSCQVTHEGSTVEKTVAPTECSGRADCGFTSESYQQGVLSATILYEILLGKATLYAVLVSALVLMAMVKRKDSRGRAKRSGSGATNFSLLKQAGDVEENPGPTSMDWIWRILFLVGAATGAHSGPQVQLQESGGGLAQAGGSLRLSCAASGRTFSMGWFRQAPGKEREFVAAITYSGGSPYYASSVRGRFTISRDNAKNTVYLQMNSLKPEDTAVYYCAANPTYGSDWNAENWGQGTQVTVSSTRASTKGPSVFPLAPSSKSTSGGTAALGCLVKDYFPEPVTVSWNSGALTSGVHTFPAVLQSSGLYSLSSVVTVPSSSLGTQTYICNVNHKPSNTKVDKRVEPKSCIPEDTFFPSPESSCDVKLVEKSFETDTNLNFQNLSVIGFRILLLKVAGFNLLMTLRLWSS

SEQ ID NO: 15825 - protein, 795 aa, Artificial Sequence
  Synthetic Polypeptide
MALPVTALLLPLALLLHAARPEVQLLESGGGLVQPGGSLRLSCAASGFTFSSYAMSWVRQAPGKGLEWVSSISGSGDYIYYADSVKGRFTISRDISKNTLYLQMNSLRAEDTAVYYCAKEGTGANSSLADYRGQGTLVTVSSGGGSGGGSQVQLVESGGGLVQAGDSVTLSCTASGRTFSSYALAWFRQRPGKEREFVAGLRWGGPTNYADSVKDRFTISGDSAKHTMYLQMNSLKPEDTAVYYCGYNPGGWAVPSQYEYDSWGQGTQVTVSSLEGSGRADCGFTSESYQQGVLSATILYEILLGKATLYAVLVSALVLMAMVKRKDSRGRAKRSGSGATNFSLLKQAGDVEENPGPTSMDWIWRILFLVGAATGAHSGPQVQLQESGGGLAQAGGSLRLSCAASGRTFSMGWFRQAPGKEREFVAAITYSGGSPYYASSVRGRFTISRDNAKNTVYLQMNSLKPEDTAVYYCAANPTYGSDWNAENWGQGTQVTVSSTRGSIPEDTFFPSPESSCDVKLVEKSFETDTNLNFQNLSVIGFRILLLKVAGFNLLMTLRLWSSRAKRSGSGVKQTLNFDLLKLAGDVESNPGPSRGHMTEYKPTVRLATRDDVPRAVRTLAAAFADYPATRHTVDPDRHIERVTELQELFLTRVGLDIGKVWVADDGAAVAVWTTPESVEAGAVFAEIGPRMAELSGSRLAAQQQMEGLLAPHRPKEPAWFLATVGVSPDHQGKGLGSAVVLPGVEAAERAGVPAFLETSAPRNLPFYERLGFTVTADVEVPEGPRTWCMTRKPGA

SEQ ID NO: 15826 - protein, 562 aa, Artificial Sequence
  Synthetic Polypeptide
MALPVTALLLPLALLLHAARPEVQLLESGGGLVQPGGSLRLSCAASGFTFSSYAMSWVRQAPGKGLEWVSSISGSGDYIYYADSVKGRFTISRDISKNTLYLQMNSLRAEDTAVYYCAKEGTGANSSLADYRGQGTLVTVSSGGGSGGGSQVQLVESGGGLVQAGDSVTLSCTASGRTFSSYALAWFRQRPGKEREFVAGLRWGGPTNYADSVKDRFTISGDSAKHTMYLQMNSLKPEDTAVYYCGYNPGGWAVPSQYEYDSWGQGTQVTVSSLEGSGRADCGFTSESYQQGVLSATILYEILLGKATLYAVLVSALVLMAMVKRKDSRGRAKRSGSGATNFSLLKQAGDVEENPGPTSMDWIWRILFLVGAATGAHSGPQVQLQESGGGLAQAGGSLRLSCAASGRTFSMGWFRQAPGKEREFVAAITYSGGSPYYASSVRGRFTISRDNAKNTVYLQMNSLKPEDTAVYYCAANPTYGSDWNAENWGQGTQVTVSSTRGSIPEDTFFPSPESSCDVKLVEKSFETDTNLNFQNLSVIGFRILLLKVAGFNLLMTLRLWSS

SEQ ID NO: 15827 - protein, 804 aa, Artificial Sequence
  Synthetic Polypeptide
MALPVTALLLPLALLLHAARPEVQLLESGGGLVQPGGSLRLSCAASGFTFSSYAMSWVRQAPGKGLEWVSSISGSGDYIYYADSVKGRFTISRDISKNTLYLQMNSLRAEDTAVYYCAKEGTGANSSLADYRGQGTLVTVSSGGGSGGGSQVQLVESGGGLVQAGDSVTLSCTASGRTFSSYALAWFRQRPGKEREFVAGLRWGGPTNYADSVKDRFTISGDSAKHTMYLQMNSLKPEDTAVYYCGYNPGGWAVPSQYEYDSWGQGTQVTVSSLEDKTHTCPPCPAGRADCGFTSESYQQGVLSATILYEILLGKATLYAVLVSALVLMAMVKRKDSRGRAKRSGSGATNFSLLKQAGDVEENPGPTSMDWIWRILFLVGAATGAHSGPQVQLQESGGGLAQAGGSLRLSCAASGRTFSMGWFRQAPGKEREFVAAITYSGGSPYYASSVRGRFTISRDNAKNTVYLQMNSLKPEDTAVYYCAANPTYGSDWNAENWGQGTQVTVSSTRGSIPEDTFFPSPESSCDVKLVEKSFETDTNLNFQNLSVIGFRILLLKVAGFNLLMTLRLWSSRAKRSGSGVKQTLNFDLLKLAGDVESNPGPSRGHMTEYKPTVRLATRDDVPRAVRTLAAAFADYPATRHTVDPDRHIERVTELQELFLTRVGLDIGKVWVADDGAAVAVWTTPESVEAGAVFAEIGPRMAELSGSRLAAQQQMEGLLAPHRPKEPAWFLATVGVSPDHQGKGLGSAVVLPGVEAAERAGVPAFLETSAPRNLPFYERLGFTVTADVEVPEGPRTWCMTRKPGA

SEQ ID NO: 15828 - protein, 804 aa, Artificial Sequence
  Synthetic Polypeptide
MALPVTALLLPLALLLHAARPEVQLLESGGGLVQPGGSLRLSCAASGFTFSSYAMSWVRQAPGKGLEWVSSISGSGDYIYYADSVKGRFTISRDISKNTLYLQMNSLRAEDTAVYYCAKEGTGANSSLADYRGQGTLVTVSSGGGSGGGSQVQLVESGGGLVQAGDSVTLSCTASGRTFSSYALAWFRQRPGKEREFVAGLRWGGPTNYADSVKDRFTISGDSAKHTMYLQMNSLKPEDTAVYYCGYNPGGWAVPSQYEYDSWGQGTQVTVSSLEGSGRADCGFTSESYQQGVLSATILYEILLGKATLYAVLVSALVLMAMVKRKDSRGRAKRSGSGATNFSLLKQAGDVEENPGPTSMDWIWRILFLVGAATGAHSGPQVQLQESGGGLAQAGGSLRLSCAASGRTFSMGWFRQAPGKEREFVAAITYSGGSPYYASSVRGRFTISRDNAKNTVYLQMNSLKPEDTAVYYCAANPTYGSDWNAENWGQGTQVTVSSTRDKTHTCPPCPAIPEDTFFPSPESSCDVKLVEKSFETDTNLNFQNLSVIGFRILLLKVAGFNLLMTLRLWSSRAKRSGSGVKQTLNFDLLKLAGDVESNPGPSRGHMTEYKPTVRLATRDDVPRAVRTLAAAFADYPATRHTVDPDRHIERVTELQELFLTRVGLDIGKVWVADDGAAVAVWTTPESVEAGAVFAEIGPRMAELSGSRLAAQQQMEGLLAPHRPKEPAWFLATVGVSPDHQGKGLGSAVVLPGVEAAERAGVPAFLETSAPRNLPFYERLGFTVTADVEVPEGPRTWCMTRKPGA

SEQ ID NO: 15829 - protein, 813 aa, Artificial Sequence
  Synthetic Polypeptide
MALPVTALLLPLALLLHAARPEVQLLESGGGLVQPGGSLRLSCAASGFTFSSYAMSWVRQAPGKGLEWVSSISGSGDYIYYADSVKGRFTISRDISKNTLYLQMNSLRAEDTAVYYCAKEGTGANSSLADYRGQGTLVTVSSGGGSGGGSQVQLVESGGGLVQAGDSVTLSCTASGRTFSSYALAWFRQRPGKEREFVAGLRWGGPTNYADSVKDRFTISGDSAKHTMYLQMNSLKPEDTAVYYCGYNPGGWAVPSQYEYDSWGQGTQVTVSSLEDKTHTCPPCPAGRADCGFTSESYQQGVLSATILYEILLGKATLYAVLVSALVLMAMVKRKDSRGRAKRSGSGATNFSLLKQAGDVEENPGPTSMDWIWRILFLVGAATGAHSGPQVQLQESGGGLAQAGGSLRLSCAASGRTFSMGWFRQAPGKEREFVAAITYSGGSPYYASSVRGRFTISRDNAKNTVYLQMNSLKPEDTAVYYCAANPTYGSDWNAENWGQGTQVTVSSTRDKTHTCPPCPAIPEDTFFPSPESSCDVKLVEKSFETDTNLNFQNLSVIGFRILLLKVAGFNLLMTLRLWSSRAKRSGSGVKQTLNFDLLKLAGDVESNPGPSRGHMTEYKPTVRLATRDDVPRAVRTLAAAFADYPATRHTVDPDRHIERVTELQELFLTRVGLDIGKVWVADDGAAVAVWTTPESVEAGAVFAEIGPRMAELSGSRLAAQQQMEGLLAPHRPKEPAWFLATVGVSPDHQGKGLGSAVVLPGVEAAERAGVPAFLETSAPRNLPFYERLGFTVTADVEVPEGPRTWCMTRKPGA

SEQ ID NO: 15830 - protein, 580 aa, Artificial Sequence
  Synthetic Polypeptide
MALPVTALLLPLALLLHAARPEVQLLESGGGLVQPGGSLRLSCAASGFTFSSYAMSWVRQAPGKGLEWVSSISGSGDYIYYADSVKGRFTISRDISKNTLYLQMNSLRAEDTAVYYCAKEGTGANSSLADYRGQGTLVTVSSGGGSGGGSQVQLVESGGGLVQAGDSVTLSCTASGRTFSSYALAWFRQRPGKEREFVAGLRWGGPTNYADSVKDRFTISGDSAKHTMYLQMNSLKPEDTAVYYCGYNPGGWAVPSQYEYDSWGQGTQVTVSSLEDKTHTCPPCPAGRADCGFTSESYQQGVLSATILYEILLGKATLYAVLVSALVLMAMVKRKDSRGRAKRSGSGATNFSLLKQAGDVEENPGPTSMDWIWRILFLVGAATGAHSGPQVQLQESGGGLAQAGGSLRLSCAASGRTFSMGWFRQAPGKEREFVAAITYSGGSPYYASSVRGRFTISRDNAKNTVYLQMNSLKPEDTAVYYCAANPTYGSDWNAENWGQGTQVTVSSTRDKTHTCPPCPAIPEDTFFPSPESSCDVKLVEKSFETDTNLNFQNLSVIGFRILLLKVAGFNLLMTLRLWSS

SEQ ID NO: 15831 - protein, 571 aa, Artificial Sequence
  Synthetic Polypeptide
MALPVTALLLPLALLLHAARPEVQLLESGGGLVQPGGSLRLSCAASGFTFSSYAMSWVRQAPGKGLEWVSSISGSGDYIYYADSVKGRFTISRDISKNTLYLQMNSLRAEDTAVYYCAKEGTGANSSLADYRGQGTLVTVSSGGGSGGGSQVQLVESGGGLVQAGDSVTLSCTASGRTFSSYALAWFRQRPGKEREFVAGLRWGGPTNYADSVKDRFTISGDSAKHTMYLQMNSLKPEDTAVYYCGYNPGGWAVPSQYEYDSWGQGTQVTVSSLEGSGRADCGFTSESYQQGVLSATILYEILLGKATLYAVLVSALVLMAMVKRKDSRGRAKRSGSGATNFSLLKQAGDVEENPGPTSMDWIWRILFLVGAATGAHSGPQVQLQESGGGLAQAGGSLRLSCAASGRTFSMGWFRQAPGKEREFVAAITYSGGSPYYASSVRGRFTISRDNAKNTVYLQMNSLKPEDTAVYYCAANPTYGSDWNAENWGQGTQVTVSSTRDKTHTCPPCPAIPEDTFFPSPESSCDVKLVEKSFETDTNLNFQNLSVIGFRILLLKVAGFNLLMTLRLWSS

SEQ ID NO: 15832 - protein, 1022 aa, Artificial Sequence
  Synthetic Polypeptide
MALPVTALLLPLALLLHAARPEVQLLESGGGLVQPGGSLRLSCAASGFTFSSYAMSWVRQAPGKGLEWVSSISGSGDYIYYADSVKGRFTISRDISKNTLYLQMNSLRAEDTAVYYCAKEGTGANSSLADYRGQGTLVTVSSGGGSGGGSQVQLVESGGGLVQAGDSVTLSCTASGRTFSSYALAWFRQRPGKEREFVAGLRWGGPTNYADSVKDRFTISGDSAKHTMYLQMNSLKPEDTAVYYCGYNPGGWAVPSQYEYDSWGQGTQVTVSSLEGQPKANPTVTLFPPSSEELQANKATLVCLISDFYPGAVTVAWKADGSPVKAGVETTKPSKQSNNKYAASSYLSLTPEQWKSHRSYSCQVTHEGSTVEKTVAPTECSPIKTDVITMDPKDNCSKDANDTLLLQLTNTSAYYMYLLLLLKSVVYFAIITCCLLRRTAFCCNGEKSRAKRSGSGATNFSLLKQAGDVEENPGPTSMDWIWRILFLVGAATGAHSGPQVQLQESGGGLAQAGGSLRLSCAASGRTFSMGWFRQAPGKEREFVAAITYSGGSPYYASSVRGRFTISRDNAKNTVYLQMNSLKPEDTAVYYCAANPTYGSDWNAENWGQGTQVTVSSTRASTKGPSVFPLAPSSKSTSGGTAALGCLVKDYFPEPVTVSWNSGALTSGVHTFPAVLQSSGLYSLSSVVTVPSSSLGTQTYICNVNHKPSNTKVDKRVEPKSCEVKTDSTDHVKPKETENTKQPSKSCHKPKAIVHTEKVNMMSLTVLGLRMLFAKTVAVNFLLTAKLFFLRAKRSGSGVKQTLNFDLLKLAGDVESNPGPSRGHMTEYKPTVRLATRDDVPRAVRTLAAAFADYPATRHTVDPDRHIERVTELQELFLTRVGLDIGKVWVADDGAAVAVWTTPESVEAGAVFAEIGPRMAELSGSRLAAQQQMEGLLAPHRPKEPAWFLATVGVSPDHQGKGLGSAVVLPGVEAAERAGVPAFLETSAPRNLPFYERLGFTVTADVEVPEGPRTWCMTRKPGA

SEQ ID NO: 15833 - protein, 789 aa, Artificial Sequence
  Synthetic Polypeptide
MALPVTALLLPLALLLHAARPEVQLLESGGGLVQPGGSLRLSCAASGFTFSSYAMSWVRQAPGKGLEWVSSISGSGDYIYYADSVKGRFTISRDISKNTLYLQMNSLRAEDTAVYYCAKEGTGANSSLADYRGQGTLVTVSSGGGSGGGSQVQLVESGGGLVQAGDSVTLSCTASGRTFSSYALAWFRQRPGKEREFVAGLRWGGPTNYADSVKDRFTISGDSAKHTMYLQMNSLKPEDTAVYYCGYNPGGWAVPSQYEYDSWGQGTQVTVSSLEGQPKANPTVTLFPPSSEELQANKATLVCLISDFYPGAVTVAWKADGSPVKAGVETTKPSKQSNNKYAASSYLSLTPEQWKSHRSYSCQVTHEGSTVEKTVAPTECSPIKTDVITMDPKDNCSKDANDTLLLQLTNTSAYYMYLLLLLKSVVYFAIITCCLLRRTAFCCNGEKSRAKRSGSGATNFSLLKQAGDVEENPGPTSMDWIWRILFLVGAATGAHSGPQVQLQESGGGLAQAGGSLRLSCAASGRTFSMGWFRQAPGKEREFVAAITYSGGSPYYASSVRGRFTISRDNAKNTVYLQMNSLKPEDTAVYYCAANPTYGSDWNAENWGQGTQVTVSSTRASTKGPSVFPLAPSSKSTSGGTAALGCLVKDYFPEPVTVSWNSGALTSGVHTFPAVLQSSGLYSLSSVVTVPSSSLGTQTYICNVNHKPSNTKVDKRVEPKSCEVKTDSTDHVKPKETENTKQPSKSCHKPKAIVHTEKVNMMSLTVLGLRMLFAKTVAVNFLLTAKLFFL

SEQ ID NO: 15834 - protein, 817 aa, Artificial Sequence
  Synthetic Polypeptide
MALPVTALLLPLALLLHAARPEVQLLESGGGLVQPGGSLRLSCAASGFTFSSYAMSWVRQAPGKGLEWVSSISGSGDYIYYADSVKGRFTISRDISKNTLYLQMNSLRAEDTAVYYCAKEGTGANSSLADYRGQGTLVTVSSGGGSGGGSQVQLVESGGGLVQAGDSVTLSCTASGRTFSSYALAWFRQRPGKEREFVAGLRWGGPTNYADSVKDRFTISGDSAKHTMYLQMNSLKPEDTAVYYCGYNPGGWAVPSQYEYDSWGQGTQVTVSSLEGSPIKTDVITMDPKDNCSKDANDTLLLQLTNTSAYYMYLLLLLKSVVYFAIITCCLLRRTAFCCNGEKSRAKRSGSGATNFSLLKQAGDVEENPGPTSMDWIWRILFLVGAATGAHSGPQVQLQESGGGLAQAGGSLRLSCAASGRTFSMGWFRQAPGKEREFVAAITYSGGSPYYASSVRGRFTISRDNAKNTVYLQMNSLKPEDTAVYYCAANPTYGSDWNAENWGQGTQVTVSSTRGSEVKTDSTDHVKPKETENTKQPSKSCHKPKAIVHTEKVNMMSLTVLGLRMLFAKTVAVNFLLTAKLFFLRAKRSGSGVKQTLNFDLLKLAGDVESNPGPSRGHMTEYKPTVRLATRDDVPRAVRTLAAAFADYPATRHTVDPDRHIERVTELQELFLTRVGLDIGKVWVADDGAAVAVWTTPESVEAGAVFAEIGPRMAELSGSRLAAQQQMEGLLAPHRPKEPAWFLATVGVSPDHQGKGLGSAVVLPGVEAAERAGVPAFLETSAPRNLPFYERLGFTVTADVEVPEGPRTWCMTRKPGA

SEQ ID NO: 15835 - protein, 584 aa, Artificial Sequence
  Synthetic Polypeptide
MALPVTALLLPLALLLHAARPEVQLLESGGGLVQPGGSLRLSCAASGFTFSSYAMSWVRQAPGKGLEWVSSISGSGDYIYYADSVKGRFTISRDISKNTLYLQMNSLRAEDTAVYYCAKEGTGANSSLADYRGQGTLVTVSSGGGSGGGSQVQLVESGGGLVQAGDSVTLSCTASGRTFSSYALAWFRQRPGKEREFVAGLRWGGPTNYADSVKDRFTISGDSAKHTMYLQMNSLKPEDTAVYYCGYNPGGWAVPSQYEYDSWGQGTQVTVSSLEGSPIKTDVITMDPKDNCSKDANDTLLLQLTNTSAYYMYLLLLLKSVVYFAIITCCLLRRTAFCCNGEKSRAKRSGSGATNFSLLKQAGDVEENPGPTSMDWIWRILFLVGAATGAHSGPQVQLQESGGGLAQAGGSLRLSCAASGRTFSMGWFRQAPGKEREFVAAITYSGGSPYYASSVRGRFTISRDNAKNTVYLQMNSLKPEDTAVYYCAANPTYGSDWNAENWGQGTQVTVSSTRGSEVKTDSTDHVKPKETENTKQPSKSCHKPKAIVHTEKVNMMSLTVLGLRMLFAKTVAVNFLLTAKLFFL

SEQ ID NO: 15836 - protein, 826 aa, Artificial Sequence
  Synthetic Polypeptide
MALPVTALLLPLALLLHAARPEVQLLESGGGLVQPGGSLRLSCAASGFTFSSYAMSWVRQAPGKGLEWVSSISGSGDYIYYADSVKGRFTISRDISKNTLYLQMNSLRAEDTAVYYCAKEGTGANSSLADYRGQGTLVTVSSGGGSGGGSQVQLVESGGGLVQAGDSVTLSCTASGRTFSSYALAWFRQRPGKEREFVAGLRWGGPTNYADSVKDRFTISGDSAKHTMYLQMNSLKPEDTAVYYCGYNPGGWAVPSQYEYDSWGQGTQVTVSSLEDKTHTCPPCPAPIKTDVITMDPKDNCSKDANDTLLLQLTNTSAYYMYLLLLLKSVVYFAIITCCLLRRTAFCCNGEKSRAKRSGSGATNFSLLKQAGDVEENPGPTSMDWIWRILFLVGAATGAHSGPQVQLQESGGGLAQAGGSLRLSCAASGRTFSMGWFRQAPGKEREFVAAITYSGGSPYYASSVRGRFTISRDNAKNTVYLQMNSLKPEDTAVYYCAANPTYGSDWNAENWGQGTQVTVSSTRGSEVKTDSTDHVKPKETENTKQPSKSCHKPKAIVHTEKVNMMSLTVLGLRMLFAKTVAVNFLLTAKLFFLRAKRSGSGVKQTLNFDLLKLAGDVESNPGPSRGHMTEYKPTVRLATRDDVPRAVRTLAAAFADYPATRHTVDPDRHIERVTELQELFLTRVGLDIGKVWVADDGAAVAVWTTPESVEAGAVFAEIGPRMAELSGSRLAAQQQMEGLLAPHRPKEPAWFLATVGVSPDHQGKGLGSAVVLPGVEAAERAGVPAFLETSAPRNLPFYERLGFTVTADVEVPEGPRTWCMTRKPGA

SEQ ID NO: 15837 - protein, 826 aa, Artificial Sequence
  Synthetic Polypeptide
MALPVTALLLPLALLLHAARPEVQLLESGGGLVQPGGSLRLSCAASGFTFSSYAMSWVRQAPGKGLEWVSSISGSGDYIYYADSVKGRFTISRDISKNTLYLQMNSLRAEDTAVYYCAKEGTGANSSLADYRGQGTLVTVSSGGGSGGGSQVQLVESGGGLVQAGDSVTLSCTASGRTFSSYALAWFRQRPGKEREFVAGLRWGGPTNYADSVKDRFTISGDSAKHTMYLQMNSLKPEDTAVYYCGYNPGGWAVPSQYEYDSWGQGTQVTVSSLEGSPIKTDVITMDPKDNCSKDANDTLLLQLTNTSAYYMYLLLLLKSVVYFAIITCCLLRRTAFCCNGEKSRAKRSGSGATNFSLLKQAGDVEENPGPTSMDWIWRILFLVGAATGAHSGPQVQLQESGGGLAQAGGSLRLSCAASGRTFSMGWFRQAPGKEREFVAAITYSGGSPYYASSVRGRFTISRDNAKNTVYLQMNSLKPEDTAVYYCAANPTYGSDWNAENWGQGTQVTVSSTRDKTHTCPPCPAEVKTDSTDHVKPKETENTKQPSKSCHKPKAIVHTEKVNMMSLTVLGLRMLFAKTVAVNFLLTAKLFFLRAKRSGSGVKQTLNFDLLKLAGDVESNPGPSRGHMTEYKPTVRLATRDDVPRAVRTLAAAFADYPATRHTVDPDRHIERVTELQELFLTRVGLDIGKVWVADDGAAVAVWTTPESVEAGAVFAEIGPRMAELSGSRLAAQQQMEGLLAPHRPKEPAWFLATVGVSPDHQGKGLGSAVVLPGVEAAERAGVPAFLETSAPRNLPFYERLGFTVTADVEVPEGPRTWCMTRKPGA

SEQ ID NO: 15838 - protein, 835 aa, Artificial Sequence
  Synthetic Polypeptide
MALPVTALLLPLALLLHAARPEVQLLESGGGLVQPGGSLRLSCAASGFTFSSYAMSWVRQAPGKGLEWVSSISGSGDYIYYADSVKGRFTISRDISKNTLYLQMNSLRAEDTAVYYCAKEGTGANSSLADYRGQGTLVTVSSGGGSGGGSQVQLVESGGGLVQAGDSVTLSCTASGRTFSSYALAWFRQRPGKEREFVAGLRWGGPTNYADSVKDRFTISGDSAKHTMYLQMNSLKPEDTAVYYCGYNPGGWAVPSQYEYDSWGQGTQVTVSSLEDKTHTCPPCPAPIKTDVITMDPKDNCSKDANDTLLLQLTNTSAYYMYLLLLLKSVVYFAIITCCLLRRTAFCCNGEKSRAKRSGSGATNFSLLKQAGDVEENPGPTSMDWIWRILFLVGAATGAHSGPQVQLQESGGGLAQAGGSLRLSCAASGRTFSMGWFRQAPGKEREFVAAITYSGGSPYYASSVRGRFTISRDNAKNTVYLQMNSLKPEDTAVYYCAANPTYGSDWNAENWGQGTQVTVSSTRDKTHTCPPCPAEVKTDSTDHVKPKETENTKQPSKSCHKPKAIVHTEKVNMMSLTVLGLRMLFAKTVAVNFLLTAKLFFLRAKRSGSGVKQTLNFDLLKLAGDVESNPGPSRGHMTEYKPTVRLATRDDVPRAVRTLAAAFADYPATRHTVDPDRHIERVTELQELFLTRVGLDIGKVWVADDGAAVAVWTTPESVEAGAVFAEIGPRMAELSGSRLAAQQQMEGLLAPHRPKEPAWFLATVGVSPDHQGKGLGSAVVLPGVEAAERAGVPAFLETSAPRNLPFYERLGFTVTADVEVPEGPRTWCMTRKPGA

SEQ ID NO: 15839 - protein, 602 aa, Artificial Sequence
  Synthetic Polypeptide
MALPVTALLLPLALLLHAARPEVQLLESGGGLVQPGGSLRLSCAASGFTFSSYAMSWVRQAPGKGLEWVSSISGSGDYIYYADSVKGRFTISRDISKNTLYLQMNSLRAEDTAVYYCAKEGTGANSSLADYRGQGTLVTVSSGGGSGGGSQVQLVESGGGLVQAGDSVTLSCTASGRTFSSYALAWFRQRPGKEREFVAGLRWGGPTNYADSVKDRFTISGDSAKHTMYLQMNSLKPEDTAVYYCGYNPGGWAVPSQYEYDSWGQGTQVTVSSLEDKTHTCPPCPAPIKTDVITMDPKDNCSKDANDTLLLQLTNTSAYYMYLLLLLKSVVYFAIITCCLLRRTAFCCNGEKSRAKRSGSGATNFSLLKQAGDVEENPGPTSMDWIWRILFLVGAATGAHSGPQVQLQESGGGLAQAGGSLRLSCAASGRTFSMGWFRQAPGKEREFVAAITYSGGSPYYASSVRGRFTISRDNAKNTVYLQMNSLKPEDTAVYYCAANPTYGSDWNAENWGQGTQVTVSSTRDKTHTCPPCPAEVKTDSTDHVKPKETENTKQPSKSCHKPKAIVHTEKVNMMSLTVLGLRMLFAKTVAVNFLLTAKLFFL

SEQ ID NO: 15840 - protein, 593 aa, Artificial Sequence
  Synthetic Polypeptide
MALPVTALLLPLALLLHAARPEVQLLESGGGLVQPGGSLRLSCAASGFTFSSYAMSWVRQAPGKGLEWVSSISGSGDYIYYADSVKGRFTISRDISKNTLYLQMNSLRAEDTAVYYCAKEGTGANSSLADYRGQGTLVTVSSGGGSGGGSQVQLVESGGGLVQAGDSVTLSCTASGRTFSSYALAWFRQRPGKEREFVAGLRWGGPTNYADSVKDRFTISGDSAKHTMYLQMNSLKPEDTAVYYCGYNPGGWAVPSQYEYDSWGQGTQVTVSSLEGSPIKTDVITMDPKDNCSKDANDTLLLQLTNTSAYYMYLLLLLKSVVYFAIITCCLLRRTAFCCNGEKSRAKRSGSGATNFSLLKQAGDVEENPGPTSMDWIWRILFLVGAATGAHSGPQVQLQESGGGLAQAGGSLRLSCAASGRTFSMGWFRQAPGKEREFVAAITYSGGSPYYASSVRGRFTISRDNAKNTVYLQMNSLKPEDTAVYYCAANPTYGSDWNAENWGQGTQVTVSSTRDKTHTCPPCPAEVKTDSTDHVKPKETENTKQPSKSCHKPKAIVHTEKVNMMSLTVLGLRMLFAKTVAVNFLLTAKLFFL

SEQ ID NO: 15841 - protein, 809 aa, Artificial Sequence
  Synthetic Polypeptide
MALPVTALLLPLALLLHAARPEVQLLESGGGLVQPGGSLRLSCAASGFTFSSYAMSWVRQAPGKGLEWVSSISGSGDYIYYADSVKGRFTISRDISKNTLYLQMNSLRAEDTAVYYCAKEGTGANSSLADYRGQGTLVTVSSGGGSGGGSQVQLVESGGGLVQAGDSVTLSCTASGRTFSSYALAWFRQRPGKEREFVAGLRWGGPTNYADSVKDRFTISGDSAKHTMYLQMNSLKPEDTAVYYCGYNPGGWAVPSQYEYDSWGQGTQVTVSSLEGSMDPKDNCSKDANDTLLLQLTNTSAYYMYLLLLLKSVVYFAIITCCLLRRTAFCCNGEKSRAKRSGSGATNFSLLKQAGDVEENPGPTSMDWIWRILFLVGAATGAHSGPQVQLQESGGGLAQAGGSLRLSCAASGRTFSMGWFRQAPGKEREFVAAITYSGGSPYYASSVRGRFTISRDNAKNTVYLQMNSLKPEDTAVYYCAANPTYGSDWNAENWGQGTQVTVSSTRGSEVKTDSTDHVKPKETENTKQPSKSCHKPKAIVHTEKVNMMSLTVLGLRMLFAKTVAVNFLLTAKLFFLRAKRSGSGVKQTLNFDLLKLAGDVESNPGPSRGHMTEYKPTVRLATRDDVPRAVRTLAAAFADYPATRHTVDPDRHIERVTELQELFLTRVGLDIGKVWVADDGAAVAVWTTPESVEAGAVFAEIGPRMAELSGSRLAAQQQMEGLLAPHRPKEPAWFLATVGVSPDHQGKGLGSAVVLPGVEAAERAGVPAFLETSAPRNLPFYERLGFTVTADVEVPEGPRTWCMTRKPGA

SEQ ID NO: 15842 - protein, 810 aa, Artificial Sequence
  Synthetic Polypeptide
MALPVTALLLPLALLLHAARPEVQLLESGGGLVQPGGSLRLSCAASGFTFSSYAMSWVRQAPGKGLEWVSSISGSGDYIYYADSVKGRFTISRDISKNTLYLQMNSLRAEDTAVYYCAKEGTGANSSLADYRGQGTLVTVSSGGGSGGGSQVQLVESGGGLVQAGDSVTLSCTASGRTFSSYALAWFRQRPGKEREFVAGLRWGGPTNYADSVKDRFTISGDSAKHTMYLQMNSLKPEDTAVYYCGYNPGGWAVPSQYEYDSWGQGTQVTVSSLEGSPIKTDVITMDPKDNCSKDANDTLLLQLTNTSAYYMYLLLLLKSVVYFAIITCCLLRRTAFCCNGEKSRAKRSGSGATNFSLLKQAGDVEENPGPTSMDWIWRILFLVGAATGAHSGPQVQLQESGGGLAQAGGSLRLSCAASGRTFSMGWFRQAPGKEREFVAAITYSGGSPYYASSVRGRFTISRDNAKNTVYLQMNSLKPEDTAVYYCAANPTYGSDWNAENWGQGTQVTVSSTRGSDHVKPKETENTKQPSKSCHKPKAIVHTEKVNMMSLTVLGLRMLFAKTVAVNFLLTAKLFFLRAKRSGSGVKQTLNFDLLKLAGDVESNPGPSRGHMTEYKPTVRLATRDDVPRAVRTLAAAFADYPATRHTVDPDRHIERVTELQELFLTRVGLDIGKVWVADDGAAVAVWTTPESVEAGAVFAEIGPRMAELSGSRLAAQQQMEGLLAPHRPKEPAWFLATVGVSPDHQGKGLGSAVVLPGVEAAERAGVPAFLETSAPRNLPFYERLGFTVTADVEVPEGPRTWCMTRKPGA

SEQ ID NO: 15843 - protein, 434 aa, Artificial Sequence
  Synthetic Polypeptide
MALPVTALLLPLALLLHAARPEVQLLESGGGLVQPGGSLRLSCAASGFTFSSYAMSWVRQAPGKGLEWVSSISGSGDYIYYADSVKGRFTISRDISKNTLYLQMNSLRAEDTAVYYCAKEGTGANSSLADYRGQGTLVTVSSGGGSGGGSQVQLVESGGGLVQAGDSVTLSCTASGRTFSSYALAWFRQRPGKEREFVAGLRWGGPTNYADSVKDRFTISGDSAKHTMYLQMNSLKPEDTAVYYCGYNPGGWAVPSQYEYDSWGQGTQVTVSSLEGQPKANPTVTLFPPSSEELQANKATLVCLISDFYPGAVTVAWKADGSPVKAGVETTKPSKQSNNKYAASSYLSLTPEQWKSHRSYSCQVTHEGSTVEKTVAPTECSGRADCGFTSESYQQGVLSATILYEILLGKATLYAVLVSALVLMAMVKRKDSRG

SEQ ID NO: 15844 - protein, 448 aa, Artificial Sequence
  Synthetic Polypeptide
MALPVTALLLPLALLLHAARPEVQLLESGGGLVQPGGSLRLSCAASGFTFSSYAMSWVRQAPGKGLEWVSSISGSGDYIYYADSVKGRFTISRDISKNTLYLQMNSLRAEDTAVYYCAKEGTGANSSLADYRGQGTLVTVSSGGGSGGGSQVQLVESGGGLVQAGDSVTLSCTASGRTFSSYALAWFRQRPGKEREFVAGLRWGGPTNYADSVKDRFTISGDSAKHTMYLQMNSLKPEDTAVYYCGYNPGGWAVPSQYEYDSWGQGTQVTVSSLEGQPKANPTVTLFPPSSEELQANKATLVCLISDFYPGAVTVAWKADGSPVKAGVETTKPSKQSNNKYAASSYLSLTPEQWKSHRSYSCQVTHEGSTVEKTVAPTECSPIKTDVITMDPKDNCSKDANDTLLLQLTNTSAYYMYLLLLLKSVVYFAIITCCLLRRTAFCCNGEKS

SEQ ID NO: 15845 - protein, 767 aa, Artificial Sequence
  Synthetic Polypeptide
MDWIWRILFLVGAATGAHSQLQLQESGPGLVKPSETLSLTCTVSGGSISSGDYYWGWIRQPPGKGLEWIGHIYYSGATYYNPSLKSRVTISVDTSRNQFSLKLSSVTAADTAVYYCTRDDSSNWRSRGQGTLVTVSSSGGGGSGGGGSQVQLQESGGGLAQAGGSLRLSCAASGRTFSMGWFRQAPGKEREFVAAITYSGGSPYYASSVRGRFTISRDNAKNTVYLQMNSLKPEDTAVYYCAANPTYGSDWNAENWGQGTQVTVSSGSGGGGSGGGGSGGGGSFEQVQLQQPGAELVKPGASVKMSCKASGYAFSSYWINWMKQKPGQGLEWIGQIYPGDGDTNYNGKFKGRATLTADTSSSTAYMQLSSLTSEDSAVYFCARSITTVVGCAMDYWGQGTSVTVSSGGGGSGGGGSGGGGSDIQMTQSPSSLSASVGDRVTITCKASDHINNWLAWYQQKPGQAPKLLIYGATTLETGVPSRFSGSGSGTDYTLTISSLQPEDFATYYCQQSWNTPWTFGQGTKLEIKRTREQKLISEEDLAKPTTTPAPRPPTPAPTIASQPLSLRPEACRPAAGGAVHTRGLDFACDIYIWAPLAGTCGVLLLSLVITLYCKRGRKKLLYIFKQPFMRPVQTTQEEDGCSCRFPEEEEGGCELRVKFSRSADAPAYQQGQNQLYNELNLGRREEYDVLDKRRGRDPEMGGKPRRKNPQEGLYNELQKDKMAEAYSEIGMKGERRRGKGHDGLYQGLSTATKDTYDALHMQALPPR

SEQ ID NO: 15846 - protein, 1120 aa, Artificial Sequence
  Synthetic Polypeptide
MALPVTALLLPLALLLHAARPDIQMTQSPSSLSASVGDRVTITCKASDHINNWLAWYQQKPGQAPKLLIYGATTLETGVPSRFSGSGSGTDYTLTISSLQPEDFATYYCQQSWNTPWTFGQGTKLEIKRLEIQNPDPAVYQLRDSKSSDKSVCLFTDFDSQTNVSQSKDSDVYITDKCVLDMRSMDFKSNSAVAWSNKSDFACANAFNNSIIPEDTFFPSSDVPCDVKLVEKSFETDTNLNFQNLSVIGFRILLLKVAGFNLLMTLRLWSSRAKRSGSGVKQTLNFDLLKLAGDVESNPGPTSMDWIWRILFLVGAATGAHSQLQLQESGPGLVKPSETLSLTCTVSGGSISSGDYYWGWIRQPPGKGLEWIGHIYYSGATYYNPSLKSRVTISVDTSRNQFSLKLSSVTAADTAVYYCTRDDSSNWRSRGQGTLVTVSSSGGGGSGGGGSQVQLQESGGGLAQAGGSLRLSCAASGRTFSMGWFRQAPGKEREFVAAITYSGGSPYYASSVRGRFTISRDNAKNTVYLQMNSLKPEDTAVYYCAANPTYGSDWNAENWGQGTQVTVSSGSGGGGSGGGGSGGGGSFEQVQLQQPGAELVKPGASVKMSCKASGYAFSSYWINWMKQKPGQGLEWIGQIYPGDGDTNYNGKFKGRATLTADTSSSTAYMQLSSLTSEDSAVYFCARSITTVVGCAMDYWGQGTSVTVSSTREDLKNVFPPEVAVFEPSKAEIAHTQKATLVCLATGFYPDHVELSWWVNGKEVHSGVCTDPQPLKEQPALNDSRYCLSSRLRVSATFWQNPRNHFRCQVQFYGLSENDEWTQDRAKPVTQIVSAEAWGRADCGITSASYHQGVLSATILYEILLGKATLYAVLVSALVLMAMVKRKDSRGRAKRSGSGATNFSLLKQAGDVEENPGPSRGHMTEYKPTVRLATRDDVPRAVRTLAAAFADYPATRHTVDPDRHIERVTELQELFLTRVGLDIGKVWVADDGAAVAVWTTPESVEAGAVFAEIGPRMAELSGSRLAAQQQMEGLLAPHRPKEPAWFLATVGVSPDHQGKGLGSAVVLPGVEAAERAGVPAFLETSAPRNLPFYERLGFTVTADVEVPEGPRTWCMTRKPGA

SEQ ID NO: 15847 - protein, 1119 aa, Artificial Sequence
  Synthetic Polypeptide
MALPVTALLLPLALLLHAARPDIQMTQSPSSLSASVGDRVTITCKASDHINNWLAWYQQKPGQAPKLLIYGATTLETGVPSRFSGSGSGTDYTLTISSLQPEDFATYYCQQSWNTPWTFGQGTKLEIKRLEDLKNVFPPEVAVFEPSKAEIAHTQKATLVCLATGFYPDHVELSWWVNGKEVHSGVCTDPQPLKEQPALNDSRYCLSSRLRVSATFWQNPRNHFRCQVQFYGLSENDEWTQDRAKPVTQIVSAEAWGRADCGITSASYHQGVLSATILYEILLGKATLYAVLVSALVLMAMVKRKDSRGRAKRSGSGATNFSLLKQAGDVEENPGPTSMDWIWRILFLVGAATGAHSQLQLQESGPGLVKPSETLSLTCTVSGGSISSGDYYWGWIRQPPGKGLEWIGHIYYSGATYYNPSLKSRVTISVDTSRNQFSLKLSSVTAADTAVYYCTRDDSSNWRSRGQGTLVTVSSSGGGGSGGGGSQVQLQESGGGLAQAGGSLRLSCAASGRTFSMGWFRQAPGKEREFVAAITYSGGSPYYASSVRGRFTISRDNAKNTVYLQMNSLKPEDTAVYYCAANPTYGSDWNAENWGQGTQVTVSSGSGGGGSGGGGSGGGGSFEQVQLQQPGAELVKPGASVKMSCKASGYAFSSYWINWMKQKPGQGLEWIGQIYPGDGDTNYNGKFKGRATLTADTSSSTAYMQLSSLTSEDSAVYFCARSITTVVGCAMDYWGQGTSVTVSSTRIQNPDPAVYQLRDSKSSDKSVCLFTDFDSQTNVSQSKDSDVYITDKCVLDMRSMDFKSNSAVAWSNKSDFACANAFNNSIIPEDTFFPSSDVPCDVKLVEKSFETDTNLNFQNLSVIGFRILLLKVAGFNLLMTLRLWSSRAKRSGSGVKQTLNFDLLKLAGDVESNPGPSRGHMTEYKPTVRLATRDDVPRAVRTLAAAFADYPATRHTVDPDRHIERVTELQELFLTRVGLDIGKVWVADDGAAVAVWTTPESVEAGAVFAEIGPRMAELSGSRLAAQQQMEGLLAPHRPKEPAWFLATVGVSPDHQGKGLGSAVVLPGVEAAERAGVPAFLETSAPRNLPFYERLGFTVTADVEVPEGPRTWCMTRKPGA

SEQ ID NO: 15848 - protein, 1119 aa, Artificial Sequence
  Synthetic Polypeptide
MALPVTALLLPLALLLHAARPDIQMTQSPSSLSASVGDRVTITCKASDHINNWLAWYQQKPGQAPKLLIYGATTLETGVPSRFSGSGSGTDYTLTISSLQPEDFATYYCQQSWNTPWTFGQGTKLEIKRLEDLKNVFPPEVAVFEPSEAEISHTQKATLVCLATGFYPDHVELSWWVNGKEVHSGVCTDPQPLKEQPALNDSRYCLSSRLRVSATFWQNPRNHFRCQVQFYGLSENDEWTQDRAKPVTQIVSAEAWGRADCGFTSESYQQGVLSATILYEILLGKATLYAVLVSALVLMAMVKRKDSRGRAKRSGSGATNFSLLKQAGDVEENPGPTSMDWIWRILFLVGAATGAHSQLQLQESGPGLVKPSETLSLTCTVSGGSISSGDYYWGWIRQPPGKGLEWIGHIYYSGATYYNPSLKSRVTISVDTSRNQFSLKLSSVTAADTAVYYCTRDDSSNWRSRGQGTLVTVSSSGGGGSGGGGSQVQLQESGGGLAQAGGSLRLSCAASGRTFSMGWFRQAPGKEREFVAAITYSGGSPYYASSVRGRFTISRDNAKNTVYLQMNSLKPEDTAVYYCAANPTYGSDWNAENWGQGTQVTVSSGSGGGGSGGGGSGGGGSFEQVQLQQPGAELVKPGASVKMSCKASGYAFSSYWINWMKQKPGQGLEWIGQIYPGDGDTNYNGKFKGRATLTADTSSSTAYMQLSSLTSEDSAVYFCARSITTVVGCAMDYWGQGTSVTVSSTRIQNPDPAVYQLRDSKSSDKSVCLFTDFDSQTNVSQSKDSDVYITDKCVLDMRSMDFKSNSAVAWSNKSDFACANAFNNSIIPEDTFFPSPESSCDVKLVEKSFETDTNLNFQNLSVIGFRILLLKVAGFNLLMTLRLWSSRAKRSGSGVKQTLNFDLLKLAGDVESNPGPSRGHMTEYKPTVRLATRDDVPRAVRTLAAAFADYPATRHTVDPDRHIERVTELQELFLTRVGLDIGKVWVADDGAAVAVWTTPESVEAGAVFAEIGPRMAELSGSRLAAQQQMEGLLAPHRPKEPAWFLATVGVSPDHQGKGLGSAVVLPGVEAAERAGVPAFLETSAPRNLPFYERLGFTVTADVEVPEGPRTWCMTRKPGA

SEQ ID NO: 15849 - protein, 886 aa, Artificial Sequence
  Synthetic Polypeptide
MALPVTALLLPLALLLHAARPDIQMTQSPSSLSASVGDRVTITCKASDHINNWLAWYQQKPGQAPKLLIYGATTLETGVPSRFSGSGSGTDYTLTISSLQPEDFATYYCQQSWNTPWTFGQGTKLEIKRLEDLKNVFPPEVAVFEPSEAEISHTQKATLVCLATGFYPDHVELSWWVNGKEVHSGVCTDPQPLKEQPALNDSRYCLSSRLRVSATFWQNPRNHFRCQVQFYGLSENDEWTQDRAKPVTQIVSAEAWGRADCGFTSESYQQGVLSATILYEILLGKATLYAVLVSALVLMAMVKRKDSRGRAKRSGSGATNFSLLKQAGDVEENPGPTSMDWIWRILFLVGAATGAHSQLQLQESGPGLVKPSETLSLTCTVSGGSISSGDYYWGWIRQPPGKGLEWIGHIYYSGATYYNPSLKSRVTISVDTSRNQFSLKLSSVTAADTAVYYCTRDDSSNWRSRGQGTLVTVSSSGGGGSGGGGSQVQLQESGGGLAQAGGSLRLSCAASGRTFSMGWFRQAPGKEREFVAAITYSGGSPYYASSVRGRFTISRDNAKNTVYLQMNSLKPEDTAVYYCAANPTYGSDWNAENWGQGTQVTVSSGSGGGGSGGGGSGGGGSFEQVQLQQPGAELVKPGASVKMSCKASGYAFSSYWINWMKQKPGQGLEWIGQIYPGDGDTNYNGKFKGRATLTADTSSSTAYMQLSSLTSEDSAVYFCARSITTVVGCAMDYWGQGTSVTVSSTRIQNPDPAVYQLRDSKSSDKSVCLFTDFDSQTNVSQSKDSDVYITDKCVLDMRSMDFKSNSAVAWSNKSDFACANAFNNSIIPEDTFFPSPESSCDVKLVEKSFETDTNLNFQNLSVIGFRILLLKVAGFNLLMTLRLWSS

SEQ ID NO: 15850 - protein, 1111 aa, Artificial Sequence
  Synthetic Polypeptide
MALPVTALLLPLALLLHAARPDIQMTQSPSSLSASVGDRVTITCKASDHINNWLAWYQQKPGQAPKLLIYGATTLETGVPSRFSGSGSGTDYTLTISSLQPEDFATYYCQQSWNTPWTFGQGTKLEIKRLEDLKNVFPPEVAVFEPSEAEISHTQKATLVCLATGFYPDHVELSWWVNGKEVHSGVCTDPQPLKEQPALNDSRYCLSSRLRVSATFWQNPRNHFRCQVQFYGLSENDEWTQDRAKPVTQIVSAEAWGRADCGFTSESYQQGVLSATILYEILLGKATLYAVLVSALVLMAMVKRKDSRGRAKRSGSGATNFSLLKQAGDVEENPGPTSMDWIWRILFLVGAATGAHSQLQLQESGPGLVKPSETLSLTCTVSGGSISSGDYYWGWIRQPPGKGLEWIGHIYYSGATYYNPSLKSRVTISVDTSRNQFSLKLSSVTAADTAVYYCTRDDSSNWRSRGQGTLVTVSSSGGGGSGGGGSQVQLQESGGGLAQAGGSLRLSCAASGRTFSMGWFRQAPGKEREFVAAITYSGGSPYYASSVRGRFTISRDNAKNTVYLQMNSLKPEDTAVYYCAANPTYGSDWNAENWGQGTQVTVSSGSGGGGSGGGGSGGGGSFEQVQLQQPGAELVKPGASVKMSCKASGYAFSSYWINWMKQKPGQGLEWIGQIYPGDGDTNYNGKFKGRATLTADTSSSTAYMQLSSLTSEDSAVYFCARSITTVVGCAMDYWGQGTSVTVSSTRIQNPDPAVYQLRDSKSSDKSVCLFTDFDSQTNVSQSKDSDVYITDKCVLDMRSMDFKSNSAVAWSNKSDFACANAFNNSIIPEDTFFPSPESSCDVKLVEKSFETDTNLNFQNLSVIGFRILLLKVAGFNLLMTLRLWSSRAKRSGSGVKQTLNFDLLKLAGDVESNPGPSRGGIHTMATYEVLCEVARKLGTDDREVVLFLLNVFIPQPTLAQLIGALRALKEEGRLTFPLLAECLFRAGRRDLLRDLLHLDPRFLERHLAGTMSYFSPYQLTVLHVDGELCARDIRSLIFLSKDTIGSRSTPQTFLHWVYCMENLDLLGPTDVDALMSMLRSLSRVDLQRQVQTLMGLHLSGPSHSQHYRHTP

SEQ ID NO: 15851 - protein, 890 aa, Artificial Sequence
  Synthetic Polypeptide
MALPVTALLLPLALLLHAARPDIQMTQSPSSLSASVGDRVTITCKASDHINNWLAWYQQKPGQAPKLLIYGATTLETGVPSRFSGSGSGTDYTLTISSLQPEDFATYYCQQSWNTPWTFGQGTKLEIKRLEIQNPDPAVYQLRDSKSSDKSVCLFTDFDSQTNVSQSKDSDVYITDKCVLDMRSMDFKSNSAVAWSNKSDFACANAFNNSIIPEDTFFPSPESSCDVKLVEKSFETDTNLNFQNLSVIGFRILLLKVAGFNLLMTLRLWSSRAKRSGSGVKQTLNFDLLKLAGDVESNPGPTSMDWIWRILFLVGAATGAHSQLQLQESGPGLVKPSETLSLTCTVSGGSISSGDYYWGWIRQPPGKGLEWIGHIYYSGATYYNPSLKSRVTISVDTSRNQFSLKLSSVTAADTAVYYCTRDDSSNWRSRGQGTLVTVSSSGGGGSGGGGSQVQLQESGGGLAQAGGSLRLSCAASGRTFSMGWFRQAPGKEREFVAAITYSGGSPYYASSVRGRFTISRDNAKNTVYLQMNSLKPEDTAVYYCAANPTYGSDWNAENWGQGTQVTVSSGSGGGGSGGGGSGGGGSFEQVQLQQPGAELVKPGASVKMSCKASGYAFSSYWINWMKQKPGQGLEWIGQIYPGDGDTNYNGKFKGRATLTADTSSSTAYMQLSSLTSEDSAVYFCARSITTVVGCAMDYWGQGTSVTVSSTREDLKNVFPPEVAVFEPSEAEISHTQKATLVCLATGFYPDHVELSWWVNGKEVHSGVCTDPQPLKEQPALNDSRYCLSSRLRVSATFWQNPRNHFRCQVQFYGLSENDEWTQDRAKPVTQIVSAEAWGRADCGFTSESYQQGVLSATILYEILLGKATLYAVLVSALVLMAMVKRKDSRG

SEQ ID NO: 15852 - protein, 1112 aa, Artificial Sequence
  Synthetic Polypeptide
MALPVTALLLPLALLLHAARPDIQMTQSPSSLSASVGDRVTITCKASDHINNWLAWYQQKPGQAPKLLIYGATTLETGVPSRFSGSGSGTDYTLTISSLQPEDFATYYCQQSWNTPWTFGQGTKLEIKRLEIQNPDPAVYQLRDSKSSDKSVCLFTDFDSQTNVSQSKDSDVYITDKCVLDMRSMDFKSNSAVAWSNKSDFACANAFNNSIIPEDTFFPSPESSCDVKLVEKSFETDTNLNFQNLSVIGFRILLLKVAGFNLLMTLRLWSSRAKRSGSGVKQTLNFDLLKLAGDVESNPGPTSMDWIWRILFLVGAATGAHSQLQLQESGPGLVKPSETLSLTCTVSGGSISSGDYYWGWIRQPPGKGLEWIGHIYYSGATYYNPSLKSRVTISVDTSRNQFSLKLSSVTAADTAVYYCTRDDSSNWRSRGQGTLVTVSSSGGGGSGGGGSQVQLQESGGGLAQAGGSLRLSCAASGRTFSMGWFRQAPGKEREFVAAITYSGGSPYYASSVRGRFTISRDNAKNTVYLQMNSLKPEDTAVYYCAANPTYGSDWNAENWGQGTQVTVSSGSGGGGSGGGGSGGGGSFEQVQLQQPGAELVKPGASVKMSCKASGYAFSSYWINWMKQKPGQGLEWIGQIYPGDGDTNYNGKFKGRATLTADTSSSTAYMQLSSLTSEDSAVYFCARSITTVVGCAMDYWGQGTSVTVSSTREDLKNVFPPEVAVFEPSEAEISHTQKATLVCLATGFYPDHVELSWWVNGKEVHSGVCTDPQPLKEQPALNDSRYCLSSRLRVSATFWQNPRNHFRCQVQFYGLSENDEWTQDRAKPVTQIVSAEAWGRADCGFTSESYQQGVLSATILYEILLGKATLYAVLVSALVLMAMVKRKDSRGRAKRSGSGATNFSLLKQAGDVEENPGPSRGGIHTMATYEVLCEVARKLGTDDREVVLFLLNVFIPQPTLAQLIGALRALKEEGRLTFPLLAECLFRAGRRDLLRDLLHLDPRFLERHLAGTMSYFSPYQLTVLHVDGELCARDIRSLIFLSKDTIGSRSTPQTFLHWVYCMENLDLLGPTDVDALMSMLRSLSRVDLQRQVQTLMGLHLSGPSHSQHYRHTP

SEQ ID NO: 15853 - protein, 1119 aa, Artificial Sequence
  Synthetic Polypeptide
MALPVTALLLPLALLLHAARPDIQMTQSPSSLSASVGDRVTITCKASDHINNWLAWYQQKPGQAPKLLIYGATTLETGVPSRFSGSGSGTDYTLTISSLQPEDFATYYCQQSWNTPWTFGQGTKLEIKRLEDLKNVFPPEVAVFEPSEAEISHTQKATLVCLATGFYPDHVELSWWVNGKEVHSGVSTDPQPLKEQPALNDSRYCLSSRLRVSATFWQNPRNHFRCQVQFYGLSENDEWTQDRAKPVTQIVSAEAWGRADCGFTSESYQQGVLSATILYEILLGKATLYAVLVSALVLMAMVKRKDSRGRAKRSGSGATNFSLLKQAGDVEENPGPTSMDWIWRILFLVGAATGAHSQLQLQESGPGLVKPSETLSLTCTVSGGSISSGDYYWGWIRQPPGKGLEWIGHIYYSGATYYNPSLKSRVTISVDTSRNQFSLKLSSVTAADTAVYYCTRDDSSNWRSRGQGTLVTVSSSGGGGSGGGGSQVQLQESGGGLAQAGGSLRLSCAASGRTFSMGWFRQAPGKEREFVAAITYSGGSPYYASSVRGRFTISRDNAKNTVYLQMNSLKPEDTAVYYCAANPTYGSDWNAENWGQGTQVTVSSGSGGGGSGGGGSGGGGSFEQVQLQQPGAELVKPGASVKMSCKASGYAFSSYWINWMKQKPGQGLEWIGQIYPGDGDTNYNGKFKGRATLTADTSSSTAYMQLSSLTSEDSAVYFCARSITTVVGCAMDYWGQGTSVTVSSTRIQNPDPAVYQLRDSKSSDKSVCLFTDFDSQTNVSQSKDSDVYITDKTVLDMRSMDFKSNSAVAWSNKSDFACANAFNNSIIPEDTFFPSPESSCDVKLVEKSFETDTNLNFQNLSVIGFRILLLKVAGFNLLMTLRLWSSRAKRSGSGVKQTLNFDLLKLAGDVESNPGPSRGHMTEYKPTVRLATRDDVPRAVRTLAAAFADYPATRHTVDPDRHIERVTELQELFLTRVGLDIGKVWVADDGAAVAVWTTPESVEAGAVFAEIGPRMAELSGSRLAAQQQMEGLLAPHRPKEPAWFLATVGVSPDHQGKGLGSAVVLPGVEAAERAGVPAFLETSAPRNLPFYERLGFTVTADVEVPEGPRTWCMTRKPGA

SEQ ID NO: 15854 - protein, 1201 aa, Artificial Sequence
  Synthetic Polypeptide
MALPVTALLLPLALLLHAARPDIQMTQSPSSLSASVGDRVTITCKASDHINNWLAWYQQKPGQAPKLLIYGATTLETGVPSRFSGSGSGTDYTLTISSLQPEDFATYYCQQSWNTPWTFGQGTKLEIKRLEDLKNVFPPEVAVFEPSEAEISHTQKATLVCLATGFYPDHVELSWWVNGKEVHSGVSTDPQPLKEQPALNDSRYCLSSRLRVSATFWQNPRNHFRCQVQFYGLSENDEWTQDRAKPVTQIVSAEAWGRADCGFTSESYQQGVLSATILYEILLGKATLYAVLVSALVLMAMVKRKDSRGRAKRSGSGATNFSLLKQAGDVEENPGPTSMDWIWRILFLVGAATGAHSQLQLQESGPGLVKPSETLSLTCTVSGGSISSGDYYWGWIRQPPGKGLEWIGHIYYSGATYYNPSLKSRVTISVDTSRNQFSLKLSSVTAADTAVYYCTRDDSSNWRSRGQGTLVTVSSSGGGGSGGGGSQVQLQESGGGLAQAGGSLRLSCAASGRTFSMGWFRQAPGKEREFVAAITYSGGSPYYASSVRGRFTISRDNAKNTVYLQMNSLKPEDTAVYYCAANPTYGSDWNAENWGQGTQVTVSSGSGGGGSGGGGSGGGGSFEQVQLQQPGAELVKPGASVKMSCKASGYAFSSYWINWMKQKPGQGLEWIGQIYPGDGDTNYNGKFKGRATLTADTSSSTAYMQLSSLTSEDSAVYFCARSITTVVGCAMDYWGQGTSVTVSSTREQKLISEEDGSGTPFPSLAPPIMLLVDGKQQMVVVCLVLDVAPPGLDSPIWFSAGNGSALDAFTYGPSPATDGTWTNLAHLSLPSEELASWEPLVCHTGPGAEGHSRSTQPMHLSGEASTARTCPQEPLRGTPGGALWLGVLRLLLFKLLLFDLLLTCSCLCDPAGPLPSPATTTRLRALGSHRLHPATETGGREATSSPRPQPRDRRWGDTPPGRKPGSPVRAKRSGSGVKQTLNFDLLKLAGDVESNPGPSRGHMTEYKPTVRLATRDDVPRAVRTLAAAFADYPATRHTVDPDRHIERVTELQELFLTRVGLDIGKVWVADDGAAVAVWTTPESVEAGAVFAEIGPRMAELSGSRLAAQQQMEGLLAPHRPKEPAWFLATVGVSPDHQGKGLGSAVVLPGVEAAERAGVPAFLETSAPRNLPFYERLGFTVTADVEVPEGPRTWCMTRKPGA

SEQ ID NO: 15855 - protein, 1156 aa, Artificial Sequence
  Synthetic Polypeptide
MALPVTALLLPLALLLHAARPDIQMTQSPSSLSASVGDRVTITCKASDHINNWLAWYQQKPGQAPKLLIYGATTLETGVPSRFSGSGSGTDYTLTISSLQPEDFATYYCQQSWNTPWTFGQGTKLEIKRLEGKPIPNPLLGLDSTGSGDKQLDADVSPKPTIFLPSIAETKLQKAGTYLCLLEKFFPDVIKIHWQEKKSNTILGSQEGNTMKTNDTYMKFSWLTVPEKSLDKEHRCIVRHENNKNGVDQEIIFPPIKTDVITMDPKDNCSKDANDTLLLQLTNTSAYYMYLLLLLKSVVYFAIITCCLLRRTAFCCNGEKSRAKRSGSGATNFSLLKQAGDVEENPGPTSMDWIWRILFLVGAATGAHSQLQLQESGPGLVKPSETLSLTCTVSGGSISSGDYYWGWIRQPPGKGLEWIGHIYYSGATYYNPSLKSRVTISVDTSRNQFSLKLSSVTAADTAVYYCTRDDSSNWRSRGQGTLVTVSSSGGGGSGGGGSQVQLQESGGGLAQAGGSLRLSCAASGRTFSMGWFRQAPGKEREFVAAITYSGGSPYYASSVRGRFTISRDNAKNTVYLQMNSLKPEDTAVYYCAANPTYGSDWNAENWGQGTQVTVSSGSGGGGSGGGGSGGGGSFEQVQLQQPGAELVKPGASVKMSCKASGYAFSSYWINWMKQKPGQGLEWIGQIYPGDGDTNYNGKFKGRATLTADTSSSTAYMQLSSLTSEDSAVYFCARSITTVVGCAMDYWGQGTSVTVSSTREQKLISEEDGSGSQPHTKPSVFVMKNGTNVACLVKEFYPKDIRINLVSSKKITEFDPAIVISPSGKYNAVKLGKYEDSNSVTCSVQHDNKTVHSTDFEVKTDSTDHVKPKETENTKQPSKSCHKPKAIVHTEKVNMMSLTVLGLRMLFAKTVAVNFLLTAKLFFLRAKRSGSGVKQTLNFDLLKLAGDVESNPGPSRGHMTEYKPTVRLATRDDVPRAVRTLAAAFADYPATRHTVDPDRHIERVTELQELFLTRVGLDIGKVWVADDGAAVAVWTTPESVEAGAVFAEIGPRMAELSGSRLAAQQQMEGLLAPHRPKEPAWFLATVGVSPDHQGKGLGSAVVLPGVEAAERAGVPAFLETSAPRNLPFYERLGFTVTADVEVPEGPRTWCMTRKPGA

SEQ ID NO: 15856 - protein, 894 aa, Artificial Sequence
  Synthetic Polypeptide
MALPVTALLLPLALLLHAARPDIQMTQSPSSLSASVGDRVTITCKASDHINNWLAWYQQKPGQAPKLLIYGATTLETGVPSRFSGSGSGTDYTLTISSLQPEDFATYYCQQSWNTPWTFGQGTKLEIKRLESQPHTKPSVFVMKNGTNVACLVKEFYPKDIRINLVSSKKITEFDPAIVISPSGKYNAVKLGKYEDSNSVTCSVQHDNKTVHSTDFEVKTDSTDHVKPKETENTKQPSKSCHKPKAIVHTEKVNMMSLTVLGLRMLFAKTVAVNFLLTAKLFFLRAKRSGSGATNFSLLKQAGDVEENPGPTSMDWIWRILFLVGAATGAHSQLQLQESGPGLVKPSETLSLTCTVSGGSISSGDYYWGWIRQPPGKGLEWIGHIYYSGATYYNPSLKSRVTISVDTSRNQFSLKLSSVTAADTAVYYCTRDDSSNWRSRGQGTLVTVSSSGGGGSGGGGSQVQLQESGGGLAQAGGSLRLSCAASGRTFSMGWFRQAPGKEREFVAAITYSGGSPYYASSVRGRFTISRDNAKNTVYLQMNSLKPEDTAVYYCAANPTYGSDWNAENWGQGTQVTVSSGSGGGGSGGGGSGGGGSFEQVQLQQPGAELVKPGASVKMSCKASGYAFSSYWINWMKQKPGQGLEWIGQIYPGDGDTNYNGKFKGRATLTADTSSSTAYMQLSSLTSEDSAVYFCARSITTVVGCAMDYWGQGTSVTVSSTRDKQLDADVSPKPTIFLPSIAETKLQKAGTYLCLLEKFFPDVIKIHWQEKKSNTILGSQEGNTMKTNDTYMKFSWLTVPEKSLDKEHRCIVRHENNKNGVDQEIIFPPIKTDVITMDPKDNCSKDANDTLLLQLTNTSAYYMYLLLLLKSVVYFAIITCCLLRRTAFCCNGEKS

SEQ ID NO: 15857 - protein, 1296 aa, Artificial Sequence
  Synthetic Polypeptide
MALPVTALLLPLALLLHAARPDIQMTQSPSSLSASVGDRVTITCKASDHINNWLAWYQQKPGQAPKLLIYGATTLETGVPSRFSGSGSGTDYTLTISSLQPEDFATYYCQQSWNTPWTFGQGTKLEIKRGQPKANPTVTLFPPSSEELQANKATLVCLISDFYPGAVTVAWKADGSPVKAGVETTKPSKQSNNKYAASSYLSLTPEQWKSHRSYSCQVTHEGSTVEKTVAPTECSGSQSFGLLDPKLCYLLDGILFIYGVILTALFLRVKFSRSADAPAYQQGQNQLYNELNLGRREEYDVLDKRRGRDPEMGGKPQRRKNPQEGLYNELQKDKMAEAYSEIGMKGERRRGKGHDGLYQGLSTATKDTYDALHMQALPPRRAKRSGSGATNFSLLKQAGDVEENPGPTSMDWIWRILFLVGAATGAHSQLQLQESGPGLVKPSETLSLTCTVSGGSISSGDYYWGWIRQPPGKGLEWIGHIYYSGATYYNPSLKSRVTISVDTSRNQFSLKLSSVTAADTAVYYCTRDDSSNWRSRGQGTLVTVSSSGGGGSGGGGSQVQLQESGGGLAQAGGSLRLSCAASGRTFSMGWFRQAPGKEREFVAAITYSGGSPYYASSVRGRFTISRDNAKNTVYLQMNSLKPEDTAVYYCAANPTYGSDWNAENWGQGTQVTVSSGSGGGGSGGGGSGGGGSFEQVQLQQPGAELVKPGASVKMSCKASGYAFSSYWINWMKQKPGQGLEWIGQIYPGDGDTNYNGKFKGRATLTADTSSSTAYMQLSSLTSEDSAVYFCARSITTVVGCAMDYWGQGTSVTVSSASTKGPSVFPLAPSSKSTSGGTAALGCLVKDYFPEPVTVSWNSGALTSGVHTFPAVLQSSGLYSLSSVVTVPSSSLGTQTYICNVNHKPSNTKVDKRVEPKSCGTQSFGLLDPKLCYLLDGILFIYGVILTALFLRVKFSRSADAPAYQQGQNQLYNELNLGRREEYDVLDKRRGRDPEMGGKPQRRKNPQEGLYNELQKDKMAEAYSEIGMKGERRRGKGHDGLYQGLSTATKDTYDALHMQALPPRRAKRSGSGVKQTLNFDLLKLAGDVESNPGPSRGHMTEYKPTVRLATRDDVPRAVRTLAAAFADYPATRHTVDPDRHIERVTELQELFLTRVGLDIGKVWVADDGAAVAVWTTPESVEAGAVFAEIGPRMAELSGSRLAAQQQMEGLLAPHRPKEPAWFLATVGVSPDHQGKGLGSAVVLPGVEAAERAGVPAFLETSAPRNLPFYERLGFTVTADVEVPEGPRTWCMTRKPGA

SEQ ID NO: 15858 - protein, 1082 aa, Artificial Sequence
  Synthetic Polypeptide
MALPVTALLLPLALLLHAARPDIQMTQSPSSLSASVGDRVTITCKASDHINNWLAWYQQKPGQAPKLLIYGATTLETGVPSRFSGSGSGTDYTLTISSLQPEDFATYYCQQSWNTPWTFGQGTKLEIKRLEDLKNVFPPEVAVFEPSEAEISHTQKATLVCLATGFYPDHVELSWWVNGKEVHSGVSTDPQPLKEQPALNDSRYCLSSRLRVSATFWQNPRNHFRCQVQFYGLSENDEWTQDRAKPVTQIVSAEAWGRADCGSQSFGLLDPKLCYLLDGILFIYGVILTALFLRVKFSRSADAPAYQQGQNQLYNELNLGRREEYDVLDKRRGRDPEMGGKPQRRKNPQEGLYNELQKDKMAEAYSEIGMKGERRRGKGHDGLYQGLSTATKDTYDALHMQALPPRRAKRSGSGATNFSLLKQAGDVEENPGPTSMDWIWRILFLVGAATGAHSQLQLQESGPGLVKPSETLSLTCTVSGGSISSGDYYWGWIRQPPGKGLEWIGHIYYSGATYYNPSLKSRVTISVDTSRNQFSLKLSSVTAADTAVYYCTRDDSSNWRSRGQGTLVTVSSSGGGGSGGGGSQVQLQESGGGLAQAGGSLRLSCAASGRTFSMGWFRQAPGKEREFVAAITYSGGSPYYASSVRGRFTISRDNAKNTVYLQMNSLKPEDTAVYYCAANPTYGSDWNAENWGQGTQVTVSSGSGGGGSGGGGSGGGGSFEQVQLQQPGAELVKPGASVKMSCKASGYAFSSYWINWMKQKPGQGLEWIGQIYPGDGDTNYNGKFKGRATLTADTSSSTAYMQLSSLTSEDSAVYFCARSITTVVGCAMDYWGQGTSVTVSSTRIQNPDPAVYQLRDSKSSDKSVCLFTDFDSQTNVSQSKDSDVYITDKTVLDMRSMDFKSNSAVAWSNKSDFACANAFNNSIIPEDTFFPSPESSCGTQSFGLLDPKLCYLLDGILFIYGVILTALFLRVKFSRSADAPAYQQGQNQLYNELNLGRREEYDVLDKRRGRDPEMGGKPQRRKNPQEGLYNELQKDKMAEAYSEIGMKGERRRGKGHDGLYQGLSTATKDTYDALHMQALPPR

SEQ ID NO: 15859 - protein, 1082 aa, Artificial Sequence
  Synthetic Polypeptide
MALPVTALLLPLALLLHAARPDIQMTQSPSSLSASVGDRVTITCKASDHINNWLAWYQQKPGQAPKLLIYGATTLETGVPSRFSGSGSGTDYTLTISSLQPEDFATYYCQQSWNTPWTFGQGTKLEIKRLEDLKNVFPPEVAVFEPSKAEIAHTQKATLVCLATGFYPDHVELSWWVNGKEVHSGVCTDPQPLKEQPALNDSRYCLSSRLRVSATFWQNPRNHFRCQVQFYGLSENDEWTQDRAKPVTQIVSAEAWGRADCGSQSFGLLDPKLCYLLDGILFIYGVILTALFLRVKFSRSADAPAYQQGQNQLYNELNLGRREEYDVLDKRRGRDPEMGGKPQRRKNPQEGLYNELQKDKMAEAYSEIGMKGERRRGKGHDGLYQGLSTATKDTYDALHMQALPPRRAKRSGSGATNFSLLKQAGDVEENPGPTSMDWIWRILFLVGAATGAHSQLQLQESGPGLVKPSETLSLTCTVSGGSISSGDYYWGWIRQPPGKGLEWIGHIYYSGATYYNPSLKSRVTISVDTSRNQFSLKLSSVTAADTAVYYCTRDDSSNWRSRGQGTLVTVSSSGGGGSGGGGSQVQLQESGGGLAQAGGSLRLSCAASGRTFSMGWFRQAPGKEREFVAAITYSGGSPYYASSVRGRFTISRDNAKNTVYLQMNSLKPEDTAVYYCAANPTYGSDWNAENWGQGTQVTVSSGSGGGGSGGGGSGGGGSFEQVQLQQPGAELVKPGASVKMSCKASGYAFSSYWINWMKQKPGQGLEWIGQIYPGDGDTNYNGKFKGRATLTADTSSSTAYMQLSSLTSEDSAVYFCARSITTVVGCAMDYWGQGTSVTVSSTRIQNPDPAVYQLRDSKSSDKSVCLFTDFDSQTNVSQSKDSDVYITDKCVLDMRSMDFKSNSAVAWSNKSDFACANAFNNSIIPEDTFFPSSDVPCGTQSFGLLDPKLCYLLDGILFIYGVILTALFLRVKFSRSADAPAYQQGQNQLYNELNLGRREEYDVLDKRRGRDPEMGGKPQRRKNPQEGLYNELQKDKMAEAYSEIGMKGERRRGKGHDGLYQGLSTATKDTYDALHMQALPPR

SEQ ID NO: 15860 - protein, 1153 aa, Artificial Sequence
  Synthetic Polypeptide
MALPVTALLLPLALLLHAARPDIQMTQSPSSLSASVGDRVTITCKASDHINNWLAWYQQKPGQAPKLLIYGATTLETGVPSRFSGSGSGTDYTLTISSLQPEDFATYYCQQSWNTPWTFGQGTKLEIKRLEGKPIPNPLLGLDSTGSGEDLKNVFPPEVAVFEPSEAEISHTQKATLVCLATGFYPDHVELSWWVNGKEVHSGVSTDPQPLKEQPALNDSRYCLSSRLRVSATFWQNPRNHFRCQVQFYGLSENDEWTQDRAKPVTQIVSAEAWGRADCGSQSFGLLDPKLCYLLDGILFIYGVILTALFLRVKFSRSADAPAYQQGQNQLYNELNLGRREEYDVLDKRRGRDPEMGGKPQRRKNPQEGLYNELQKDKMAEAYSEIGMKGERRRGKGHDGLYQGLSTATKDTYDALHMQALPPRRAKRSGSGATNFSLLKQAGDVEENPGPTSMDWIWRILFLVGAATGAHSQLQLQESGPGLVKPSETLSLTCTVSGGSISSGDYYWGWIRQPPGKGLEWIGHIYYSGATYYNPSLKSRVTISVDTSRNQFSLKLSSVTAADTAVYYCTRDDSSNWRSRGQGTLVTVSSSGGGGSGGGGSQVQLQESGGGLAQAGGSLRLSCAASGRTFSMGWFRQAPGKEREFVAAITYSGGSPYYASSVRGRFTISRDNAKNTVYLQMNSLKPEDTAVYYCAANPTYGSDWNAENWGQGTQVTVSSGSGGGGSGGGGSGGGGSFEQVQLQQPGAELVKPGASVKMSCKASGYAFSSYWINWMKQKPGQGLEWIGQIYPGDGDTNYNGKFKGRATLTADTSSSTAYMQLSSLTSEDSAVYFCARSITTVVGCAMDYWGQGTSVTVSSTREQKLISEEDGSGIQNPDPAVYQLRDSKSSDKSVCLFTDFDSQTNVSQSKDSDVYITDKTVLDMRSMDFKSNSAVAWSNKSDFACANAFNNSIIPEDTFFPSPESSCGTQSFGLLDPKLCYLLDGILFIYGVILTALFLRSKRSRLLHSDYMNMTPRRPGPTRKHYQPYAPPRDFAAYRSRVKFSRSADAPAYQQGQNQLYNELNLGRREEYDVLDKRRGRDPEMGGKPQRRKNPQEGLYNELQKDKMAEAYSEIGMKGERRRGKGHDGLYQGLSTATKDTYDALHMQALPPR

SEQ ID NO: 15861 - protein, 1194 aa, Artificial Sequence
  Synthetic Polypeptide
MALPVTALLLPLALLLHAARPDIQMTQSPSSLSASVGDRVTITCKASDHINNWLAWYQQKPGQAPKLLIYGATTLETGVPSRFSGSGSGTDYTLTISSLQPEDFATYYCQQSWNTPWTFGQGTKLEIKRLEGKPIPNPLLGLDSTGSGEDLKNVFPPEVAVFEPSEAEISHTQKATLVCLATGFYPDHVELSWWVNGKEVHSGVSTDPQPLKEQPALNDSRYCLSSRLRVSATFWQNPRNHFRCQVQFYGLSENDEWTQDRAKPVTQIVSAEAWGRADCGSQSFGLLDPKLCYLLDGILFIYGVILTALFLRSKRSRLLHSDYMNMTPRRPGPTRKHYQPYAPPRDFAAYRSRVKFSRSADAPAYQQGQNQLYNELNLGRREEYDVLDKRRGRDPEMGGKPQRRKNPQEGLYNELQKDKMAEAYSEIGMKGERRRGKGHDGLYQGLSTATKDTYDALHMQALPPRRAKRSGSGATNFSLLKQAGDVEENPGPTSMDWIWRILFLVGAATGAHSQLQLQESGPGLVKPSETLSLTCTVSGGSISSGDYYWGWIRQPPGKGLEWIGHIYYSGATYYNPSLKSRVTISVDTSRNQFSLKLSSVTAADTAVYYCTRDDSSNWRSRGQGTLVTVSSSGGGGSGGGGSQVQLQESGGGLAQAGGSLRLSCAASGRTFSMGWFRQAPGKEREFVAAITYSGGSPYYASSVRGRFTISRDNAKNTVYLQMNSLKPEDTAVYYCAANPTYGSDWNAENWGQGTQVTVSSGSGGGGSGGGGSGGGGSFEQVQLQQPGAELVKPGASVKMSCKASGYAFSSYWINWMKQKPGQGLEWIGQIYPGDGDTNYNGKFKGRATLTADTSSSTAYMQLSSLTSEDSAVYFCARSITTVVGCAMDYWGQGTSVTVSSTREQKLISEEDGSGIQNPDPAVYQLRDSKSSDKSVCLFTDFDSQTNVSQSKDSDVYITDKTVLDMRSMDFKSNSAVAWSNKSDFACANAFNNSIIPEDTFFPSPESSCGTQSFGLLDPKLCYLLDGILFIYGVILTALFLRSKRSRLLHSDYMNMTPRRPGPTRKHYQPYAPPRDFAAYRSRVKFSRSADAPAYQQGQNQLYNELNLGRREEYDVLDKRRGRDPEMGGKPQRRKNPQEGLYNELQKDKMAEAYSEIGMKGERRRGKGHDGLYQGLSTATKDTYDALHMQALPPR

SEQ ID NO: 15862 - protein, 1155 aa, Artificial Sequence
  Synthetic Polypeptide
MALPVTALLLPLALLLHAARPDIQMTQSPSSLSASVGDRVTITCKASDHINNWLAWYQQKPGQAPKLLIYGATTLETGVPSRFSGSGSGTDYTLTISSLQPEDFATYYCQQSWNTPWTFGQGTKLEIKRLEGKPIPNPLLGLDSTGSGEDLKNVFPPEVAVFEPSEAEISHTQKATLVCLATGFYPDHVELSWWVNGKEVHSGVSTDPQPLKEQPALNDSRYCLSSRLRVSATFWQNPRNHFRCQVQFYGLSENDEWTQDRAKPVTQIVSAEAWGRADCGSQSFGLLDPKLCYLLDGILFIYGVILTALFLRVKFSRSADAPAYQQGQNQLYNELNLGRREEYDVLDKRRGRDPEMGGKPQRRKNPQEGLYNELQKDKMAEAYSEIGMKGERRRGKGHDGLYQGLSTATKDTYDALHMQALPPRRAKRSGSGATNFSLLKQAGDVEENPGPTSMDWIWRILFLVGAATGAHSQLQLQESGPGLVKPSETLSLTCTVSGGSISSGDYYWGWIRQPPGKGLEWIGHIYYSGATYYNPSLKSRVTISVDTSRNQFSLKLSSVTAADTAVYYCTRDDSSNWRSRGQGTLVTVSSSGGGGSGGGGSQVQLQESGGGLAQAGGSLRLSCAASGRTFSMGWFRQAPGKEREFVAAITYSGGSPYYASSVRGRFTISRDNAKNTVYLQMNSLKPEDTAVYYCAANPTYGSDWNAENWGQGTQVTVSSGSGGGGSGGGGSGGGGSFEQVQLQQPGAELVKPGASVKMSCKASGYAFSSYWINWMKQKPGQGLEWIGQIYPGDGDTNYNGKFKGRATLTADTSSSTAYMQLSSLTSEDSAVYFCARSITTVVGCAMDYWGQGTSVTVSSTREQKLISEEDLGSGIQNPDPAVYQLRDSKSSDKSVCLFTDFDSQTNVSQSKDSDVYITDKTVLDMRSMDFKSNSAVAWSNKSDFACANAFNNSIIPEDTFFPSPESSCGTQSFGLLDPKLCYLLDGILFIYGVILTALFLKRGRKKLLYIFKQPFMRPVQTTQEEDGCSCRFPEEEEGGCELRVKFSRSADAPAYQQGQNQLYNELNLGRREEYDVLDKRRGRDPEMGGKPQRRKNPQEGLYNELQKDKMAEAYSEIGMKGERRRGKGHDGLYQGLSTATKDTYDALHMQALPPR

SEQ ID NO: 15863 - protein, 1197 aa, Artificial Sequence
  Synthetic Polypeptide
MALPVTALLLPLALLLHAARPDIQMTQSPSSLSASVGDRVTITCKASDHINNWLAWYQQKPGQAPKLLIYGATTLETGVPSRFSGSGSGTDYTLTISSLQPEDFATYYCQQSWNTPWTFGQGTKLEIKRLEGKPIPNPLLGLDSTGSGEDLKNVFPPEVAVFEPSEAEISHTQKATLVCLATGFYPDHVELSWWVNGKEVHSGVSTDPQPLKEQPALNDSRYCLSSRLRVSATFWQNPRNHFRCQVQFYGLSENDEWTQDRAKPVTQIVSAEAWGRADCGSQSFGLLDPKLCYLLDGILFIYGVILTALFLKRGRKKLLYIFKQPFMRPVQTTQEEDGCSCRFPEEEEGGCELRVKFSRSADAPAYQQGQNQLYNELNLGRREEYDVLDKRRGRDPEMGGKPQRRKNPQEGLYNELQKDKMAEAYSEIGMKGERRRGKGHDGLYQGLSTATKDTYDALHMQALPPRRAKRSGSGATNFSLLKQAGDVEENPGPTSMDWIWRILFLVGAATGAHSQLQLQESGPGLVKPSETLSLTCTVSGGSISSGDYYWGWIRQPPGKGLEWIGHIYYSGATYYNPSLKSRVTISVDTSRNQFSLKLSSVTAADTAVYYCTRDDSSNWRSRGQGTLVTVSSSGGGGSGGGGSQVQLQESGGGLAQAGGSLRLSCAASGRTFSMGWFRQAPGKEREFVAAITYSGGSPYYASSVRGRFTISRDNAKNTVYLQMNSLKPEDTAVYYCAANPTYGSDWNAENWGQGTQVTVSSGSGGGGSGGGGSGGGGSFEQVQLQQPGAELVKPGASVKMSCKASGYAFSSYWINWMKQKPGQGLEWIGQIYPGDGDTNYNGKFKGRATLTADTSSSTAYMQLSSLTSEDSAVYFCARSITTVVGCAMDYWGQGTSVTVSSTREQKLISEEDLGSGIQNPDPAVYQLRDSKSSDKSVCLFTDFDSQTNVSQSKDSDVYITDKTVLDMRSMDFKSNSAVAWSNKSDFACANAFNNSIIPEDTFFPSPESSCGTQSFGLLDPKLCYLLDGILFIYGVILTALFLKRGRKKLLYIFKQPFMRPVQTTQEEDGCSCRFPEEEEGGCELRVKFSRSADAPAYQQGQNQLYNELNLGRREEYDVLDKRRGRDPEMGGKPQRRKNPQEGLYNELQKDKMAEAYSEIGMKGERRRGKGHDGLYQGLSTATKDTYDALHMQALPPR

SEQ ID NO: 15864 - protein, 1087 aa, Artificial Sequence
  Synthetic Polypeptide
MALPVTALLLPLALLLHAARPDIQMTQSPSSLSASVGDRVTITCKASDHINNWLAWYQQKPGQAPKLLIYGATTLETGVPSRFSGSGSGTDYTLTISSLQPEDFATYYCQQSWNTPWTFGQGTKLEIKRLEQSFGLLDPKLCYLLDGILFIYGVILTALFLRVKFSRSADAPAYQQGQNQLYNELNLGRREEYDVLDKRRGRDPEMGGKPQRRKNPQEGLYNELQKDKMAEAYSEIGMKGERRRGKGHDGLYQGLSTATKDTYDALHMQALPPRRAKRSGSGATNFSLLKQAGDVEENPGPTSMDWIWRILFLVGAATGAHSQLQLQESGPGLVKPSETLSLTCTVSGGSISSGDYYWGWIRQPPGKGLEWIGHIYYSGATYYNPSLKSRVTISVDTSRNQFSLKLSSVTAADTAVYYCTRDDSSNWRSRGQGTLVTVSSSGGGGSGGGGSQVQLQESGGGLAQAGGSLRLSCAASGRTFSMGWFRQAPGKEREFVAAITYSGGSPYYASSVRGRFTISRDNAKNTVYLQMNSLKPEDTAVYYCAANPTYGSDWNAENWGQGTQVTVSSGSGGGGSGGGGSGGGGSFEQVQLQQPGAELVKPGASVKMSCKASGYAFSSYWINWMKQKPGQGLEWIGQIYPGDGDTNYNGKFKGRATLTADTSSSTAYMQLSSLTSEDSAVYFCARSITTVVGCAMDYWGQGTSVTVSSTRQSFGLLDPKLCYLLDGILFIYGVILTALFLRVKFSRSADAPAYQQGQNQLYNELNLGRREEYDVLDKRRGRDPEMGGKPQRRKNPQEGLYNELQKDKMAEAYSEIGMKGERRRGKGHDGLYQGLSTATKDTYDALHMQALPPRRAKRSGSGVKQTLNFDLLKLAGDVESNPGPSRGHMTEYKPTVRLATRDDVPRAVRTLAAAFADYPATRHTVDPDRHIERVTELQELFLTRVGLDIGKVWVADDGAAVAVWTTPESVEAGAVFAEIGPRMAELSGSRLAAQQQMEGLLAPHRPKEPAWFLATVGVSPDHQGKGLGSAVVLPGVEAAERAGVPAFLETSAPRNLPFYERLGFTVTADVEVPEGPRTWCMTRKPGA

SEQ ID NO: 15865 - protein, 912 aa, Artificial Sequence
  Synthetic Polypeptide
MALPVTALLLPLALLLHAARPDIQMTQSPSSLSASVGDRVTITCKASDHINNWLAWYQQKPGQAPKLLIYGATTLETGVPSRFSGSGSGTDYTLTISSLQPEDFATYYCQQSWNTPWTFGQGTKLEIKRLEGQPKANPTVTLFPPSSEELQANKATLVCLISDFYPGAVTVAWKADGSPVKAGVETTKPSKQSNNKYAASSYLSLTPEQWKSHRSYSCQVTHEGSTVEKTVAPTECSPIKTDVITMDPKDNCSKDANDTLLLQLTNTSAYYMYLLLLLKSVVYFAIITCCLLRRTAFCCNGEKSRAKRSGSGATNFSLLKQAGDVEENPGPTSMDWIWRILFLVGAATGAHSQLQLQESGPGLVKPSETLSLTCTVSGGSISSGDYYWGWIRQPPGKGLEWIGHIYYSGATYYNPSLKSRVTISVDTSRNQFSLKLSSVTAADTAVYYCTRDDSSNWRSRGQGTLVTVSSSGGGGSGGGGSQVQLQESGGGLAQAGGSLRLSCAASGRTFSMGWFRQAPGKEREFVAAITYSGGSPYYASSVRGRFTISRDNAKNTVYLQMNSLKPEDTAVYYCAANPTYGSDWNAENWGQGTQVTVSSGSGGGGSGGGGSGGGGSFEQVQLQQPGAELVKPGASVKMSCKASGYAFSSYWINWMKQKPGQGLEWIGQIYPGDGDTNYNGKFKGRATLTADTSSSTAYMQLSSLTSEDSAVYFCARSITTVVGCAMDYWGQGTSVTVSSTRASTKGPSVFPLAPSSKSTSGGTAALGCLVKDYFPEPVTVSWNSGALTSGVHTFPAVLQSSGLYSLSSVVTVPSSSLGTQTYICNVNHKPSNTKVDKRVEPKSCEVKTDSTDHVKPKETENTKQPSKSCHKPKAIVHTEKVNMMSLTVLGLRMLFAKTVAVNFLLTAKLFFL

SEQ ID NO: 15866 - protein, 890 aa, Artificial Sequence
  Synthetic Polypeptide
MALPVTALLLPLALLLHAARPDIQMTQSPSSLSASVGDRVTITCKASDHINNWLAWYQQKPGQAPKLLIYGATTLETGVPSRFSGSGSGTDYTLTISSLQPEDFATYYCQQSWNTPWTFGQGTKLEIKRLEGQPKANPTVTLFPPSSEELQANKATLVCLISDFYPGAVTVAWKADGSPVKAGVETTKPSKQSNNKYAASSYLSLTPEQWKSHRSYSCQVTHEGSTVEKTVAPTECSGRADCGITSASYHQGVLSATILYEILLGKATLYAVLVSALVLMAMVKRKDSRGRAKRSGSGATNFSLLKQAGDVEENPGPTSMDWIWRILFLVGAATGAHSQLQLQESGPGLVKPSETLSLTCTVSGGSISSGDYYWGWIRQPPGKGLEWIGHIYYSGATYYNPSLKSRVTISVDTSRNQFSLKLSSVTAADTAVYYCTRDDSSNWRSRGQGTLVTVSSSGGGGSGGGGSQVQLQESGGGLAQAGGSLRLSCAASGRTFSMGWFRQAPGKEREFVAAITYSGGSPYYASSVRGRFTISRDNAKNTVYLQMNSLKPEDTAVYYCAANPTYGSDWNAENWGQGTQVTVSSGSGGGGSGGGGSGGGGSFEQVQLQQPGAELVKPGASVKMSCKASGYAFSSYWINWMKQKPGQGLEWIGQIYPGDGDTNYNGKFKGRATLTADTSSSTAYMQLSSLTSEDSAVYFCARSITTVVGCAMDYWGQGTSVTVSSTRASTKGPSVFPLAPSSKSTSGGTAALGCLVKDYFPEPVTVSWNSGALTSGVHTFPAVLQSSGLYSLSSVVTVPSSSLGTQTYICNVNHKPSNTKVDKRVEPKSCIPEDTFFPSSDVPCDVKLVEKSFETDTNLNFQNLSVIGFRILLLKVAGFNLLMTLRLWSS

SEQ ID NO: 15867 - protein, 890 aa, Artificial Sequence
  Synthetic Polypeptide
MALPVTALLLPLALLLHAARPDIQMTQSPSSLSASVGDRVTITCKASDHINNWLAWYQQKPGQAPKLLIYGATTLETGVPSRFSGSGSGTDYTLTISSLQPEDFATYYCQQSWNTPWTFGQGTKLEIKRLEGQPKANPTVTLFPPSSEELQANKATLVCLISDFYPGAVTVAWKADGSPVKAGVETTKPSKQSNNKYAASSYLSLTPEQWKSHRSYSCQVTHEGSTVEKTVAPTECSGRADCGFTSESYQQGVLSATILYEILLGKATLYAVLVSALVLMAMVKRKDSRGRAKRSGSGATNFSLLKQAGDVEENPGPTSMDWIWRILFLVGAATGAHSQLQLQESGPGLVKPSETLSLTCTVSGGSISSGDYYWGWIRQPPGKGLEWIGHIYYSGATYYNPSLKSRVTISVDTSRNQFSLKLSSVTAADTAVYYCTRDDSSNWRSRGQGTLVTVSSSGGGGSGGGGSQVQLQESGGGLAQAGGSLRLSCAASGRTFSMGWFRQAPGKEREFVAAITYSGGSPYYASSVRGRFTISRDNAKNTVYLQMNSLKPEDTAVYYCAANPTYGSDWNAENWGQGTQVTVSSGSGGGGSGGGGSGGGGSFEQVQLQQPGAELVKPGASVKMSCKASGYAFSSYWINWMKQKPGQGLEWIGQIYPGDGDTNYNGKFKGRATLTADTSSSTAYMQLSSLTSEDSAVYFCARSITTVVGCAMDYWGQGTSVTVSSTRASTKGPSVFPLAPSSKSTSGGTAALGCLVKDYFPEPVTVSWNSGALTSGVHTFPAVLQSSGLYSLSSVVTVPSSSLGTQTYICNVNHKPSNTKVDKRVEPKSCIPEDTFFPSPESSCDVKLVEKSFETDTNLNFQNLSVIGFRILLLKVAGFNLLMTLRLWSS

SEQ ID NO: 15868 - protein, 720 aa, Artificial Sequence
  Synthetic Polypeptide
MDWIWRILFLVGAATGAHSQLQLQESGPGLVKPSETLSLTCTVSGGSISSGDYYWGWIRQPPGKGLEWIGHIYYSGATYYNPSLKSRVTISVDTSRNQFSLKLSSVTAADTAVYYCTRDDSSNWRSRGQGTLVTVSSSGGGGSGGGGSQVQLQESGGGLAQAGGSLRLSCAASGRTFSMGWFRQAPGKEREFVAAITYSGGSPYYASSVRGRFTISRDNAKNTVYLQMNSLKPEDTAVYYCAANPTYGSDWNAENWGQGTQVTVSSGSGGGGSGGGGSGGGGSFEQVQLQQPGAELVKPGASVKMSCKASGYAFSSYWINWMKQKPGQGLEWIGQIYPGDGDTNYNGKFKGRATLTADTSSSTAYMQLSSLTSEDSAVYFCARSITTVVGCAMDYWGQGTSVTVSSGGGGSGGGGSGGGGSDIQMTQSPSSLSASVGDRVTITCKASDHINNWLAWYQQKPGQAPKLLIYGATTLETGVPSRFSGSGSGTDYTLTISSLQPEDFATYYCQQSWNTPWTFGQGTKLEIKRTRGGGSDGNEEMGGITQTPYKVSISGTTVILTCPQYPGSEILWQHNDKNIGGDEDDKNIGSDEDHLSLKEFSELEQSGYYVCYPRGSKPEDANFYLYLRARVCENCMEMDVMSVATIVIVDICITGGLLLLVYYWSKNRKAKAKPVTRGAGAGGRQRGQNKERPPPVPNPDYEPIRKGQRDLYSGLNQRRI

SEQ ID NO: 15869 - protein, 685 aa, Artificial Sequence
  Synthetic Polypeptide
MDWIWRILFLVGAATGAHSQLQLQESGPGLVKPSETLSLTCTVSGGSISSGDYYWGWIRQPPGKGLEWIGHIYYSGATYYNPSLKSRVTISVDTSRNQFSLKLSSVTAADTAVYYCTRDDSSNWRSRGQGTLVTVSSSGGGGSGGGGSQVQLQESGGGLAQAGGSLRLSCAASGRTFSMGWFRQAPGKEREFVAAITYSGGSPYYASSVRGRFTISRDNAKNTVYLQMNSLKPEDTAVYYCAANPTYGSDWNAENWGQGTQVTVSSGSGGGGSGGGGSGGGGSFEQVQLQQPGAELVKPGASVKMSCKASGYAFSSYWINWMKQKPGQGLEWIGQIYPGDGDTNYNGKFKGRATLTADTSSSTAYMQLSSLTSEDSAVYFCARSITTVVGCAMDYWGQGTSVTVSSGGGGSGGGGSGGGGSDIQMTQSPSSLSASVGDRVTITCKASDHINNWLAWYQQKPGQAPKLLIYGATTLETGVPSRFSGSGSGTDYTLTISSLQPEDFATYYCQQSWNTPWTFGQGTKLEIKRTRGGGSFKIPIEELEDRVFVNCNTSITWVEGTVGTLLSDITRLDLGKRILDPRGIYRCNGTDIYKDKESTVQVHYRMCQSCVELDPATVAGIIVTDVIATLLLALGVFCFAGHETGRLSGAADTQALLRNDQVYQPLRDRDDAQYSHLGGNWARNK

SEQ ID NO: 15870 - protein, 695 aa, Artificial Sequence
  Synthetic Polypeptide
MDWIWRILFLVGAATGAHSQLQLQESGPGLVKPSETLSLTCTVSGGSISSGDYYWGWIRQPPGKGLEWIGHIYYSGATYYNPSLKSRVTISVDTSRNQFSLKLSSVTAADTAVYYCTRDDSSNWRSRGQGTLVTVSSSGGGGSGGGGSQVQLQESGGGLAQAGGSLRLSCAASGRTFSMGWFRQAPGKEREFVAAITYSGGSPYYASSVRGRFTISRDNAKNTVYLQMNSLKPEDTAVYYCAANPTYGSDWNAENWGQGTQVTVSSGSGGGGSGGGGSGGGGSFEQVQLQQPGAELVKPGASVKMSCKASGYAFSSYWINWMKQKPGQGLEWIGQIYPGDGDTNYNGKFKGRATLTADTSSSTAYMQLSSLTSEDSAVYFCARSITTVVGCAMDYWGQGTSVTVSSGGGGSGGGGSGGGGSDIQMTQSPSSLSASVGDRVTITCKASDHINNWLAWYQQKPGQAPKLLIYGATTLETGVPSRFSGSGSGTDYTLTISSLQPEDFATYYCQQSWNTPWTFGQGTKLEIKRTRGGGSQSIKGNHLVKVYDYQEDGSVLLTCDAEAKNITWFKDGKMIGFLTEDKKKWNLGSNAKDPRGMYQCKGSQNKSKPLQVYYRMCQNCIELNAATISGFLFAEIVSIFVLAVGVYFIAGQDGVRQSRASDKQTLLPNDQLYQPLKDREDDQYSHLQGNQLRRN

SEQ ID NO: 15871 - protein, 678 aa, Artificial Sequence
  Synthetic Polypeptide
MDWIWRILFLVGAATGAHSQLQLQESGPGLVKPSETLSLTCTVSGGSISSGDYYWGWIRQPPGKGLEWIGHIYYSGATYYNPSLKSRVTISVDTSRNQFSLKLSSVTAADTAVYYCTRDDSSNWRSRGQGTLVTVSSSGGGGSGGGGSQVQLQESGGGLAQAGGSLRLSCAASGRTFSMGWFRQAPGKEREFVAAITYSGGSPYYASSVRGRFTISRDNAKNTVYLQMNSLKPEDTAVYYCAANPTYGSDWNAENWGQGTQVTVSSGSGGGGSGGGGSGGGGSFEQVQLQQPGAELVKPGASVKMSCKASGYAFSSYWINWMKQKPGQGLEWIGQIYPGDGDTNYNGKFKGRATLTADTSSSTAYMQLSSLTSEDSAVYFCARSITTVVGCAMDYWGQGTSVTVSSGGGGSGGGGSGGGGSDIQMTQSPSSLSASVGDRVTITCKASDHINNWLAWYQQKPGQAPKLLIYGATTLETGVPSRFSGSGSGTDYTLTISSLQPEDFATYYCQQSWNTPWTFGQGTKLEIKRTRGGGSQSFGLLDPKLCYLLDGILFIYGVILTALFLRVKFSRSADAPAYQQGQNQLYNELNLGRREEYDVLDKRRGRDPEMGGKPQRRKNPQEGLYNELQKDKMAEAYSEIGMKGERRRGKGHDGLYQGLSTATKDTYDALHMQALPPR

SEQ ID NO: 15872 - protein, 714 aa, Artificial Sequence
  Synthetic Polypeptide
MDWIWRILFLVGAATGAHSQLQLQESGPGLVKPSETLSLTCTVSGGSISSGDYYWGWIRQPPGKGLEWIGHIYYSGATYYNPSLKSRVTISVDTSRNQFSLKLSSVTAADTAVYYCTRDDSSNWRSRGQGTLVTVSSSGGGGSGGGGSQVQLQESGGGLAQAGGSLRLSCAASGRTFSMGWFRQAPGKEREFVAAITYSGGSPYYASSVRGRFTISRDNAKNTVYLQMNSLKPEDTAVYYCAANPTYGSDWNAENWGQGTQVTVSSGSGGGGSGGGGSGGGGSFEQVQLQQPGAELVKPGASVKMSCKASGYAFSSYWINWMKQKPGQGLEWIGQIYPGDGDTNYNGKFKGRATLTADTSSSTAYMQLSSLTSEDSAVYFCARSITTVVGCAMDYWGQGTSVTVSSTRIQNPDPAVYQLRDSKSSDKSVCLFTDFDSQTNVSQSKDSDVYITDKTVLDMRSMDFKSNSAVAWSNKSDFACANAFNNSIIPEDTFFPSPESSCDVKLVEKSFETDTNLNFQNLSVIGFRILLLKVAGFNLLMTLRLWSSRAKRSGSGVKQTLNFDLLKLAGDVESNPGPSRGHMAKPLSQEESTLIERATATINSIPISEDYSVASAALSSDGRIFTGVNVYHFTGGPCAELVVLGTAAAAAAGNLTCIVAIGNENRGILSPCGRCRQVLLDLHPGIKAIVKDSDGQPTAVGIRELLPSGYVWEG

SEQ ID NO: 15873 - protein, 548 aa, Artificial Sequence
  Synthetic Polypeptide
MDWIWRILFLVGAATGAHSQLQLQESGPGLVKPSETLSLTCTVSGGSISSGDYYWGWIRQPPGKGLEWIGHIYYSGATYYNPSLKSRVTISVDTSRNQFSLKLSSVTAADTAVYYCTRDDSSNWRSRGQGTLVTVSSSGGGGSGGGGSQVQLQESGGGLAQAGGSLRLSCAASGRTFSMGWFRQAPGKEREFVAAITYSGGSPYYASSVRGRFTISRDNAKNTVYLQMNSLKPEDTAVYYCAANPTYGSDWNAENWGQGTQVTVSSGSGGGGSGGGGSGGGGSFEQVQLQQPGAELVKPGASVKMSCKASGYAFSSYWINWMKQKPGQGLEWIGQIYPGDGDTNYNGKFKGRATLTADTSSSTAYMQLSSLTSEDSAVYFCARSITTVVGCAMDYWGQGTSVTVSSTRIQNPDPAVYQLRDSKSSDKSVCLFTDFDSQTNVSQSKDSDVYITDKTVLDMRSMDFKSNSAVAWSNKSDFACANAFNNSIIPEDTFFPSPESSCDVKLVEKSFETDTNLNFQNLSVIGFRILLLKVAGFNLLMTLRLWSS

SEQ ID NO: 15874 - protein, 726 aa, Artificial Sequence
  Synthetic Polypeptide
MDWIWRILFLVGAATGAHSQLQLQESGPGLVKPSETLSLTCTVSGGSISSGDYYWGWIRQPPGKGLEWIGHIYYSGATYYNPSLKSRVTISVDTSRNQFSLKLSSVTAADTAVYYCTRDDSSNWRSRGQGTLVTVSSSGGGGSGGGGSQVQLQESGGGLAQAGGSLRLSCAASGRTFSMGWFRQAPGKEREFVAAITYSGGSPYYASSVRGRFTISRDNAKNTVYLQMNSLKPEDTAVYYCAANPTYGSDWNAENWGQGTQVTVSSGSGGGGSGGGGSGGGGSFEQVQLQQPGAELVKPGASVKMSCKASGYAFSSYWINWMKQKPGQGLEWIGQIYPGDGDTNYNGKFKGRATLTADTSSSTAYMQLSSLTSEDSAVYFCARSITTVVGCAMDYWGQGTSVTVSSTREQKLISEEDGSGIQNPDPAVYQLRDSKSSDKSVCLFTDFDSQTNVSQSKDSDVYITDKCVLDMRSMDFKSNSAVAWSNKSDFACANAFNNSIIPEDTFFPSPESSCDVKLVEKSFETDTNLNFQNLSVIGFRILLLKVAGFNLLMTLRLWSSRAKRSGSGVKQTLNFDLLKLAGDVESNPGPSRGHMAKPLSQEESTLIERATATINSIPISEDYSVASAALSSDGRIFTGVNVYHFTGGPCAELVVLGTAAAAAAGNLTCIVAIGNENRGILSPCGRCRQVLLDLHPGIKAIVKDSDGQPTAVGIRELLPSGYVWEG

SEQ ID NO: 15875 - protein, 560 aa, Artificial Sequence
  Synthetic Polypeptide
MDWIWRILFLVGAATGAHSQLQLQESGPGLVKPSETLSLTCTVSGGSISSGDYYWGWIRQPPGKGLEWIGHIYYSGATYYNPSLKSRVTISVDTSRNQFSLKLSSVTAADTAVYYCTRDDSSNWRSRGQGTLVTVSSSGGGGSGGGGSQVQLQESGGGLAQAGGSLRLSCAASGRTFSMGWFRQAPGKEREFVAAITYSGGSPYYASSVRGRFTISRDNAKNTVYLQMNSLKPEDTAVYYCAANPTYGSDWNAENWGQGTQVTVSSGSGGGGSGGGGSGGGGSFEQVQLQQPGAELVKPGASVKMSCKASGYAFSSYWINWMKQKPGQGLEWIGQIYPGDGDTNYNGKFKGRATLTADTSSSTAYMQLSSLTSEDSAVYFCARSITTVVGCAMDYWGQGTSVTVSSTREQKLISEEDGSGIQNPDPAVYQLRDSKSSDKSVCLFTDFDSQTNVSQSKDSDVYITDKCVLDMRSMDFKSNSAVAWSNKSDFACANAFNNSIIPEDTFFPSPESSCDVKLVEKSFETDTNLNFQNLSVIGFRILLLKVAGFNLLMTLRLWSS

SEQ ID NO: 15876 - protein, 1391 aa, Artificial Sequence
  Synthetic Polypeptide
MALPVTALLLPLALLLHAARPEVQLLESGGGLVQPGGSLRLSCAASGFTFSSYAMSWVRQAPGKGLEWVSSISGSGDYIYYADSVKGRFTISRDISKNTLYLQMNSLRAEDTAVYYCAKEGTGANSSLADYRGQGTLVTVSSGGGSGGGSQVQLVESGGGLVQAGDSVTLSCTASGRTFSSYALAWFRQRPGKEREFVAGLRWGGPTNYADSVKDRFTISGDSAKHTMYLQMNSLKPEDTAVYYCGYNPGGWAVPSQYEYDSWGQGTQVTVSSGTGGGGSGGGGSGGGGSEFDIQMTQSPSSLSASVGDRVTITCKASDHINNWLAWYQQKPGQAPKLLIYGATTLETGVPSRFSGSGSGTDYTLTISSLQPEDFATYYCQQSWNTPWTFGQGTKLEIKRLEIQNPDPAVYQLRDSKSSDKSVCLFTDFDSQTNVSQSKDSDVYITDKCVLDMRSMDFKSNSAVAWSNKSDFACANAFNNSIIPEDTFFPSSDVPCDVKLVEKSFETDTNLNFQNLSVIGFRILLLKVAGFNLLMTLRLWSSRAKRSGSGVKQTLNFDLLKLAGDVESNPGPTSMDWIWRILFLVGAATGAHSQLQLQESGPGLVKPSETLSLTCTVSGGSISSGDYYWGWIRQPPGKGLEWIGHIYYSGATYYNPSLKSRVTISVDTSRNQFSLKLSSVTAADTAVYYCTRDDSSNWRSRGQGTLVTVSSSGGGGSGGGGSQVQLQESGGGLAQAGGSLRLSCAASGRTFSMGWFRQAPGKEREFVAAITYSGGSPYYASSVRGRFTISRDNAKNTVYLQMNSLKPEDTAVYYCAANPTYGSDWNAENWGQGTQVTVSSGSGGGGSGGGGSGGGGSFEQVQLQQPGAELVKPGASVKMSCKASGYAFSSYWINWMKQKPGQGLEWIGQIYPGDGDTNYNGKFKGRATLTADTSSSTAYMQLSSLTSEDSAVYFCARSITTVVGCAMDYWGQGTSVTVSSTREDLKNVFPPEVAVFEPSKAEIAHTQKATLVCLATGFYPDHVELSWWVNGKEVHSGVCTDPQPLKEQPALNDSRYCLSSRLRVSATFWQNPRNHFRCQVQFYGLSENDEWTQDRAKPVTQIVSAEAWGRADCGITSASYHQGVLSATILYEILLGKATLYAVLVSALVLMAMVKRKDSRGRAKRSGSGATNFSLLKQAGDVEENPGPSRGHMTEYKPTVRLATRDDVPRAVRTLAAAFADYPATRHTVDPDRHIERVTELQELFLTRVGLDIGKVWVADDGAAVAVWTTPESVEAGAVFAEIGPRMAELSGSRLAAQQQMEGLLAPHRPKEPAWFLATVGVSPDHQGKGLGSAVVLPGVEAAERAGVPAFLETSAPRNLPFYERLGFTVTADVEVPEGPRTWCMTRKPGA

SEQ ID NO: 15877 - protein, 1390 aa, Artificial Sequence
  Synthetic Polypeptide
MALPVTALLLPLALLLHAARPEVQLLESGGGLVQPGGSLRLSCAASGFTFSSYAMSWVRQAPGKGLEWVSSISGSGDYIYYADSVKGRFTISRDISKNTLYLQMNSLRAEDTAVYYCAKEGTGANSSLADYRGQGTLVTVSSGGGSGGGSQVQLVESGGGLVQAGDSVTLSCTASGRTFSSYALAWFRQRPGKEREFVAGLRWGGPTNYADSVKDRFTISGDSAKHTMYLQMNSLKPEDTAVYYCGYNPGGWAVPSQYEYDSWGQGTQVTVSSGTGGGGSGGGGSGGGGSEFDIQMTQSPSSLSASVGDRVTITCKASDHINNWLAWYQQKPGQAPKLLIYGATTLETGVPSRFSGSGSGTDYTLTISSLQPEDFATYYCQQSWNTPWTFGQGTKLEIKRLEDLKNVFPPEVAVFEPSKAEIAHTQKATLVCLATGFYPDHVELSWWVNGKEVHSGVCTDPQPLKEQPALNDSRYCLSSRLRVSATFWQNPRNHFRCQVQFYGLSENDEWTQDRAKPVTQIVSAEAWGRADCGITSASYHQGVLSATILYEILLGKATLYAVLVSALVLMAMVKRKDSRGRAKRSGSGATNFSLLKQAGDVEENPGPTSMDWIWRILFLVGAATGAHSQLQLQESGPGLVKPSETLSLTCTVSGGSISSGDYYWGWIRQPPGKGLEWIGHIYYSGATYYNPSLKSRVTISVDTSRNQFSLKLSSVTAADTAVYYCTRDDSSNWRSRGQGTLVTVSSSGGGGSGGGGSQVQLQESGGGLAQAGGSLRLSCAASGRTFSMGWFRQAPGKEREFVAAITYSGGSPYYASSVRGRFTISRDNAKNTVYLQMNSLKPEDTAVYYCAANPTYGSDWNAENWGQGTQVTVSSGSGGGGSGGGGSGGGGSFEQVQLQQPGAELVKPGASVKMSCKASGYAFSSYWINWMKQKPGQGLEWIGQIYPGDGDTNYNGKFKGRATLTADTSSSTAYMQLSSLTSEDSAVYFCARSITTVVGCAMDYWGQGTSVTVSSTRIQNPDPAVYQLRDSKSSDKSVCLFTDFDSQTNVSQSKDSDVYITDKCVLDMRSMDFKSNSAVAWSNKSDFACANAFNNSIIPEDTFFPSSDVPCDVKLVEKSFETDTNLNFQNLSVIGFRILLLKVAGFNLLMTLRLWSSRAKRSGSGVKQTLNFDLLKLAGDVESNPGPSRGHMTEYKPTVRLATRDDVPRAVRTLAAAFADYPATRHTVDPDRHIERVTELQELFLTRVGLDIGKVWVADDGAAVAVWTTPESVEAGAVFAEIGPRMAELSGSRLAAQQQMEGLLAPHRPKEPAWFLATVGVSPDHQGKGLGSAVVLPGVEAAERAGVPAFLETSAPRNLPFYERLGFTVTADVEVPEGPRTWCMTRKPGA

SEQ ID NO: 15878 - protein, 1390 aa, Artificial Sequence
  Synthetic Polypeptide
MALPVTALLLPLALLLHAARPEVQLLESGGGLVQPGGSLRLSCAASGFTFSSYAMSWVRQAPGKGLEWVSSISGSGDYIYYADSVKGRFTISRDISKNTLYLQMNSLRAEDTAVYYCAKEGTGANSSLADYRGQGTLVTVSSGGGSGGGSQVQLVESGGGLVQAGDSVTLSCTASGRTFSSYALAWFRQRPGKEREFVAGLRWGGPTNYADSVKDRFTISGDSAKHTMYLQMNSLKPEDTAVYYCGYNPGGWAVPSQYEYDSWGQGTQVTVSSGTGGGGSGGGGSGGGGSEFDIQMTQSPSSLSASVGDRVTITCKASDHINNWLAWYQQKPGQAPKLLIYGATTLETGVPSRFSGSGSGTDYTLTISSLQPEDFATYYCQQSWNTPWTFGQGTKLEIKRLEDLKNVFPPEVAVFEPSEAEISHTQKATLVCLATGFYPDHVELSWWVNGKEVHSGVCTDPQPLKEQPALNDSRYCLSSRLRVSATFWQNPRNHFRCQVQFYGLSENDEWTQDRAKPVTQIVSAEAWGRADCGFTSESYQQGVLSATILYEILLGKATLYAVLVSALVLMAMVKRKDSRGRAKRSGSGATNFSLLKQAGDVEENPGPTSMDWIWRILFLVGAATGAHSQLQLQESGPGLVKPSETLSLTCTVSGGSISSGDYYWGWIRQPPGKGLEWIGHIYYSGATYYNPSLKSRVTISVDTSRNQFSLKLSSVTAADTAVYYCTRDDSSNWRSRGQGTLVTVSSSGGGGSGGGGSQVQLQESGGGLAQAGGSLRLSCAASGRTFSMGWFRQAPGKEREFVAAITYSGGSPYYASSVRGRFTISRDNAKNTVYLQMNSLKPEDTAVYYCAANPTYGSDWNAENWGQGTQVTVSSGSGGGGSGGGGSGGGGSFEQVQLQQPGAELVKPGASVKMSCKASGYAFSSYWINWMKQKPGQGLEWIGQIYPGDGDTNYNGKFKGRATLTADTSSSTAYMQLSSLTSEDSAVYFCARSITTVVGCAMDYWGQGTSVTVSSTRIQNPDPAVYQLRDSKSSDKSVCLFTDFDSQTNVSQSKDSDVYITDKCVLDMRSMDFKSNSAVAWSNKSDFACANAFNNSIIPEDTFFPSPESSCDVKLVEKSFETDTNLNFQNLSVIGFRILLLKVAGFNLLMTLRLWSSRAKRSGSGVKQTLNFDLLKLAGDVESNPGPSRGHMTEYKPTVRLATRDDVPRAVRTLAAAFADYPATRHTVDPDRHIERVTELQELFLTRVGLDIGKVWVADDGAAVAVWTTPESVEAGAVFAEIGPRMAELSGSRLAAQQQMEGLLAPHRPKEPAWFLATVGVSPDHQGKGLGSAVVLPGVEAAERAGVPAFLETSAPRNLPFYERLGFTVTADVEVPEGPRTWCMTRKPGA

SEQ ID NO: 15879 - protein, 1157 aa, Artificial Sequence
  Synthetic Polypeptide
MALPVTALLLPLALLLHAARPEVQLLESGGGLVQPGGSLRLSCAASGFTFSSYAMSWVRQAPGKGLEWVSSISGSGDYIYYADSVKGRFTISRDISKNTLYLQMNSLRAEDTAVYYCAKEGTGANSSLADYRGQGTLVTVSSGGGSGGGSQVQLVESGGGLVQAGDSVTLSCTASGRTFSSYALAWFRQRPGKEREFVAGLRWGGPTNYADSVKDRFTISGDSAKHTMYLQMNSLKPEDTAVYYCGYNPGGWAVPSQYEYDSWGQGTQVTVSSGTGGGGSGGGGSGGGGSEFDIQMTQSPSSLSASVGDRVTITCKASDHINNWLAWYQQKPGQAPKLLIYGATTLETGVPSRFSGSGSGTDYTLTISSLQPEDFATYYCQQSWNTPWTFGQGTKLEIKRLEDLKNVFPPEVAVFEPSEAEISHTQKATLVCLATGFYPDHVELSWWVNGKEVHSGVCTDPQPLKEQPALNDSRYCLSSRLRVSATFWQNPRNHFRCQVQFYGLSENDEWTQDRAKPVTQIVSAEAWGRADCGFTSESYQQGVLSATILYEILLGKATLYAVLVSALVLMAMVKRKDSRGRAKRSGSGATNFSLLKQAGDVEENPGPTSMDWIWRILFLVGAATGAHSQLQLQESGPGLVKPSETLSLTCTVSGGSISSGDYYWGWIRQPPGKGLEWIGHIYYSGATYYNPSLKSRVTISVDTSRNQFSLKLSSVTAADTAVYYCTRDDSSNWRSRGQGTLVTVSSSGGGGSGGGGSQVQLQESGGGLAQAGGSLRLSCAASGRTFSMGWFRQAPGKEREFVAAITYSGGSPYYASSVRGRFTISRDNAKNTVYLQMNSLKPEDTAVYYCAANPTYGSDWNAENWGQGTQVTVSSGSGGGGSGGGGSGGGGSFEQVQLQQPGAELVKPGASVKMSCKASGYAFSSYWINWMKQKPGQGLEWIGQIYPGDGDTNYNGKFKGRATLTADTSSSTAYMQLSSLTSEDSAVYFCARSITTVVGCAMDYWGQGTSVTVSSTRIQNPDPAVYQLRDSKSSDKSVCLFTDFDSQTNVSQSKDSDVYITDKCVLDMRSMDFKSNSAVAWSNKSDFACANAFNNSIIPEDTFFPSPESSCDVKLVEKSFETDTNLNFQNLSVIGFRILLLKVAGFNLLMTLRLWSS

SEQ ID NO: 15880 - protein, 1382 aa, Artificial Sequence
  Synthetic Polypeptide
MALPVTALLLPLALLLHAARPEVQLLESGGGLVQPGGSLRLSCAASGFTFSSYAMSWVRQAPGKGLEWVSSISGSGDYIYYADSVKGRFTISRDISKNTLYLQMNSLRAEDTAVYYCAKEGTGANSSLADYRGQGTLVTVSSGGGSGGGSQVQLVESGGGLVQAGDSVTLSCTASGRTFSSYALAWFRQRPGKEREFVAGLRWGGPTNYADSVKDRFTISGDSAKHTMYLQMNSLKPEDTAVYYCGYNPGGWAVPSQYEYDSWGQGTQVTVSSGTGGGGSGGGGSGGGGSEFDIQMTQSPSSLSASVGDRVTITCKASDHINNWLAWYQQKPGQAPKLLIYGATTLETGVPSRFSGSGSGTDYTLTISSLQPEDFATYYCQQSWNTPWTFGQGTKLEIKRLEDLKNVFPPEVAVFEPSEAEISHTQKATLVCLATGFYPDHVELSWWVNGKEVHSGVCTDPQPLKEQPALNDSRYCLSSRLRVSATFWQNPRNHFRCQVQFYGLSENDEWTQDRAKPVTQIVSAEAWGRADCGFTSESYQQGVLSATILYEILLGKATLYAVLVSALVLMAMVKRKDSRGRAKRSGSGATNFSLLKQAGDVEENPGPTSMDWIWRILFLVGAATGAHSQLQLQESGPGLVKPSETLSLTCTVSGGSISSGDYYWGWIRQPPGKGLEWIGHIYYSGATYYNPSLKSRVTISVDTSRNQFSLKLSSVTAADTAVYYCTRDDSSNWRSRGQGTLVTVSSSGGGGSGGGGSQVQLQESGGGLAQAGGSLRLSCAASGRTFSMGWFRQAPGKEREFVAAITYSGGSPYYASSVRGRFTISRDNAKNTVYLQMNSLKPEDTAVYYCAANPTYGSDWNAENWGQGTQVTVSSGSGGGGSGGGGSGGGGSFEQVQLQQPGAELVKPGASVKMSCKASGYAFSSYWINWMKQKPGQGLEWIGQIYPGDGDTNYNGKFKGRATLTADTSSSTAYMQLSSLTSEDSAVYFCARSITTVVGCAMDYWGQGTSVTVSSTRIQNPDPAVYQLRDSKSSDKSVCLFTDFDSQTNVSQSKDSDVYITDKCVLDMRSMDFKSNSAVAWSNKSDFACANAFNNSIIPEDTFFPSPESSCDVKLVEKSFETDTNLNFQNLSVIGFRILLLKVAGFNLLMTLRLWSSRAKRSGSGVKQTLNFDLLKLAGDVESNPGPSRGGIHTMATYEVLCEVARKLGTDDREVVLFLLNVFIPQPTLAQLIGALRALKEEGRLTFPLLAECLFRAGRRDLLRDLLHLDPRFLERHLAGTMSYFSPYQLTVLHVDGELCARDIRSLIFLSKDTIGSRSTPQTFLHWVYCMENLDLLGPTDVDALMSMLRSLSRVDLQRQVQTLMGLHLSGPSHSQHYRHTP

SEQ ID NO: 15881 - protein, 1161 aa, Artificial Sequence
  Synthetic Polypeptide
MALPVTALLLPLALLLHAARPEVQLLESGGGLVQPGGSLRLSCAASGFTFSSYAMSWVRQAPGKGLEWVSSISGSGDYIYYADSVKGRFTISRDISKNTLYLQMNSLRAEDTAVYYCAKEGTGANSSLADYRGQGTLVTVSSGGGSGGGSQVQLVESGGGLVQAGDSVTLSCTASGRTFSSYALAWFRQRPGKEREFVAGLRWGGPTNYADSVKDRFTISGDSAKHTMYLQMNSLKPEDTAVYYCGYNPGGWAVPSQYEYDSWGQGTQVTVSSGTGGGGSGGGGSGGGGSEFDIQMTQSPSSLSASVGDRVTITCKASDHINNWLAWYQQKPGQAPKLLIYGATTLETGVPSRFSGSGSGTDYTLTISSLQPEDFATYYCQQSWNTPWTFGQGTKLEIKRLEIQNPDPAVYQLRDSKSSDKSVCLFTDFDSQTNVSQSKDSDVYITDKCVLDMRSMDFKSNSAVAWSNKSDFACANAFNNSIIPEDTFFPSPESSCDVKLVEKSFETDTNLNFQNLSVIGFRILLLKVAGFNLLMTLRLWSSRAKRSGSGVKQTLNFDLLKLAGDVESNPGPTSMDWIWRILFLVGAATGAHSQLQLQESGPGLVKPSETLSLTCTVSGGSISSGDYYWGWIRQPPGKGLEWIGHIYYSGATYYNPSLKSRVTISVDTSRNQFSLKLSSVTAADTAVYYCTRDDSSNWRSRGQGTLVTVSSSGGGGSGGGGSQVQLQESGGGLAQAGGSLRLSCAASGRTFSMGWFRQAPGKEREFVAAITYSGGSPYYASSVRGRFTISRDNAKNTVYLQMNSLKPEDTAVYYCAANPTYGSDWNAENWGQGTQVTVSSGSGGGGSGGGGSGGGGSFEQVQLQQPGAELVKPGASVKMSCKASGYAFSSYWINWMKQKPGQGLEWIGQIYPGDGDTNYNGKFKGRATLTADTSSSTAYMQLSSLTSEDSAVYFCARSITTVVGCAMDYWGQGTSVTVSSTREDLKNVFPPEVAVFEPSEAEISHTQKATLVCLATGFYPDHVELSWWVNGKEVHSGVCTDPQPLKEQPALNDSRYCLSSRLRVSATFWQNPRNHFRCQVQFYGLSENDEWTQDRAKPVTQIVSAEAWGRADCGFTSESYQQGVLSATILYEILLGKATLYAVLVSALVLMAMVKRKDSRG

SEQ ID NO: 15882 - protein, 1383 aa, Artificial Sequence
  Synthetic Polypeptide
MALPVTALLLPLALLLHAARPEVQLLESGGGLVQPGGSLRLSCAASGFTFSSYAMSWVRQAPGKGLEWVSSISGSGDYIYYADSVKGRFTISRDISKNTLYLQMNSLRAEDTAVYYCAKEGTGANSSLADYRGQGTLVTVSSGGGSGGGSQVQLVESGGGLVQAGDSVTLSCTASGRTFSSYALAWFRQRPGKEREFVAGLRWGGPTNYADSVKDRFTISGDSAKHTMYLQMNSLKPEDTAVYYCGYNPGGWAVPSQYEYDSWGQGTQVTVSSGTGGGGSGGGGSGGGGSEFDIQMTQSPSSLSASVGDRVTITCKASDHINNWLAWYQQKPGQAPKLLIYGATTLETGVPSRFSGSGSGTDYTLTISSLQPEDFATYYCQQSWNTPWTFGQGTKLEIKRLEIQNPDPAVYQLRDSKSSDKSVCLFTDFDSQTNVSQSKDSDVYITDKCVLDMRSMDFKSNSAVAWSNKSDFACANAFNNSIIPEDTFFPSPESSCDVKLVEKSFETDTNLNFQNLSVIGFRILLLKVAGFNLLMTLRLWSSRAKRSGSGVKQTLNFDLLKLAGDVESNPGPTSMDWIWRILFLVGAATGAHSQLQLQESGPGLVKPSETLSLTCTVSGGSISSGDYYWGWIRQPPGKGLEWIGHIYYSGATYYNPSLKSRVTISVDTSRNQFSLKLSSVTAADTAVYYCTRDDSSNWRSRGQGTLVTVSSSGGGGSGGGGSQVQLQESGGGLAQAGGSLRLSCAASGRTFSMGWFRQAPGKEREFVAAITYSGGSPYYASSVRGRFTISRDNAKNTVYLQMNSLKPEDTAVYYCAANPTYGSDWNAENWGQGTQVTVSSGSGGGGSGGGGSGGGGSFEQVQLQQPGAELVKPGASVKMSCKASGYAFSSYWINWMKQKPGQGLEWIGQIYPGDGDTNYNGKFKGRATLTADTSSSTAYMQLSSLTSEDSAVYFCARSITTVVGCAMDYWGQGTSVTVSSTREDLKNVFPPEVAVFEPSEAEISHTQKATLVCLATGFYPDHVELSWWVNGKEVHSGVCTDPQPLKEQPALNDSRYCLSSRLRVSATFWQNPRNHFRCQVQFYGLSENDEWTQDRAKPVTQIVSAEAWGRADCGFTSESYQQGVLSATILYEILLGKATLYAVLVSALVLMAMVKRKDSRGRAKRSGSGATNFSLLKQAGDVEENPGPSRGGIHTMATYEVLCEVARKLGTDDREVVLFLLNVFIPQPTLAQLIGALRALKEEGRLTFPLLAECLFRAGRRDLLRDLLHLDPRFLERHLAGTMSYFSPYQLTVLHVDGELCARDIRSLIFLSKDTIGSRSTPQTFLHWVYCMENLDLLGPTDVDALMSMLRSLSRVDLQRQVQTLMGLHLSGPSHSQHYRHTP

SEQ ID NO: 15883 - protein, 1390 aa, Artificial Sequence
  Synthetic Polypeptide
MALPVTALLLPLALLLHAARPEVQLLESGGGLVQPGGSLRLSCAASGFTFSSYAMSWVRQAPGKGLEWVSSISGSGDYIYYADSVKGRFTISRDISKNTLYLQMNSLRAEDTAVYYCAKEGTGANSSLADYRGQGTLVTVSSGGGSGGGSQVQLVESGGGLVQAGDSVTLSCTASGRTFSSYALAWFRQRPGKEREFVAGLRWGGPTNYADSVKDRFTISGDSAKHTMYLQMNSLKPEDTAVYYCGYNPGGWAVPSQYEYDSWGQGTQVTVSSGTGGGGSGGGGSGGGGSEFDIQMTQSPSSLSASVGDRVTITCKASDHINNWLAWYQQKPGQAPKLLIYGATTLETGVPSRFSGSGSGTDYTLTISSLQPEDFATYYCQQSWNTPWTFGQGTKLEIKRLEDLKNVFPPEVAVFEPSEAEISHTQKATLVCLATGFYPDHVELSWWVNGKEVHSGVSTDPQPLKEQPALNDSRYCLSSRLRVSATFWQNPRNHFRCQVQFYGLSENDEWTQDRAKPVTQIVSAEAWGRADCGFTSESYQQGVLSATILYEILLGKATLYAVLVSALVLMAMVKRKDSRGRAKRSGSGATNFSLLKQAGDVEENPGPTSMDWIWRILFLVGAATGAHSQLQLQESGPGLVKPSETLSLTCTVSGGSISSGDYYWGWIRQPPGKGLEWIGHIYYSGATYYNPSLKSRVTISVDTSRNQFSLKLSSVTAADTAVYYCTRDDSSNWRSRGQGTLVTVSSSGGGGSGGGGSQVQLQESGGGLAQAGGSLRLSCAASGRTFSMGWFRQAPGKEREFVAAITYSGGSPYYASSVRGRFTISRDNAKNTVYLQMNSLKPEDTAVYYCAANPTYGSDWNAENWGQGTQVTVSSGSGGGGSGGGGSGGGGSFEQVQLQQPGAELVKPGASVKMSCKASGYAFSSYWINWMKQKPGQGLEWIGQIYPGDGDTNYNGKFKGRATLTADTSSSTAYMQLSSLTSEDSAVYFCARSITTVVGCAMDYWGQGTSVTVSSTRIQNPDPAVYQLRDSKSSDKSVCLFTDFDSQTNVSQSKDSDVYITDKTVLDMRSMDFKSNSAVAWSNKSDFACANAFNNSIIPEDTFFPSPESSCDVKLVEKSFETDTNLNFQNLSVIGFRILLLKVAGFNLLMTLRLWSSRAKRSGSGVKQTLNFDLLKLAGDVESNPGPSRGHMTEYKPTVRLATRDDVPRAVRTLAAAFADYPATRHTVDPDRHIERVTELQELFLTRVGLDIGKVWVADDGAAVAVWTTPESVEAGAVFAEIGPRMAELSGSRLAAQQQMEGLLAPHRPKEPAWFLATVGVSPDHQGKGLGSAVVLPGVEAAERAGVPAFLETSAPRNLPFYERLGFTVTADVEVPEGPRTWCMTRKPGA

SEQ ID NO: 15884 - protein, 1472 aa, Artificial Sequence
  Synthetic Polypeptide
MALPVTALLLPLALLLHAARPEVQLLESGGGLVQPGGSLRLSCAASGFTFSSYAMSWVRQAPGKGLEWVSSISGSGDYIYYADSVKGRFTISRDISKNTLYLQMNSLRAEDTAVYYCAKEGTGANSSLADYRGQGTLVTVSSGGGSGGGSQVQLVESGGGLVQAGDSVTLSCTASGRTFSSYALAWFRQRPGKEREFVAGLRWGGPTNYADSVKDRFTISGDSAKHTMYLQMNSLKPEDTAVYYCGYNPGGWAVPSQYEYDSWGQGTQVTVSSGTGGGGSGGGGSGGGGSEFDIQMTQSPSSLSASVGDRVTITCKASDHINNWLAWYQQKPGQAPKLLIYGATTLETGVPSRFSGSGSGTDYTLTISSLQPEDFATYYCQQSWNTPWTFGQGTKLEIKRLEDLKNVFPPEVAVFEPSEAEISHTQKATLVCLATGFYPDHVELSWWVNGKEVHSGVSTDPQPLKEQPALNDSRYCLSSRLRVSATFWQNPRNHFRCQVQFYGLSENDEWTQDRAKPVTQIVSAEAWGRADCGFTSESYQQGVLSATILYEILLGKATLYAVLVSALVLMAMVKRKDSRGRAKRSGSGATNFSLLKQAGDVEENPGPTSMDWIWRILFLVGAATGAHSQLQLQESGPGLVKPSETLSLTCTVSGGSISSGDYYWGWIRQPPGKGLEWIGHIYYSGATYYNPSLKSRVTISVDTSRNQFSLKLSSVTAADTAVYYCTRDDSSNWRSRGQGTLVTVSSSGGGGSGGGGSQVQLQESGGGLAQAGGSLRLSCAASGRTFSMGWFRQAPGKEREFVAAITYSGGSPYYASSVRGRFTISRDNAKNTVYLQMNSLKPEDTAVYYCAANPTYGSDWNAENWGQGTQVTVSSGSGGGGSGGGGSGGGGSFEQVQLQQPGAELVKPGASVKMSCKASGYAFSSYWINWMKQKPGQGLEWIGQIYPGDGDTNYNGKFKGRATLTADTSSSTAYMQLSSLTSEDSAVYFCARSITTVVGCAMDYWGQGTSVTVSSTREQKLISEEDGSGTPFPSLAPPIMLLVDGKQQMVVVCLVLDVAPPGLDSPIWFSAGNGSALDAFTYGPSPATDGTWTNLAHLSLPSEELASWEPLVCHTGPGAEGHSRSTQPMHLSGEASTARTCPQEPLRGTPGGALWLGVLRLLLFKLLLFDLLLTCSCLCDPAGPLPSPATTTRLRALGSHRLHPATETGGREATSSPRPQPRDRRWGDTPPGRKPGSPVRAKRSGSGVKQTLNFDLLKLAGDVESNPGPSRGHMTEYKPTVRLATRDDVPRAVRTLAAAFADYPATRHTVDPDRHIERVTELQELFLTRVGLDIGKVWVADDGAAVAVWTTPESVEAGAVFAEIGPRMAELSGSRLAAQQQMEGLLAPHRPKEPAWFLATVGVSPDHQGKGLGSAVVLPGVEAAERAGVPAFLETSAPRNLPFYERLGFTVTADVEVPEGPRTWCMTRKPGA

SEQ ID NO: 15885 - protein, 1427 aa, Artificial Sequence
  Synthetic Polypeptide
MALPVTALLLPLALLLHAARPEVQLLESGGGLVQPGGSLRLSCAASGFTFSSYAMSWVRQAPGKGLEWVSSISGSGDYIYYADSVKGRFTISRDISKNTLYLQMNSLRAEDTAVYYCAKEGTGANSSLADYRGQGTLVTVSSGGGSGGGSQVQLVESGGGLVQAGDSVTLSCTASGRTFSSYALAWFRQRPGKEREFVAGLRWGGPTNYADSVKDRFTISGDSAKHTMYLQMNSLKPEDTAVYYCGYNPGGWAVPSQYEYDSWGQGTQVTVSSGTGGGGSGGGGSGGGGSEFDIQMTQSPSSLSASVGDRVTITCKASDHINNWLAWYQQKPGQAPKLLIYGATTLETGVPSRFSGSGSGTDYTLTISSLQPEDFATYYCQQSWNTPWTFGQGTKLEIKRLEGKPIPNPLLGLDSTGSGDKQLDADVSPKPTIFLPSIAETKLQKAGTYLCLLEKFFPDVIKIHWQEKKSNTILGSQEGNTMKTNDTYMKFSWLTVPEKSLDKEHRCIVRHENNKNGVDQEIIFPPIKTDVITMDPKDNCSKDANDTLLLQLTNTSAYYMYLLLLLKSVVYFAIITCCLLRRTAFCCNGEKSRAKRSGSGATNFSLLKQAGDVEENPGPTSMDWIWRILFLVGAATGAHSQLQLQESGPGLVKPSETLSLTCTVSGGSISSGDYYWGWIRQPPGKGLEWIGHIYYSGATYYNPSLKSRVTISVDTSRNQFSLKLSSVTAADTAVYYCTRDDSSNWRSRGQGTLVTVSSSGGGGSGGGGSQVQLQESGGGLAQAGGSLRLSCAASGRTFSMGWFRQAPGKEREFVAAITYSGGSPYYASSVRGRFTISRDNAKNTVYLQMNSLKPEDTAVYYCAANPTYGSDWNAENWGQGTQVTVSSGSGGGGSGGGGSGGGGSFEQVQLQQPGAELVKPGASVKMSCKASGYAFSSYWINWMKQKPGQGLEWIGQIYPGDGDTNYNGKFKGRATLTADTSSSTAYMQLSSLTSEDSAVYFCARSITTVVGCAMDYWGQGTSVTVSSTREQKLISEEDGSGSQPHTKPSVFVMKNGTNVACLVKEFYPKDIRINLVSSKKITEFDPAIVISPSGKYNAVKLGKYEDSNSVTCSVQHDNKTVHSTDFEVKTDSTDHVKPKETENTKQPSKSCHKPKAIVHTEKVNMMSLTVLGLRMLFAKTVAVNFLLTAKLFFLRAKRSGSGVKQTLNFDLLKLAGDVESNPGPSRGHMTEYKPTVRLATRDDVPRAVRTLAAAFADYPATRHTVDPDRHIERVTELQELFLTRVGLDIGKVWVADDGAAVAVWTTPESVEAGAVFAEIGPRMAELSGSRLAAQQQMEGLLAPHRPKEPAWFLATVGVSPDHQGKGLGSAVVLPGVEAAERAGVPAFLETSAPRNLPFYERLGFTVTADVEVPEGPRTWCMTRKPGA

SEQ ID NO: 15886 - protein, 1165 aa, Artificial Sequence
  Synthetic Polypeptide
MALPVTALLLPLALLLHAARPEVQLLESGGGLVQPGGSLRLSCAASGFTFSSYAMSWVRQAPGKGLEWVSSISGSGDYIYYADSVKGRFTISRDISKNTLYLQMNSLRAEDTAVYYCAKEGTGANSSLADYRGQGTLVTVSSGGGSGGGSQVQLVESGGGLVQAGDSVTLSCTASGRTFSSYALAWFRQRPGKEREFVAGLRWGGPTNYADSVKDRFTISGDSAKHTMYLQMNSLKPEDTAVYYCGYNPGGWAVPSQYEYDSWGQGTQVTVSSGTGGGGSGGGGSGGGGSEFDIQMTQSPSSLSASVGDRVTITCKASDHINNWLAWYQQKPGQAPKLLIYGATTLETGVPSRFSGSGSGTDYTLTISSLQPEDFATYYCQQSWNTPWTFGQGTKLEIKRLESQPHTKPSVFVMKNGTNVACLVKEFYPKDIRINLVSSKKITEFDPAIVISPSGKYNAVKLGKYEDSNSVTCSVQHDNKTVHSTDFEVKTDSTDHVKPKETENTKQPSKSCHKPKAIVHTEKVNMMSLTVLGLRMLFAKTVAVNFLLTAKLFFLRAKRSGSGATNFSLLKQAGDVEENPGPTSMDWIWRILFLVGAATGAHSQLQLQESGPGLVKPSETLSLTCTVSGGSISSGDYYWGWIRQPPGKGLEWIGHIYYSGATYYNPSLKSRVTISVDTSRNQFSLKLSSVTAADTAVYYCTRDDSSNWRSRGQGTLVTVSSSGGGGSGGGGSQVQLQESGGGLAQAGGSLRLSCAASGRTFSMGWFRQAPGKEREFVAAITYSGGSPYYASSVRGRFTISRDNAKNTVYLQMNSLKPEDTAVYYCAANPTYGSDWNAENWGQGTQVTVSSGSGGGGSGGGGSGGGGSFEQVQLQQPGAELVKPGASVKMSCKASGYAFSSYWINWMKQKPGQGLEWIGQIYPGDGDTNYNGKFKGRATLTADTSSSTAYMQLSSLTSEDSAVYFCARSITTVVGCAMDYWGQGTSVTVSSTRDKQLDADVSPKPTIFLPSIAETKLQKAGTYLCLLEKFFPDVIKIHWQEKKSNTILGSQEGNTMKTNDTYMKFSWLTVPEKSLDKEHRCIVRHENNKNGVDQEIIFPPIKTDVITMDPKDNCSKDANDTLLLQLTNTSAYYMYLLLLLKSVVYFAIITCCLLRRTAFCCNGEKS

SEQ ID NO: 15887 - protein, 1567 aa, Artificial Sequence
  Synthetic Polypeptide
MALPVTALLLPLALLLHAARPEVQLLESGGGLVQPGGSLRLSCAASGFTFSSYAMSWVRQAPGKGLEWVSSISGSGDYIYYADSVKGRFTISRDISKNTLYLQMNSLRAEDTAVYYCAKEGTGANSSLADYRGQGTLVTVSSGGGSGGGSQVQLVESGGGLVQAGDSVTLSCTASGRTFSSYALAWFRQRPGKEREFVAGLRWGGPTNYADSVKDRFTISGDSAKHTMYLQMNSLKPEDTAVYYCGYNPGGWAVPSQYEYDSWGQGTQVTVSSGTGGGGSGGGGSGGGGSEFDIQMTQSPSSLSASVGDRVTITCKASDHINNWLAWYQQKPGQAPKLLIYGATTLETGVPSRFSGSGSGTDYTLTISSLQPEDFATYYCQQSWNTPWTFGQGTKLEIKRGQPKANPTVTLFPPSSEELQANKATLVCLISDFYPGAVTVAWKADGSPVKAGVETTKPSKQSNNKYAASSYLSLTPEQWKSHRSYSCQVTHEGSTVEKTVAPTECSGSQSFGLLDPKLCYLLDGILFIYGVILTALFLRVKFSRSADAPAYQQGQNQLYNELNLGRREEYDVLDKRRGRDPEMGGKPQRRKNPQEGLYNELQKDKMAEAYSEIGMKGERRRGKGHDGLYQGLSTATKDTYDALHMQALPPRRAKRSGSGATNFSLLKQAGDVEENPGPTSMDWIWRILFLVGAATGAHSQLQLQESGPGLVKPSETLSLTCTVSGGSISSGDYYWGWIRQPPGKGLEWIGHIYYSGATYYNPSLKSRVTISVDTSRNQFSLKLSSVTAADTAVYYCTRDDSSNWRSRGQGTLVTVSSSGGGGSGGGGSQVQLQESGGGLAQAGGSLRLSCAASGRTFSMGWFRQAPGKEREFVAAITYSGGSPYYASSVRGRFTISRDNAKNTVYLQMNSLKPEDTAVYYCAANPTYGSDWNAENWGQGTQVTVSSGSGGGGSGGGGSGGGGSFEQVQLQQPGAELVKPGASVKMSCKASGYAFSSYWINWMKQKPGQGLEWIGQIYPGDGDTNYNGKFKGRATLTADTSSSTAYMQLSSLTSEDSAVYFCARSITTVVGCAMDYWGQGTSVTVSSASTKGPSVFPLAPSSKSTSGGTAALGCLVKDYFPEPVTVSWNSGALTSGVHTFPAVLQSSGLYSLSSVVTVPSSSLGTQTYICNVNHKPSNTKVDKRVEPKSCGTQSFGLLDPKLCYLLDGILFIYGVILTALFLRVKFSRSADAPAYQQGQNQLYNELNLGRREEYDVLDKRRGRDPEMGGKPQRRKNPQEGLYNELQKDKMAEAYSEIGMKGERRRGKGHDGLYQGLSTATKDTYDALHMQALPPRRAKRSGSGVKQTLNFDLLKLAGDVESNPGPSRGHMTEYKPTVRLATRDDVPRAVRTLAAAFADYPATRHTVDPDRHIERVTELQELFLTRVGLDIGKVWVADDGAAVAVWTTPESVEAGAVFAEIGPRMAELSGSRLAAQQQMEGLLAPHRPKEPAWFLATVGVSPDHQGKGLGSAVVLPGVEAAERAGVPAFLETSAPRNLPFYERLGFTVTADVEVPEGPRTWCMTRKPGA

SEQ ID NO: 15888 - protein, 1353 aa, Artificial Sequence
  Synthetic Polypeptide
MALPVTALLLPLALLLHAARPEVQLLESGGGLVQPGGSLRLSCAASGFTFSSYAMSWVRQAPGKGLEWVSSISGSGDYIYYADSVKGRFTISRDISKNTLYLQMNSLRAEDTAVYYCAKEGTGANSSLADYRGQGTLVTVSSGGGSGGGSQVQLVESGGGLVQAGDSVTLSCTASGRTFSSYALAWFRQRPGKEREFVAGLRWGGPTNYADSVKDRFTISGDSAKHTMYLQMNSLKPEDTAVYYCGYNPGGWAVPSQYEYDSWGQGTQVTVSSGTGGGGSGGGGSGGGGSEFDIQMTQSPSSLSASVGDRVTITCKASDHINNWLAWYQQKPGQAPKLLIYGATTLETGVPSRFSGSGSGTDYTLTISSLQPEDFATYYCQQSWNTPWTFGQGTKLEIKRLEDLKNVFPPEVAVFEPSEAEISHTQKATLVCLATGFYPDHVELSWWVNGKEVHSGVSTDPQPLKEQPALNDSRYCLSSRLRVSATFWQNPRNHFRCQVQFYGLSENDEWTQDRAKPVTQIVSAEAWGRADCGSQSFGLLDPKLCYLLDGILFIYGVILTALFLRVKFSRSADAPAYQQGQNQLYNELNLGRREEYDVLDKRRGRDPEMGGKPQRRKNPQEGLYNELQKDKMAEAYSEIGMKGERRRGKGHDGLYQGLSTATKDTYDALHMQALPPRRAKRSGSGATNFSLLKQAGDVEENPGPTSMDWIWRILFLVGAATGAHSQLQLQESGPGLVKPSETLSLTCTVSGGSISSGDYYWGWIRQPPGKGLEWIGHIYYSGATYYNPSLKSRVTISVDTSRNQFSLKLSSVTAADTAVYYCTRDDSSNWRSRGQGTLVTVSSSGGGGSGGGGSQVQLQESGGGLAQAGGSLRLSCAASGRTFSMGWFRQAPGKEREFVAAITYSGGSPYYASSVRGRFTISRDNAKNTVYLQMNSLKPEDTAVYYCAANPTYGSDWNAENWGQGTQVTVSSGSGGGGSGGGGSGGGGSFEQVQLQQPGAELVKPGASVKMSCKASGYAFSSYWINWMKQKPGQGLEWIGQIYPGDGDTNYNGKFKGRATLTADTSSSTAYMQLSSLTSEDSAVYFCARSITTVVGCAMDYWGQGTSVTVSSTRIQNPDPAVYQLRDSKSSDKSVCLFTDFDSQTNVSQSKDSDVYITDKTVLDMRSMDFKSNSAVAWSNKSDFACANAFNNSIIPEDTFFPSPESSCGTQSFGLLDPKLCYLLDGILFIYGVILTALFLRVKFSRSADAPAYQQGQNQLYNELNLGRREEYDVLDKRRGRDPEMGGKPQRRKNPQEGLYNELQKDKMAEAYSEIGMKGERRRGKGHDGLYQGLSTATKDTYDALHMQALPPR

SEQ ID NO: 15889 - protein, 1353 aa, Artificial Sequence
  Synthetic Polypeptide
MALPVTALLLPLALLLHAARPEVQLLESGGGLVQPGGSLRLSCAASGFTFSSYAMSWVRQAPGKGLEWVSSISGSGDYIYYADSVKGRFTISRDISKNTLYLQMNSLRAEDTAVYYCAKEGTGANSSLADYRGQGTLVTVSSGGGSGGGSQVQLVESGGGLVQAGDSVTLSCTASGRTFSSYALAWFRQRPGKEREFVAGLRWGGPTNYADSVKDRFTISGDSAKHTMYLQMNSLKPEDTAVYYCGYNPGGWAVPSQYEYDSWGQGTQVTVSSGTGGGGSGGGGSGGGGSEFDIQMTQSPSSLSASVGDRVTITCKASDHINNWLAWYQQKPGQAPKLLIYGATTLETGVPSRFSGSGSGTDYTLTISSLQPEDFATYYCQQSWNTPWTFGQGTKLEIKRLEDLKNVFPPEVAVFEPSKAEIAHTQKATLVCLATGFYPDHVELSWWVNGKEVHSGVCTDPQPLKEQPALNDSRYCLSSRLRVSATFWQNPRNHFRCQVQFYGLSENDEWTQDRAKPVTQIVSAEAWGRADCGSQSFGLLDPKLCYLLDGILFIYGVILTALFLRVKFSRSADAPAYQQGQNQLYNELNLGRREEYDVLDKRRGRDPEMGGKPQRRKNPQEGLYNELQKDKMAEAYSEIGMKGERRRGKGHDGLYQGLSTATKDTYDALHMQALPPRRAKRSGSGATNFSLLKQAGDVEENPGPTSMDWIWRILFLVGAATGAHSQLQLQESGPGLVKPSETLSLTCTVSGGSISSGDYYWGWIRQPPGKGLEWIGHIYYSGATYYNPSLKSRVTISVDTSRNQFSLKLSSVTAADTAVYYCTRDDSSNWRSRGQGTLVTVSSSGGGGSGGGGSQVQLQESGGGLAQAGGSLRLSCAASGRTFSMGWFRQAPGKEREFVAAITYSGGSPYYASSVRGRFTISRDNAKNTVYLQMNSLKPEDTAVYYCAANPTYGSDWNAENWGQGTQVTVSSGSGGGGSGGGGSGGGGSFEQVQLQQPGAELVKPGASVKMSCKASGYAFSSYWINWMKQKPGQGLEWIGQIYPGDGDTNYNGKFKGRATLTADTSSSTAYMQLSSLTSEDSAVYFCARSITTVVGCAMDYWGQGTSVTVSSTRIQNPDPAVYQLRDSKSSDKSVCLFTDFDSQTNVSQSKDSDVYITDKCVLDMRSMDFKSNSAVAWSNKSDFACANAFNNSIIPEDTFFPSSDVPCGTQSFGLLDPKLCYLLDGILFIYGVILTALFLRVKFSRSADAPAYQQGQNQLYNELNLGRREEYDVLDKRRGRDPEMGGKPQRRKNPQEGLYNELQKDKMAEAYSEIGMKGERRRGKGHDGLYQGLSTATKDTYDALHMQALPPR

SEQ ID NO: 15890 - protein, 1424 aa, Artificial Sequence
  Synthetic Polypeptide
MALPVTALLLPLALLLHAARPEVQLLESGGGLVQPGGSLRLSCAASGFTFSSYAMSWVRQAPGKGLEWVSSISGSGDYIYYADSVKGRFTISRDISKNTLYLQMNSLRAEDTAVYYCAKEGTGANSSLADYRGQGTLVTVSSGGGSGGGSQVQLVESGGGLVQAGDSVTLSCTASGRTFSSYALAWFRQRPGKEREFVAGLRWGGPTNYADSVKDRFTISGDSAKHTMYLQMNSLKPEDTAVYYCGYNPGGWAVPSQYEYDSWGQGTQVTVSSGTGGGGSGGGGSGGGGSEFDIQMTQSPSSLSASVGDRVTITCKASDHINNWLAWYQQKPGQAPKLLIYGATTLETGVPSRFSGSGSGTDYTLTISSLQPEDFATYYCQQSWNTPWTFGQGTKLEIKRLEGKPIPNPLLGLDSTGSGEDLKNVFPPEVAVFEPSEAEISHTQKATLVCLATGFYPDHVELSWWVNGKEVHSGVSTDPQPLKEQPALNDSRYCLSSRLRVSATFWQNPRNHFRCQVQFYGLSENDEWTQDRAKPVTQIVSAEAWGRADCGSQSFGLLDPKLCYLLDGILFIYGVILTALFLRVKFSRSADAPAYQQGQNQLYNELNLGRREEYDVLDKRRGRDPEMGGKPQRRKNPQEGLYNELQKDKMAEAYSEIGMKGERRRGKGHDGLYQGLSTATKDTYDALHMQALPPRRAKRSGSGATNFSLLKQAGDVEENPGPTSMDWIWRILFLVGAATGAHSQLQLQESGPGLVKPSETLSLTCTVSGGSISSGDYYWGWIRQPPGKGLEWIGHIYYSGATYYNPSLKSRVTISVDTSRNQFSLKLSSVTAADTAVYYCTRDDSSNWRSRGQGTLVTVSSSGGGGSGGGGSQVQLQESGGGLAQAGGSLRLSCAASGRTFSMGWFRQAPGKEREFVAAITYSGGSPYYASSVRGRFTISRDNAKNTVYLQMNSLKPEDTAVYYCAANPTYGSDWNAENWGQGTQVTVSSGSGGGGSGGGGSGGGGSFEQVQLQQPGAELVKPGASVKMSCKASGYAFSSYWINWMKQKPGQGLEWIGQIYPGDGDTNYNGKFKGRATLTADTSSSTAYMQLSSLTSEDSAVYFCARSITTVVGCAMDYWGQGTSVTVSSTREQKLISEEDGSGIQNPDPAVYQLRDSKSSDKSVCLFTDFDSQTNVSQSKDSDVYITDKTVLDMRSMDFKSNSAVAWSNKSDFACANAFNNSIIPEDTFFPSPESSCGTQSFGLLDPKLCYLLDGILFIYGVILTALFLRSKRSRLLHSDYMNMTPRRPGPTRKHYQPYAPPRDFAAYRSRVKFSRSADAPAYQQGQNQLYNELNLGRREEYDVLDKRRGRDPEMGGKPQRRKNPQEGLYNELQKDKMAEAYSEIGMKGERRRGKGHDGLYQGLSTATKDTYDALHMQALPPR

SEQ ID NO: 15891 - protein, 1465 aa, Artificial Sequence
  Synthetic Polypeptide
MALPVTALLLPLALLLHAARPEVQLLESGGGLVQPGGSLRLSCAASGFTFSSYAMSWVRQAPGKGLEWVSSISGSGDYIYYADSVKGRFTISRDISKNTLYLQMNSLRAEDTAVYYCAKEGTGANSSLADYRGQGTLVTVSSGGGSGGGSQVQLVESGGGLVQAGDSVTLSCTASGRTFSSYALAWFRQRPGKEREFVAGLRWGGPTNYADSVKDRFTISGDSAKHTMYLQMNSLKPEDTAVYYCGYNPGGWAVPSQYEYDSWGQGTQVTVSSGTGGGGSGGGGSGGGGSEFDIQMTQSPSSLSASVGDRVTITCKASDHINNWLAWYQQKPGQAPKLLIYGATTLETGVPSRFSGSGSGTDYTLTISSLQPEDFATYYCQQSWNTPWTFGQGTKLEIKRLEGKPIPNPLLGLDSTGSGEDLKNVFPPEVAVFEPSEAEISHTQKATLVCLATGFYPDHVELSWWVNGKEVHSGVSTDPQPLKEQPALNDSRYCLSSRLRVSATFWQNPRNHFRCQVQFYGLSENDEWTQDRAKPVTQIVSAEAWGRADCGSQSFGLLDPKLCYLLDGILFIYGVILTALFLRSKRSRLLHSDYMNMTPRRPGPTRKHYQPYAPPRDFAAYRSRVKFSRSADAPAYQQGQNQLYNELNLGRREEYDVLDKRRGRDPEMGGKPQRRKNPQEGLYNELQKDKMAEAYSEIGMKGERRRGKGHDGLYQGLSTATKDTYDALHMQALPPRRAKRSGSGATNFSLLKQAGDVEENPGPTSMDWIWRILFLVGAATGAHSQLQLQESGPGLVKPSETLSLTCTVSGGSISSGDYYWGWIRQPPGKGLEWIGHIYYSGATYYNPSLKSRVTISVDTSRNQFSLKLSSVTAADTAVYYCTRDDSSNWRSRGQGTLVTVSSSGGGGSGGGGSQVQLQESGGGLAQAGGSLRLSCAASGRTFSMGWFRQAPGKEREFVAAITYSGGSPYYASSVRGRFTISRDNAKNTVYLQMNSLKPEDTAVYYCAANPTYGSDWNAENWGQGTQVTVSSGSGGGGSGGGGSGGGGSFEQVQLQQPGAELVKPGASVKMSCKASGYAFSSYWINWMKQKPGQGLEWIGQIYPGDGDTNYNGKFKGRATLTADTSSSTAYMQLSSLTSEDSAVYFCARSITTVVGCAMDYWGQGTSVTVSSTREQKLISEEDGSGIQNPDPAVYQLRDSKSSDKSVCLFTDFDSQTNVSQSKDSDVYITDKTVLDMRSMDFKSNSAVAWSNKSDFACANAFNNSIIPEDTFFPSPESSCGTQSFGLLDPKLCYLLDGILFIYGVILTALFLRSKRSRLLHSDYMNMTPRRPGPTRKHYQPYAPPRDFAAYRSRVKFSRSADAPAYQQGQNQLYNELNLGRREEYDVLDKRRGRDPEMGGKPQRRKNPQEGLYNELQKDKMAEAYSEIGMKGERRRGKGHDGLYQGLSTATKDTYDALHMQALPPR

SEQ ID NO: 15892 - protein, 1426 aa, Artificial Sequence
  Synthetic Polypeptide
MALPVTALLLPLALLLHAARPEVQLLESGGGLVQPGGSLRLSCAASGFTFSSYAMSWVRQAPGKGLEWVSSISGSGDYIYYADSVKGRFTISRDISKNTLYLQMNSLRAEDTAVYYCAKEGTGANSSLADYRGQGTLVTVSSGGGSGGGSQVQLVESGGGLVQAGDSVTLSCTASGRTFSSYALAWFRQRPGKEREFVAGLRWGGPTNYADSVKDRFTISGDSAKHTMYLQMNSLKPEDTAVYYCGYNPGGWAVPSQYEYDSWGQGTQVTVSSGTGGGGSGGGGSGGGGSEFDIQMTQSPSSLSASVGDRVTITCKASDHINNWLAWYQQKPGQAPKLLIYGATTLETGVPSRFSGSGSGTDYTLTISSLQPEDFATYYCQQSWNTPWTFGQGTKLEIKRLEGKPIPNPLLGLDSTGSGEDLKNVFPPEVAVFEPSEAEISHTQKATLVCLATGFYPDHVELSWWVNGKEVHSGVSTDPQPLKEQPALNDSRYCLSSRLRVSATFWQNPRNHFRCQVQFYGLSENDEWTQDRAKPVTQIVSAEAWGRADCGSQSFGLLDPKLCYLLDGILFIYGVILTALFLRVKFSRSADAPAYQQGQNQLYNELNLGRREEYDVLDKRRGRDPEMGGKPQRRKNPQEGLYNELQKDKMAEAYSEIGMKGERRRGKGHDGLYQGLSTATKDTYDALHMQALPPRRAKRSGSGATNFSLLKQAGDVEENPGPTSMDWIWRILFLVGAATGAHSQLQLQESGPGLVKPSETLSLTCTVSGGSISSGDYYWGWIRQPPGKGLEWIGHIYYSGATYYNPSLKSRVTISVDTSRNQFSLKLSSVTAADTAVYYCTRDDSSNWRSRGQGTLVTVSSSGGGGSGGGGSQVQLQESGGGLAQAGGSLRLSCAASGRTFSMGWFRQAPGKEREFVAAITYSGGSPYYASSVRGRFTISRDNAKNTVYLQMNSLKPEDTAVYYCAANPTYGSDWNAENWGQGTQVTVSSGSGGGGSGGGGSGGGGSFEQVQLQQPGAELVKPGASVKMSCKASGYAFSSYWINWMKQKPGQGLEWIGQIYPGDGDTNYNGKFKGRATLTADTSSSTAYMQLSSLTSEDSAVYFCARSITTVVGCAMDYWGQGTSVTVSSTREQKLISEEDLGSGIQNPDPAVYQLRDSKSSDKSVCLFTDFDSQTNVSQSKDSDVYITDKTVLDMRSMDFKSNSAVAWSNKSDFACANAFNNSIIPEDTFFPSPESSCGTQSFGLLDPKLCYLLDGILFIYGVILTALFLKRGRKKLLYIFKQPFMRPVQTTQEEDGCSCRFPEEEEGGCELRVKFSRSADAPAYQQGQNQLYNELNLGRREEYDVLDKRRGRDPEMGGKPQRRKNPQEGLYNELQKDKMAEAYSEIGMKGERRRGKGHDGLYQGLSTATKDTYDALHMQALPPR

SEQ ID NO: 15893 - protein, 1468 aa, Artificial Sequence
  Synthetic Polypeptide
MALPVTALLLPLALLLHAARPEVQLLESGGGLVQPGGSLRLSCAASGFTFSSYAMSWVRQAPGKGLEWVSSISGSGDYIYYADSVKGRFTISRDISKNTLYLQMNSLRAEDTAVYYCAKEGTGANSSLADYRGQGTLVTVSSGGGSGGGSQVQLVESGGGLVQAGDSVTLSCTASGRTFSSYALAWFRQRPGKEREFVAGLRWGGPTNYADSVKDRFTISGDSAKHTMYLQMNSLKPEDTAVYYCGYNPGGWAVPSQYEYDSWGQGTQVTVSSGTGGGGSGGGGSGGGGSEFDIQMTQSPSSLSASVGDRVTITCKASDHINNWLAWYQQKPGQAPKLLIYGATTLETGVPSRFSGSGSGTDYTLTISSLQPEDFATYYCQQSWNTPWTFGQGTKLEIKRLEGKPIPNPLLGLDSTGSGEDLKNVFPPEVAVFEPSEAEISHTQKATLVCLATGFYPDHVELSWWVNGKEVHSGVSTDPQPLKEQPALNDSRYCLSSRLRVSATFWQNPRNHFRCQVQFYGLSENDEWTQDRAKPVTQIVSAEAWGRADCGSQSFGLLDPKLCYLLDGILFIYGVILTALFLKRGRKKLLYIFKQPFMRPVQTTQEEDGCSCRFPEEEEGGCELRVKFSRSADAPAYQQGQNQLYNELNLGRREEYDVLDKRRGRDPEMGGKPQRRKNPQEGLYNELQKDKMAEAYSEIGMKGERRRGKGHDGLYQGLSTATKDTYDALHMQALPPRRAKRSGSGATNFSLLKQAGDVEENPGPTSMDWIWRILFLVGAATGAHSQLQLQESGPGLVKPSETLSLTCTVSGGSISSGDYYWGWIRQPPGKGLEWIGHIYYSGATYYNPSLKSRVTISVDTSRNQFSLKLSSVTAADTAVYYCTRDDSSNWRSRGQGTLVTVSSSGGGGSGGGGSQVQLQESGGGLAQAGGSLRLSCAASGRTFSMGWFRQAPGKEREFVAAITYSGGSPYYASSVRGRFTISRDNAKNTVYLQMNSLKPEDTAVYYCAANPTYGSDWNAENWGQGTQVTVSSGSGGGGSGGGGSGGGGSFEQVQLQQPGAELVKPGASVKMSCKASGYAFSSYWINWMKQKPGQGLEWIGQIYPGDGDTNYNGKFKGRATLTADTSSSTAYMQLSSLTSEDSAVYFCARSITTVVGCAMDYWGQGTSVTVSSTREQKLISEEDLGSGIQNPDPAVYQLRDSKSSDKSVCLFTDFDSQTNVSQSKDSDVYITDKTVLDMRSMDFKSNSAVAWSNKSDFACANAFNNSIIPEDTFFPSPESSCGTQSFGLLDPKLCYLLDGILFIYGVILTALFLKRGRKKLLYIFKQPFMRPVQTTQEEDGCSCRFPEEEEGGCELRVKFSRSADAPAYQQGQNQLYNELNLGRREEYDVLDKRRGRDPEMGGKPQRRKNPQEGLYNELQKDKMAEAYSEIGMKGERRRGKGHDGLYQGLSTATKDTYDALHMQALPPR

SEQ ID NO: 15894 - protein, 1358 aa, Artificial Sequence
  Synthetic Polypeptide
MALPVTALLLPLALLLHAARPEVQLLESGGGLVQPGGSLRLSCAASGFTFSSYAMSWVRQAPGKGLEWVSSISGSGDYIYYADSVKGRFTISRDISKNTLYLQMNSLRAEDTAVYYCAKEGTGANSSLADYRGQGTLVTVSSGGGSGGGSQVQLVESGGGLVQAGDSVTLSCTASGRTFSSYALAWFRQRPGKEREFVAGLRWGGPTNYADSVKDRFTISGDSAKHTMYLQMNSLKPEDTAVYYCGYNPGGWAVPSQYEYDSWGQGTQVTVSSGTGGGGSGGGGSGGGGSEFDIQMTQSPSSLSASVGDRVTITCKASDHINNWLAWYQQKPGQAPKLLIYGATTLETGVPSRFSGSGSGTDYTLTISSLQPEDFATYYCQQSWNTPWTFGQGTKLEIKRLEQSFGLLDPKLCYLLDGILFIYGVILTALFLRVKFSRSADAPAYQQGQNQLYNELNLGRREEYDVLDKRRGRDPEMGGKPQRRKNPQEGLYNELQKDKMAEAYSEIGMKGERRRGKGHDGLYQGLSTATKDTYDALHMQALPPRRAKRSGSGATNFSLLKQAGDVEENPGPTSMDWIWRILFLVGAATGAHSQLQLQESGPGLVKPSETLSLTCTVSGGSISSGDYYWGWIRQPPGKGLEWIGHIYYSGATYYNPSLKSRVTISVDTSRNQFSLKLSSVTAADTAVYYCTRDDSSNWRSRGQGTLVTVSSSGGGGSGGGGSQVQLQESGGGLAQAGGSLRLSCAASGRTFSMGWFRQAPGKEREFVAAITYSGGSPYYASSVRGRFTISRDNAKNTVYLQMNSLKPEDTAVYYCAANPTYGSDWNAENWGQGTQVTVSSGSGGGGSGGGGSGGGGSFEQVQLQQPGAELVKPGASVKMSCKASGYAFSSYWINWMKQKPGQGLEWIGQIYPGDGDTNYNGKFKGRATLTADTSSSTAYMQLSSLTSEDSAVYFCARSITTVVGCAMDYWGQGTSVTVSSTRQSFGLLDPKLCYLLDGILFIYGVILTALFLRVKFSRSADAPAYQQGQNQLYNELNLGRREEYDVLDKRRGRDPEMGGKPQRRKNPQEGLYNELQKDKMAEAYSEIGMKGERRRGKGHDGLYQGLSTATKDTYDALHMQALPPRRAKRSGSGVKQTLNFDLLKLAGDVESNPGPSRGHMTEYKPTVRLATRDDVPRAVRTLAAAFADYPATRHTVDPDRHIERVTELQELFLTRVGLDIGKVWVADDGAAVAVWTTPESVEAGAVFAEIGPRMAELSGSRLAAQQQMEGLLAPHRPKEPAWFLATVGVSPDHQGKGLGSAVVLPGVEAAERAGVPAFLETSAPRNLPFYERLGFTVTADVEVPEGPRTWCMTRKPGA

SEQ ID NO: 15895 - protein, 1183 aa, Artificial Sequence
  Synthetic Polypeptide
MALPVTALLLPLALLLHAARPEVQLLESGGGLVQPGGSLRLSCAASGFTFSSYAMSWVRQAPGKGLEWVSSISGSGDYIYYADSVKGRFTISRDISKNTLYLQMNSLRAEDTAVYYCAKEGTGANSSLADYRGQGTLVTVSSGGGSGGGSQVQLVESGGGLVQAGDSVTLSCTASGRTFSSYALAWFRQRPGKEREFVAGLRWGGPTNYADSVKDRFTISGDSAKHTMYLQMNSLKPEDTAVYYCGYNPGGWAVPSQYEYDSWGQGTQVTVSSGTGGGGSGGGGSGGGGSEFDIQMTQSPSSLSASVGDRVTITCKASDHINNWLAWYQQKPGQAPKLLIYGATTLETGVPSRFSGSGSGTDYTLTISSLQPEDFATYYCQQSWNTPWTFGQGTKLEIKRLEGQPKANPTVTLFPPSSEELQANKATLVCLISDFYPGAVTVAWKADGSPVKAGVETTKPSKQSNNKYAASSYLSLTPEQWKSHRSYSCQVTHEGSTVEKTVAPTECSPIKTDVITMDPKDNCSKDANDTLLLQLTNTSAYYMYLLLLLKSVVYFAIITCCLLRRTAFCCNGEKSRAKRSGSGATNFSLLKQAGDVEENPGPTSMDWIWRILFLVGAATGAHSQLQLQESGPGLVKPSETLSLTCTVSGGSISSGDYYWGWIRQPPGKGLEWIGHIYYSGATYYNPSLKSRVTISVDTSRNQFSLKLSSVTAADTAVYYCTRDDSSNWRSRGQGTLVTVSSSGGGGSGGGGSQVQLQESGGGLAQAGGSLRLSCAASGRTFSMGWFRQAPGKEREFVAAITYSGGSPYYASSVRGRFTISRDNAKNTVYLQMNSLKPEDTAVYYCAANPTYGSDWNAENWGQGTQVTVSSGSGGGGSGGGGSGGGGSFEQVQLQQPGAELVKPGASVKMSCKASGYAFSSYWINWMKQKPGQGLEWIGQIYPGDGDTNYNGKFKGRATLTADTSSSTAYMQLSSLTSEDSAVYFCARSITTVVGCAMDYWGQGTSVTVSSTRASTKGPSVFPLAPSSKSTSGGTAALGCLVKDYFPEPVTVSWNSGALTSGVHTFPAVLQSSGLYSLSSVVTVPSSSLGTQTYICNVNHKPSNTKVDKRVEPKSCEVKTDSTDHVKPKETENTKQPSKSCHKPKAIVHTEKVNMMSLTVLGLRMLFAKTVAVNFLLTAKLFFL

SEQ ID NO: 15896 - protein, 1161 aa, Artificial Sequence
  Synthetic Polypeptide
MALPVTALLLPLALLLHAARPEVQLLESGGGLVQPGGSLRLSCAASGFTFSSYAMSWVRQAPGKGLEWVSSISGSGDYIYYADSVKGRFTISRDISKNTLYLQMNSLRAEDTAVYYCAKEGTGANSSLADYRGQGTLVTVSSGGGSGGGSQVQLVESGGGLVQAGDSVTLSCTASGRTFSSYALAWFRQRPGKEREFVAGLRWGGPTNYADSVKDRFTISGDSAKHTMYLQMNSLKPEDTAVYYCGYNPGGWAVPSQYEYDSWGQGTQVTVSSGTGGGGSGGGGSGGGGSEFDIQMTQSPSSLSASVGDRVTITCKASDHINNWLAWYQQKPGQAPKLLIYGATTLETGVPSRFSGSGSGTDYTLTISSLQPEDFATYYCQQSWNTPWTFGQGTKLEIKRLEGQPKANPTVTLFPPSSEELQANKATLVCLISDFYPGAVTVAWKADGSPVKAGVETTKPSKQSNNKYAASSYLSLTPEQWKSHRSYSCQVTHEGSTVEKTVAPTECSGRADCGITSASYHQGVLSATILYEILLGKATLYAVLVSALVLMAMVKRKDSRGRAKRSGSGATNFSLLKQAGDVEENPGPTSMDWIWRILFLVGAATGAHSQLQLQESGPGLVKPSETLSLTCTVSGGSISSGDYYWGWIRQPPGKGLEWIGHIYYSGATYYNPSLKSRVTISVDTSRNQFSLKLSSVTAADTAVYYCTRDDSSNWRSRGQGTLVTVSSSGGGGSGGGGSQVQLQESGGGLAQAGGSLRLSCAASGRTFSMGWFRQAPGKEREFVAAITYSGGSPYYASSVRGRFTISRDNAKNTVYLQMNSLKPEDTAVYYCAANPTYGSDWNAENWGQGTQVTVSSGSGGGGSGGGGSGGGGSFEQVQLQQPGAELVKPGASVKMSCKASGYAFSSYWINWMKQKPGQGLEWIGQIYPGDGDTNYNGKFKGRATLTADTSSSTAYMQLSSLTSEDSAVYFCARSITTVVGCAMDYWGQGTSVTVSSTRASTKGPSVFPLAPSSKSTSGGTAALGCLVKDYFPEPVTVSWNSGALTSGVHTFPAVLQSSGLYSLSSVVTVPSSSLGTQTYICNVNHKPSNTKVDKRVEPKSCIPEDTFFPSSDVPCDVKLVEKSFETDTNLNFQNLSVIGFRILLLKVAGFNLLMTLRLWSS

SEQ ID NO: 15897 - protein, 1161 aa, Artificial Sequence
  Synthetic Polypeptide
MALPVTALLLPLALLLHAARPEVQLLESGGGLVQPGGSLRLSCAASGFTFSSYAMSWVRQAPGKGLEWVSSISGSGDYIYYADSVKGRFTISRDISKNTLYLQMNSLRAEDTAVYYCAKEGTGANSSLADYRGQGTLVTVSSGGGSGGGSQVQLVESGGGLVQAGDSVTLSCTASGRTFSSYALAWFRQRPGKEREFVAGLRWGGPTNYADSVKDRFTISGDSAKHTMYLQMNSLKPEDTAVYYCGYNPGGWAVPSQYEYDSWGQGTQVTVSSGTGGGGSGGGGSGGGGSEFDIQMTQSPSSLSASVGDRVTITCKASDHINNWLAWYQQKPGQAPKLLIYGATTLETGVPSRFSGSGSGTDYTLTISSLQPEDFATYYCQQSWNTPWTFGQGTKLEIKRLEGQPKANPTVTLFPPSSEELQANKATLVCLISDFYPGAVTVAWKADGSPVKAGVETTKPSKQSNNKYAASSYLSLTPEQWKSHRSYSCQVTHEGSTVEKTVAPTECSGRADCGFTSESYQQGVLSATILYEILLGKATLYAVLVSALVLMAMVKRKDSRGRAKRSGSGATNFSLLKQAGDVEENPGPTSMDWIWRILFLVGAATGAHSQLQLQESGPGLVKPSETLSLTCTVSGGSISSGDYYWGWIRQPPGKGLEWIGHIYYSGATYYNPSLKSRVTISVDTSRNQFSLKLSSVTAADTAVYYCTRDDSSNWRSRGQGTLVTVSSSGGGGSGGGGSQVQLQESGGGLAQAGGSLRLSCAASGRTFSMGWFRQAPGKEREFVAAITYSGGSPYYASSVRGRFTISRDNAKNTVYLQMNSLKPEDTAVYYCAANPTYGSDWNAENWGQGTQVTVSSGSGGGGSGGGGSGGGGSFEQVQLQQPGAELVKPGASVKMSCKASGYAFSSYWINWMKQKPGQGLEWIGQIYPGDGDTNYNGKFKGRATLTADTSSSTAYMQLSSLTSEDSAVYFCARSITTVVGCAMDYWGQGTSVTVSSTRASTKGPSVFPLAPSSKSTSGGTAALGCLVKDYFPEPVTVSWNSGALTSGVHTFPAVLQSSGLYSLSSVVTVPSSSLGTQTYICNVNHKPSNTKVDKRVEPKSCIPEDTFFPSPESSCDVKLVEKSFETDTNLNFQNLSVIGFRILLLKVAGFNLLMTLRLWSS

SEQ ID NO: 15898 - protein, 1127 aa, Artificial Sequence
  Synthetic Polypeptide
MALPVTALLLPLALLLHAARPEVQLLESGGGLVQPGGSLRLSCAASGFTFSSYAMSWVRQAPGKGLEWVSSISGSGDYIYYADSVKGRFTISRDISKNTLYLQMNSLRAEDTAVYYCAKEGTGANSSLADYRGQGTLVTVSSGGGSGGGSQVQLVESGGGLVQAGDSVTLSCTASGRTFSSYALAWFRQRPGKEREFVAGLRWGGPTNYADSVKDRFTISGDSAKHTMYLQMNSLKPEDTAVYYCGYNPGGWAVPSQYEYDSWGQGTQVTVSSLEGQPKANPTVTLFPPSSEELQANKATLVCLISDFYPGAVTVAWKADGSPVKAGVETTKPSKQSNNKYAASSYLSLTPEQWKSHRSYSCQVTHEGSTVEKTVAPTECSGRADCGFTSESYQQGVLSATILYEILLGKATLYAVLVSALVLMAMVKRKDSRGRAKRSGSGATNFSLLKQAGDVEENPGPTSMDWIWRILFLVGAATGAHSQLQLQESGPGLVKPSETLSLTCTVSGGSISSGDYYWGWIRQPPGKGLEWIGHIYYSGATYYNPSLKSRVTISVDTSRNQFSLKLSSVTAADTAVYYCTRDDSSNWRSRGQGTLVTVSSSGGGGSGGGGSQVQLQESGGGLAQAGGSLRLSCAASGRTFSMGWFRQAPGKEREFVAAITYSGGSPYYASSVRGRFTISRDNAKNTVYLQMNSLKPEDTAVYYCAANPTYGSDWNAENWGQGTQVTVSSTRASTKGPSVFPLAPSSKSTSGGTAALGCLVKDYFPEPVTVSWNSGALTSGVHTFPAVLQSSGLYSLSSVVTVPSSSLGTQTYICNVNHKPSNTKVDKRVEPKSCIPEDTFFPSPESSCDVKLVEKSFETDTNLNFQNLSVIGFRILLLKVAGFNLLMTLRLWSSRAKRSGSGVKQTLNFDLLKLAGDVESNPGPSRGHMTEYKPTVRLATRDDVPRAVRTLAAAFADYPATRHTVDPDRHIERVTELQELFLTRVGLDIGKVWVADDGAAVAVWTTPESVEAGAVFAEIGPRMAELSGSRLAAQQQMEGLLAPHRPKEPAWFLATVGVSPDHQGKGLGSAVVLPGVEAAERAGVPAFLETSAPRNLPFYERLGFTVTADVEVPEGPRTWCMTRKPGA

SEQ ID NO: 15899 - protein, 894 aa, Artificial Sequence
  Synthetic Polypeptide
MALPVTALLLPLALLLHAARPEVQLLESGGGLVQPGGSLRLSCAASGFTFSSYAMSWVRQAPGKGLEWVSSISGSGDYIYYADSVKGRFTISRDISKNTLYLQMNSLRAEDTAVYYCAKEGTGANSSLADYRGQGTLVTVSSGGGSGGGSQVQLVESGGGLVQAGDSVTLSCTASGRTFSSYALAWFRQRPGKEREFVAGLRWGGPTNYADSVKDRFTISGDSAKHTMYLQMNSLKPEDTAVYYCGYNPGGWAVPSQYEYDSWGQGTQVTVSSLEGQPKANPTVTLFPPSSEELQANKATLVCLISDFYPGAVTVAWKADGSPVKAGVETTKPSKQSNNKYAASSYLSLTPEQWKSHRSYSCQVTHEGSTVEKTVAPTECSGRADCGFTSESYQQGVLSATILYEILLGKATLYAVLVSALVLMAMVKRKDSRGRAKRSGSGATNFSLLKQAGDVEENPGPTSMDWIWRILFLVGAATGAHSQLQLQESGPGLVKPSETLSLTCTVSGGSISSGDYYWGWIRQPPGKGLEWIGHIYYSGATYYNPSLKSRVTISVDTSRNQFSLKLSSVTAADTAVYYCTRDDSSNWRSRGQGTLVTVSSSGGGGSGGGGSQVQLQESGGGLAQAGGSLRLSCAASGRTFSMGWFRQAPGKEREFVAAITYSGGSPYYASSVRGRFTISRDNAKNTVYLQMNSLKPEDTAVYYCAANPTYGSDWNAENWGQGTQVTVSSTRASTKGPSVFPLAPSSKSTSGGTAALGCLVKDYFPEPVTVSWNSGALTSGVHTFPAVLQSSGLYSLSSVVTVPSSSLGTQTYICNVNHKPSNTKVDKRVEPKSCIPEDTFFPSPESSCDVKLVEKSFETDTNLNFQNLSVIGFRILLLKVAGFNLLMTLRLWSS

SEQ ID NO: 15900 - protein, 922 aa, Artificial Sequence
  Synthetic Polypeptide
MALPVTALLLPLALLLHAARPEVQLLESGGGLVQPGGSLRLSCAASGFTFSSYAMSWVRQAPGKGLEWVSSISGSGDYIYYADSVKGRFTISRDISKNTLYLQMNSLRAEDTAVYYCAKEGTGANSSLADYRGQGTLVTVSSGGGSGGGSQVQLVESGGGLVQAGDSVTLSCTASGRTFSSYALAWFRQRPGKEREFVAGLRWGGPTNYADSVKDRFTISGDSAKHTMYLQMNSLKPEDTAVYYCGYNPGGWAVPSQYEYDSWGQGTQVTVSSLEGSGRADCGFTSESYQQGVLSATILYEILLGKATLYAVLVSALVLMAMVKRKDSRGRAKRSGSGATNFSLLKQAGDVEENPGPTSMDWIWRILFLVGAATGAHSQLQLQESGPGLVKPSETLSLTCTVSGGSISSGDYYWGWIRQPPGKGLEWIGHIYYSGATYYNPSLKSRVTISVDTSRNQFSLKLSSVTAADTAVYYCTRDDSSNWRSRGQGTLVTVSSSGGGGSGGGGSQVQLQESGGGLAQAGGSLRLSCAASGRTFSMGWFRQAPGKEREFVAAITYSGGSPYYASSVRGRFTISRDNAKNTVYLQMNSLKPEDTAVYYCAANPTYGSDWNAENWGQGTQVTVSSTRGSIPEDTFFPSPESSCDVKLVEKSFETDTNLNFQNLSVIGFRILLLKVAGFNLLMTLRLWSSRAKRSGSGVKQTLNFDLLKLAGDVESNPGPSRGHMTEYKPTVRLATRDDVPRAVRTLAAAFADYPATRHTVDPDRHIERVTELQELFLTRVGLDIGKVWVADDGAAVAVWTTPESVEAGAVFAEIGPRMAELSGSRLAAQQQMEGLLAPHRPKEPAWFLATVGVSPDHQGKGLGSAVVLPGVEAAERAGVPAFLETSAPRNLPFYERLGFTVTADVEVPEGPRTWCMTRKPGA

SEQ ID NO: 15901 - protein, 689 aa, Artificial Sequence
  Synthetic Polypeptide
MALPVTALLLPLALLLHAARPEVQLLESGGGLVQPGGSLRLSCAASGFTFSSYAMSWVRQAPGKGLEWVSSISGSGDYIYYADSVKGRFTISRDISKNTLYLQMNSLRAEDTAVYYCAKEGTGANSSLADYRGQGTLVTVSSGGGSGGGSQVQLVESGGGLVQAGDSVTLSCTASGRTFSSYALAWFRQRPGKEREFVAGLRWGGPTNYADSVKDRFTISGDSAKHTMYLQMNSLKPEDTAVYYCGYNPGGWAVPSQYEYDSWGQGTQVTVSSLEGSGRADCGFTSESYQQGVLSATILYEILLGKATLYAVLVSALVLMAMVKRKDSRGRAKRSGSGATNFSLLKQAGDVEENPGPTSMDWIWRILFLVGAATGAHSQLQLQESGPGLVKPSETLSLTCTVSGGSISSGDYYWGWIRQPPGKGLEWIGHIYYSGATYYNPSLKSRVTISVDTSRNQFSLKLSSVTAADTAVYYCTRDDSSNWRSRGQGTLVTVSSSGGGGSGGGGSQVQLQESGGGLAQAGGSLRLSCAASGRTFSMGWFRQAPGKEREFVAAITYSGGSPYYASSVRGRFTISRDNAKNTVYLQMNSLKPEDTAVYYCAANPTYGSDWNAENWGQGTQVTVSSTRGSIPEDTFFPSPESSCDVKLVEKSFETDTNLNFQNLSVIGFRILLLKVAGFNLLMTLRLWSS

SEQ ID NO: 15902 - protein, 931 aa, Artificial Sequence
  Synthetic Polypeptide
MALPVTALLLPLALLLHAARPEVQLLESGGGLVQPGGSLRLSCAASGFTFSSYAMSWVRQAPGKGLEWVSSISGSGDYIYYADSVKGRFTISRDISKNTLYLQMNSLRAEDTAVYYCAKEGTGANSSLADYRGQGTLVTVSSGGGSGGGSQVQLVESGGGLVQAGDSVTLSCTASGRTFSSYALAWFRQRPGKEREFVAGLRWGGPTNYADSVKDRFTISGDSAKHTMYLQMNSLKPEDTAVYYCGYNPGGWAVPSQYEYDSWGQGTQVTVSSLEDKTHTCPPCPAGRADCGFTSESYQQGVLSATILYEILLGKATLYAVLVSALVLMAMVKRKDSRGRAKRSGSGATNFSLLKQAGDVEENPGPTSMDWIWRILFLVGAATGAHSQLQLQESGPGLVKPSETLSLTCTVSGGSISSGDYYWGWIRQPPGKGLEWIGHIYYSGATYYNPSLKSRVTISVDTSRNQFSLKLSSVTAADTAVYYCTRDDSSNWRSRGQGTLVTVSSSGGGGSGGGGSQVQLQESGGGLAQAGGSLRLSCAASGRTFSMGWFRQAPGKEREFVAAITYSGGSPYYASSVRGRFTISRDNAKNTVYLQMNSLKPEDTAVYYCAANPTYGSDWNAENWGQGTQVTVSSTRGSIPEDTFFPSPESSCDVKLVEKSFETDTNLNFQNLSVIGFRILLLKVAGFNLLMTLRLWSSRAKRSGSGVKQTLNFDLLKLAGDVESNPGPSRGHMTEYKPTVRLATRDDVPRAVRTLAAAFADYPATRHTVDPDRHIERVTELQELFLTRVGLDIGKVWVADDGAAVAVWTTPESVEAGAVFAEIGPRMAELSGSRLAAQQQMEGLLAPHRPKEPAWFLATVGVSPDHQGKGLGSAVVLPGVEAAERAGVPAFLETSAPRNLPFYERLGFTVTADVEVPEGPRTWCMTRKPGA

SEQ ID NO: 15903 - protein, 931 aa, Artificial Sequence
  Synthetic Polypeptide
MALPVTALLLPLALLLHAARPEVQLLESGGGLVQPGGSLRLSCAASGFTFSSYAMSWVRQAPGKGLEWVSSISGSGDYIYYADSVKGRFTISRDISKNTLYLQMNSLRAEDTAVYYCAKEGTGANSSLADYRGQGTLVTVSSGGGSGGGSQVQLVESGGGLVQAGDSVTLSCTASGRTFSSYALAWFRQRPGKEREFVAGLRWGGPTNYADSVKDRFTISGDSAKHTMYLQMNSLKPEDTAVYYCGYNPGGWAVPSQYEYDSWGQGTQVTVSSLEGSGRADCGFTSESYQQGVLSATILYEILLGKATLYAVLVSALVLMAMVKRKDSRGRAKRSGSGATNFSLLKQAGDVEENPGPTSMDWIWRILFLVGAATGAHSQLQLQESGPGLVKPSETLSLTCTVSGGSISSGDYYWGWIRQPPGKGLEWIGHIYYSGATYYNPSLKSRVTISVDTSRNQFSLKLSSVTAADTAVYYCTRDDSSNWRSRGQGTLVTVSSSGGGGSGGGGSQVQLQESGGGLAQAGGSLRLSCAASGRTFSMGWFRQAPGKEREFVAAITYSGGSPYYASSVRGRFTISRDNAKNTVYLQMNSLKPEDTAVYYCAANPTYGSDWNAENWGQGTQVTVSSTRDKTHTCPPCPAIPEDTFFPSPESSCDVKLVEKSFETDTNLNFQNLSVIGFRILLLKVAGFNLLMTLRLWSSRAKRSGSGVKQTLNFDLLKLAGDVESNPGPSRGHMTEYKPTVRLATRDDVPRAVRTLAAAFADYPATRHTVDPDRHIERVTELQELFLTRVGLDIGKVWVADDGAAVAVWTTPESVEAGAVFAEIGPRMAELSGSRLAAQQQMEGLLAPHRPKEPAWFLATVGVSPDHQGKGLGSAVVLPGVEAAERAGVPAFLETSAPRNLPFYERLGFTVTADVEVPEGPRTWCMTRKPGA

SEQ ID NO: 15904 - protein, 940 aa, Artificial Sequence
  Synthetic Polypeptide
MALPVTALLLPLALLLHAARPEVQLLESGGGLVQPGGSLRLSCAASGFTFSSYAMSWVRQAPGKGLEWVSSISGSGDYIYYADSVKGRFTISRDISKNTLYLQMNSLRAEDTAVYYCAKEGTGANSSLADYRGQGTLVTVSSGGGSGGGSQVQLVESGGGLVQAGDSVTLSCTASGRTFSSYALAWFRQRPGKEREFVAGLRWGGPTNYADSVKDRFTISGDSAKHTMYLQMNSLKPEDTAVYYCGYNPGGWAVPSQYEYDSWGQGTQVTVSSLEDKTHTCPPCPAGRADCGFTSESYQQGVLSATILYEILLGKATLYAVLVSALVLMAMVKRKDSRGRAKRSGSGATNFSLLKQAGDVEENPGPTSMDWIWRILFLVGAATGAHSQLQLQESGPGLVKPSETLSLTCTVSGGSISSGDYYWGWIRQPPGKGLEWIGHIYYSGATYYNPSLKSRVTISVDTSRNQFSLKLSSVTAADTAVYYCTRDDSSNWRSRGQGTLVTVSSSGGGGSGGGGSQVQLQESGGGLAQAGGSLRLSCAASGRTFSMGWFRQAPGKEREFVAAITYSGGSPYYASSVRGRFTISRDNAKNTVYLQMNSLKPEDTAVYYCAANPTYGSDWNAENWGQGTQVTVSSTRDKTHTCPPCPAIPEDTFFPSPESSCDVKLVEKSFETDTNLNFQNLSVIGFRILLLKVAGFNLLMTLRLWSSRAKRSGSGVKQTLNFDLLKLAGDVESNPGPSRGHMTEYKPTVRLATRDDVPRAVRTLAAAFADYPATRHTVDPDRHIERVTELQELFLTRVGLDIGKVWVADDGAAVAVWTTPESVEAGAVFAEIGPRMAELSGSRLAAQQQMEGLLAPHRPKEPAWFLATVGVSPDHQGKGLGSAVVLPGVEAAERAGVPAFLETSAPRNLPFYERLGFTVTADVEVPEGPRTWCMTRKPGA

SEQ ID NO: 15905 - protein, 707 aa, Artificial Sequence
  Synthetic Polypeptide
MALPVTALLLPLALLLHAARPEVQLLESGGGLVQPGGSLRLSCAASGFTFSSYAMSWVRQAPGKGLEWVSSISGSGDYIYYADSVKGRFTISRDISKNTLYLQMNSLRAEDTAVYYCAKEGTGANSSLADYRGQGTLVTVSSGGGSGGGSQVQLVESGGGLVQAGDSVTLSCTASGRTFSSYALAWFRQRPGKEREFVAGLRWGGPTNYADSVKDRFTISGDSAKHTMYLQMNSLKPEDTAVYYCGYNPGGWAVPSQYEYDSWGQGTQVTVSSLEDKTHTCPPCPAGRADCGFTSESYQQGVLSATILYEILLGKATLYAVLVSALVLMAMVKRKDSRGRAKRSGSGATNFSLLKQAGDVEENPGPTSMDWIWRILFLVGAATGAHSQLQLQESGPGLVKPSETLSLTCTVSGGSISSGDYYWGWIRQPPGKGLEWIGHIYYSGATYYNPSLKSRVTISVDTSRNQFSLKLSSVTAADTAVYYCTRDDSSNWRSRGQGTLVTVSSSGGGGSGGGGSQVQLQESGGGLAQAGGSLRLSCAASGRTFSMGWFRQAPGKEREFVAAITYSGGSPYYASSVRGRFTISRDNAKNTVYLQMNSLKPEDTAVYYCAANPTYGSDWNAENWGQGTQVTVSSTRDKTHTCPPCPAIPEDTFFPSPESSCDVKLVEKSFETDTNLNFQNLSVIGFRILLLKVAGFNLLMTLRLWSS

SEQ ID NO: 15906 - protein, 698 aa, Artificial Sequence
  Synthetic Polypeptide
MALPVTALLLPLALLLHAARPEVQLLESGGGLVQPGGSLRLSCAASGFTFSSYAMSWVRQAPGKGLEWVSSISGSGDYIYYADSVKGRFTISRDISKNTLYLQMNSLRAEDTAVYYCAKEGTGANSSLADYRGQGTLVTVSSGGGSGGGSQVQLVESGGGLVQAGDSVTLSCTASGRTFSSYALAWFRQRPGKEREFVAGLRWGGPTNYADSVKDRFTISGDSAKHTMYLQMNSLKPEDTAVYYCGYNPGGWAVPSQYEYDSWGQGTQVTVSSLEGSGRADCGFTSESYQQGVLSATILYEILLGKATLYAVLVSALVLMAMVKRKDSRGRAKRSGSGATNFSLLKQAGDVEENPGPTSMDWIWRILFLVGAATGAHSQLQLQESGPGLVKPSETLSLTCTVSGGSISSGDYYWGWIRQPPGKGLEWIGHIYYSGATYYNPSLKSRVTISVDTSRNQFSLKLSSVTAADTAVYYCTRDDSSNWRSRGQGTLVTVSSSGGGGSGGGGSQVQLQESGGGLAQAGGSLRLSCAASGRTFSMGWFRQAPGKEREFVAAITYSGGSPYYASSVRGRFTISRDNAKNTVYLQMNSLKPEDTAVYYCAANPTYGSDWNAENWGQGTQVTVSSTRDKTHTCPPCPAIPEDTFFPSPESSCDVKLVEKSFETDTNLNFQNLSVIGFRILLLKVAGFNLLMTLRLWSS

SEQ ID NO: 15907 - protein, 1149 aa, Artificial Sequence
  Synthetic Polypeptide
MALPVTALLLPLALLLHAARPEVQLLESGGGLVQPGGSLRLSCAASGFTFSSYAMSWVRQAPGKGLEWVSSISGSGDYIYYADSVKGRFTISRDISKNTLYLQMNSLRAEDTAVYYCAKEGTGANSSLADYRGQGTLVTVSSGGGSGGGSQVQLVESGGGLVQAGDSVTLSCTASGRTFSSYALAWFRQRPGKEREFVAGLRWGGPTNYADSVKDRFTISGDSAKHTMYLQMNSLKPEDTAVYYCGYNPGGWAVPSQYEYDSWGQGTQVTVSSLEGQPKANPTVTLFPPSSEELQANKATLVCLISDFYPGAVTVAWKADGSPVKAGVETTKPSKQSNNKYAASSYLSLTPEQWKSHRSYSCQVTHEGSTVEKTVAPTECSPIKTDVITMDPKDNCSKDANDTLLLQLTNTSAYYMYLLLLLKSVVYFAIITCCLLRRTAFCCNGEKSRAKRSGSGATNFSLLKQAGDVEENPGPTSMDWIWRILFLVGAATGAHSQLQLQESGPGLVKPSETLSLTCTVSGGSISSGDYYWGWIRQPPGKGLEWIGHIYYSGATYYNPSLKSRVTISVDTSRNQFSLKLSSVTAADTAVYYCTRDDSSNWRSRGQGTLVTVSSSGGGGSGGGGSQVQLQESGGGLAQAGGSLRLSCAASGRTFSMGWFRQAPGKEREFVAAITYSGGSPYYASSVRGRFTISRDNAKNTVYLQMNSLKPEDTAVYYCAANPTYGSDWNAENWGQGTQVTVSSTRASTKGPSVFPLAPSSKSTSGGTAALGCLVKDYFPEPVTVSWNSGALTSGVHTFPAVLQSSGLYSLSSVVTVPSSSLGTQTYICNVNHKPSNTKVDKRVEPKSCEVKTDSTDHVKPKETENTKQPSKSCHKPKAIVHTEKVNMMSLTVLGLRMLFAKTVAVNFLLTAKLFFLRAKRSGSGVKQTLNFDLLKLAGDVESNPGPSRGHMTEYKPTVRLATRDDVPRAVRTLAAAFADYPATRHTVDPDRHIERVTELQELFLTRVGLDIGKVWVADDGAAVAVWTTPESVEAGAVFAEIGPRMAELSGSRLAAQQQMEGLLAPHRPKEPAWFLATVGVSPDHQGKGLGSAVVLPGVEAAERAGVPAFLETSAPRNLPFYERLGFTVTADVEVPEGPRTWCMTRKPGA

SEQ ID NO: 15908 - protein, 916 aa, Artificial Sequence
  Synthetic Polypeptide
MALPVTALLLPLALLLHAARPEVQLLESGGGLVQPGGSLRLSCAASGFTFSSYAMSWVRQAPGKGLEWVSSISGSGDYIYYADSVKGRFTISRDISKNTLYLQMNSLRAEDTAVYYCAKEGTGANSSLADYRGQGTLVTVSSGGGSGGGSQVQLVESGGGLVQAGDSVTLSCTASGRTFSSYALAWFRQRPGKEREFVAGLRWGGPTNYADSVKDRFTISGDSAKHTMYLQMNSLKPEDTAVYYCGYNPGGWAVPSQYEYDSWGQGTQVTVSSLEGQPKANPTVTLFPPSSEELQANKATLVCLISDFYPGAVTVAWKADGSPVKAGVETTKPSKQSNNKYAASSYLSLTPEQWKSHRSYSCQVTHEGSTVEKTVAPTECSPIKTDVITMDPKDNCSKDANDTLLLQLTNTSAYYMYLLLLLKSVVYFAIITCCLLRRTAFCCNGEKSRAKRSGSGATNFSLLKQAGDVEENPGPTSMDWIWRILFLVGAATGAHSQLQLQESGPGLVKPSETLSLTCTVSGGSISSGDYYWGWIRQPPGKGLEWIGHIYYSGATYYNPSLKSRVTISVDTSRNQFSLKLSSVTAADTAVYYCTRDDSSNWRSRGQGTLVTVSSSGGGGSGGGGSQVQLQESGGGLAQAGGSLRLSCAASGRTFSMGWFRQAPGKEREFVAAITYSGGSPYYASSVRGRFTISRDNAKNTVYLQMNSLKPEDTAVYYCAANPTYGSDWNAENWGQGTQVTVSSTRASTKGPSVFPLAPSSKSTSGGTAALGCLVKDYFPEPVTVSWNSGALTSGVHTFPAVLQSSGLYSLSSVVTVPSSSLGTQTYICNVNHKPSNTKVDKRVEPKSCEVKTDSTDHVKPKETENTKQPSKSCHKPKAIVHTEKVNMMSLTVLGLRMLFAKTVAVNFLLTAKLFFL

SEQ ID NO: 15909 - protein, 944 aa, Artificial Sequence
  Synthetic Polypeptide
MALPVTALLLPLALLLHAARPEVQLLESGGGLVQPGGSLRLSCAASGFTFSSYAMSWVRQAPGKGLEWVSSISGSGDYIYYADSVKGRFTISRDISKNTLYLQMNSLRAEDTAVYYCAKEGTGANSSLADYRGQGTLVTVSSGGGSGGGSQVQLVESGGGLVQAGDSVTLSCTASGRTFSSYALAWFRQRPGKEREFVAGLRWGGPTNYADSVKDRFTISGDSAKHTMYLQMNSLKPEDTAVYYCGYNPGGWAVPSQYEYDSWGQGTQVTVSSLEGSPIKTDVITMDPKDNCSKDANDTLLLQLTNTSAYYMYLLLLLKSVVYFAIITCCLLRRTAFCCNGEKSRAKRSGSGATNFSLLKQAGDVEENPGPTSMDWIWRILFLVGAATGAHSQLQLQESGPGLVKPSETLSLTCTVSGGSISSGDYYWGWIRQPPGKGLEWIGHIYYSGATYYNPSLKSRVTISVDTSRNQFSLKLSSVTAADTAVYYCTRDDSSNWRSRGQGTLVTVSSSGGGGSGGGGSQVQLQESGGGLAQAGGSLRLSCAASGRTFSMGWFRQAPGKEREFVAAITYSGGSPYYASSVRGRFTISRDNAKNTVYLQMNSLKPEDTAVYYCAANPTYGSDWNAENWGQGTQVTVSSTRGSEVKTDSTDHVKPKETENTKQPSKSCHKPKAIVHTEKVNMMSLTVLGLRMLFAKTVAVNFLLTAKLFFLRAKRSGSGVKQTLNFDLLKLAGDVESNPGPSRGHMTEYKPTVRLATRDDVPRAVRTLAAAFADYPATRHTVDPDRHIERVTELQELFLTRVGLDIGKVWVADDGAAVAVWTTPESVEAGAVFAEIGPRMAELSGSRLAAQQQMEGLLAPHRPKEPAWFLATVGVSPDHQGKGLGSAVVLPGVEAAERAGVPAFLETSAPRNLPFYERLGFTVTADVEVPEGPRTWCMTRKPGA

SEQ ID NO: 15910 - protein, 711 aa, Artificial Sequence
  Synthetic Polypeptide
MALPVTALLLPLALLLHAARPEVQLLESGGGLVQPGGSLRLSCAASGFTFSSYAMSWVRQAPGKGLEWVSSISGSGDYIYYADSVKGRFTISRDISKNTLYLQMNSLRAEDTAVYYCAKEGTGANSSLADYRGQGTLVTVSSGGGSGGGSQVQLVESGGGLVQAGDSVTLSCTASGRTFSSYALAWFRQRPGKEREFVAGLRWGGPTNYADSVKDRFTISGDSAKHTMYLQMNSLKPEDTAVYYCGYNPGGWAVPSQYEYDSWGQGTQVTVSSLEGSPIKTDVITMDPKDNCSKDANDTLLLQLTNTSAYYMYLLLLLKSVVYFAIITCCLLRRTAFCCNGEKSRAKRSGSGATNFSLLKQAGDVEENPGPTSMDWIWRILFLVGAATGAHSQLQLQESGPGLVKPSETLSLTCTVSGGSISSGDYYWGWIRQPPGKGLEWIGHIYYSGATYYNPSLKSRVTISVDTSRNQFSLKLSSVTAADTAVYYCTRDDSSNWRSRGQGTLVTVSSSGGGGSGGGGSQVQLQESGGGLAQAGGSLRLSCAASGRTFSMGWFRQAPGKEREFVAAITYSGGSPYYASSVRGRFTISRDNAKNTVYLQMNSLKPEDTAVYYCAANPTYGSDWNAENWGQGTQVTVSSTRGSEVKTDSTDHVKPKETENTKQPSKSCHKPKAIVHTEKVNMMSLTVLGLRMLFAKTVAVNFLLTAKLFFL

SEQ ID NO: 15911 - protein, 729 aa, Artificial Sequence
  Synthetic Polypeptide
MALPVTALLLPLALLLHAARPEVQLLESGGGLVQPGGSLRLSCAASGFTFSSYAMSWVRQAPGKGLEWVSSISGSGDYIYYADSVKGRFTISRDISKNTLYLQMNSLRAEDTAVYYCAKEGTGANSSLADYRGQGTLVTVSSGGGSGGGSQVQLVESGGGLVQAGDSVTLSCTASGRTFSSYALAWFRQRPGKEREFVAGLRWGGPTNYADSVKDRFTISGDSAKHTMYLQMNSLKPEDTAVYYCGYNPGGWAVPSQYEYDSWGQGTQVTVSSLEDKTHTCPPCPAPIKTDVITMDPKDNCSKDANDTLLLQLTNTSAYYMYLLLLLKSVVYFAIITCCLLRRTAFCCNGEKSRAKRSGSGATNFSLLKQAGDVEENPGPTSMDWIWRILFLVGAATGAHSQLQLQESGPGLVKPSETLSLTCTVSGGSISSGDYYWGWIRQPPGKGLEWIGHIYYSGATYYNPSLKSRVTISVDTSRNQFSLKLSSVTAADTAVYYCTRDDSSNWRSRGQGTLVTVSSSGGGGSGGGGSQVQLQESGGGLAQAGGSLRLSCAASGRTFSMGWFRQAPGKEREFVAAITYSGGSPYYASSVRGRFTISRDNAKNTVYLQMNSLKPEDTAVYYCAANPTYGSDWNAENWGQGTQVTVSSTRDKTHTCPPCPAEVKTDSTDHVKPKETENTKQPSKSCHKPKAIVHTEKVNMMSLTVLGLRMLFAKTVAVNFLLTAKLFFL

SEQ ID NO: 15912 - protein, 431 aa, Artificial Sequence
  Synthetic Polypeptide
MDWIWRILFLVGAATGAHSQLQLQESGPGLVKPSETLSLTCTVSGGSISSGDYYWGWIRQPPGKGLEWIGHIYYSGATYYNPSLKSRVTISVDTSRNQFSLKLSSVTAADTAVYYCTRDDSSNWRSRGQGTLVTVSSSGGGGSGGGGSQVQLQESGGGLAQAGGSLRLSCAASGRTFSMGWFRQAPGKEREFVAAITYSGGSPYYASSVRGRFTISRDNAKNTVYLQMNSLKPEDTAVYYCAANPTYGSDWNAENWGQGTQVTVSSTRASTKGPSVFPLAPSSKSTSGGTAALGCLVKDYFPEPVTVSWNSGALTSGVHTFPAVLQSSGLYSLSSVVTVPSSSLGTQTYICNVNHKPSNTKVDKRVEPKSCIPEDTFFPSPESSCDVKLVEKSFETDTNLNFQNLSVIGFRILLLKVAGFNLLMTLRLWSS

SEQ ID NO: 15913 - protein, 439 aa, Artificial Sequence
  Synthetic Polypeptide
MDWIWRILFLVGAATGAHSQLQLQESGPGLVKPSETLSLTCTVSGGSISSGDYYWGWIRQPPGKGLEWIGHIYYSGATYYNPSLKSRVTISVDTSRNQFSLKLSSVTAADTAVYYCTRDDSSNWRSRGQGTLVTVSSSGGGGSGGGGSQVQLQESGGGLAQAGGSLRLSCAASGRTFSMGWFRQAPGKEREFVAAITYSGGSPYYASSVRGRFTISRDNAKNTVYLQMNSLKPEDTAVYYCAANPTYGSDWNAENWGQGTQVTVSSTRASTKGPSVFPLAPSSKSTSGGTAALGCLVKDYFPEPVTVSWNSGALTSGVHTFPAVLQSSGLYSLSSVVTVPSSSLGTQTYICNVNHKPSNTKVDKRVEPKSCEVKTDSTDHVKPKETENTKQPSKSCHKPKAIVHTEKVNMMSLTVLGLRMLFAKTVAVNFLLTAKLFFL

SEQ ID NO: 15914 - protein, 638 aa, Artificial Sequence
  Synthetic Polypeptide
MALPVTALLLPLALLLHAARPEVQLLESGGGLVQPGGSLRLSCAASGFIFSSYAMSWVRQAPGKGQEWVSGVSGTGVNTYYADSVKGRFTISRDNSKNTLYLQMNSLRAEDTAVYYCASGKGWDSGSWYEDYRGQGTLVTVSSGTGGGGSGGGGSGGGGSEFDIQMTQSPSSLSASVGDRVTITCKASDHINNWLAWYQQKPGQAPKLLIYGATTLETGVPSRFSGSGSGTDYTLTISSLQPEDFATYYCQQSWNTPWTFGQGTKLEIKRGGGGSGGGGSGGGGSQVQLQQPGAELVKPGASVKMSCKASGYAFSSYWINWMKQKPGQGLEWIGQIYPGDGDTNYNGKFKGRATLTADTSSSTAYMQLSSLTSEDSAVYFCARSITTVVGCAMDYWGQGTSVTVSSTREQKLISEEDLKIEVMYPPPYLDNEKSNGTIIHVKGKHLCPSPLFPGPSKPFWVLVVVGGVLACYSLLVTVAFIIFWVRSKRSRLLHSDYMNMTPRRPGPTRKHYQPYAPPRDFAAYRSRVKFSRSADAPAYQQGQNQLYNELNLGRREEYDVLDKRRGRDPEMGGKPRRKNPQEGLYNELQKDKMAEAYSEIGMKGERRRGKGHDGLYQGLSTATKDTYDALHMQALPPR

SEQ ID NO: 15915 - protein, 644 aa, Artificial Sequence
  Synthetic Polypeptide
MALPVTALLLPLALLLHAARPEVQLLESGGGLVQPGGSLRLSCAASGFIFSSYAMSWVRQAPGKGQEWVSGVSGTGVNTYYADSVKGRFTISRDNSKNTLYLQMNSLRAEDTAVYYCASGKGWDSGSWYEDYRGQGTLVTVSSGTGGGGSGGGGSGGGGSEFDIQMTQSPSSLSASVGDRVTITCKASDHINNWLAWYQQKPGQAPKLLIYGATTLETGVPSRFSGSGSGTDYTLTISSLQPEDFATYYCQQSWNTPWTFGQGTKLEIKRGGGGSGGGGSGGGGSQVQLQQPGAELVKPGASVKMSCKASGYAFSSYWINWMKQKPGQGLEWIGQIYPGDGDTNYNGKFKGRATLTADTSSSTAYMQLSSLTSEDSAVYFCARSITTVVGCAMDYWGQGTSVTVSSTREQKLISEEDLAKPTTTPAPRPPTPAPTIASQPLSLRPEACRPAAGGAVHTRGLDFACDIYIWAPLAGTCGVLLLSLVITLYCKRGRKKLLYIFKQPFMRPVQTTQEEDGCSCRFPEEEEGGCELRVKFSRSADAPAYQQGQNQLYNELNLGRREEYDVLDKRRGRDPEMGGKPRRKNPQEGLYNELQKDKMAEAYSEIGMKGERRRGKGHDGLYQGLSTATKDTYDALHMQALPPR

SEQ ID NO: 15916 - protein, 1057 aa, Artificial Sequence
  Synthetic Polypeptide
MALPVTALLLPLALLLHAARPEVQLLESGGGLVQPGGSLRLSCAASGFIFSSYAMSWVRQAPGKGQEWVSGVSGTGVNTYYADSVKGRFTISRDNSKNTLYLQMNSLRAEDTAVYYCASGKGWDSGSWYEDYRGQGTLVTVSSGTGGGGSGGGGSGGGGSEFDIQMTQSPSSLSASVGDRVTITCKASDHINNWLAWYQQKPGQAPKLLIYGATTLETGVPSRFSGSGSGTDYTLTISSLQPEDFATYYCQQSWNTPWTFGQGTKLEIKRGGGGSGGGGSGGGGSQVQLQQPGAELVKPGASVKMSCKASGYAFSSYWINWMKQKPGQGLEWIGQIYPGDGDTNYNGKFKGRATLTADTSSSTAYMQLSSLTSEDSAVYFCARSITTVVGCAMDYWGQGTSVTVSSTREQKLISEEDLAKPTTTPAPRPPTPAPTIASQPLSLRPEACRPAAGGAVHTRGLDFACDIYIWAPLAGTCGVLLLSLVITLYCGRARVKFSRSADAPAYQQGQNQLYNELNLGRREEYDVLDKRRGRDPEMGGKPRRKNPQEGLYNELQKDKMAEAYSEIGMKGERRRGKGHDGLYQGLSTATKDTYDALHMQALPPRSRGSGATNFSLLKQAGDVEENPGPGIHMATYEVLCEVARKLGTDDREVVLFLLNVFIPQPTLAQLIGALRALKEEGRLTFPLLAECLFRAGRRDLLRDLLHLDPRFLERHLAGTMSYFSPYQLTVLHVDGELCARDIRSLIFLSKDTIGSRSTPQTFLHWVYCMENLDLLGPTDVDALMSMLRSLSRVDLQRQVQTLMGLHLSGPSHSQHYRHTPLETDFYDYKDDDDKTSGSGEGRGSLLTCGDVEENPGPHMTEYKPTVRLATRDDVPRAVRTLAAAFADYPATRHTVDPDRHIERVTELQELFLTRVGLDIGKVWVADDGAAVAVWTTPESVEAGAVFAEIGPRMAELSGSRLAAQQQMEGLLAPHRPKEPAWFLATVGVSPDHQGKGLGSAVVLPGVEAAERAGVPAFLETSAPRNLPFYERLGFTVTADVEVPEGPRTWCMTRKPGA

SEQ ID NO: 15917 - protein, 997 aa, Artificial Sequence
  Synthetic Polypeptide
MALPVTALLLPLALLLHAARPEVQLLESGGGLVQPGGSLRLSCAASGFIFSSYAMSWVRQAPGKGQEWVSGVSGTGVNTYYADSVKGRFTISRDNSKNTLYLQMNSLRAEDTAVYYCASGKGWDSGSWYEDYRGQGTLVTVSSGTGGGGSGGGGSGGGGSEFDIQMTQSPSSLSASVGDRVTITCKASDHINNWLAWYQQKPGQAPKLLIYGATTLETGVPSRFSGSGSGTDYTLTISSLQPEDFATYYCQQSWNTPWTFGQGTKLEIKRLEIQNPDPAVYQLRDSKSSDKSVCLFTDFDSQTNVSQSKDSDVYITDKCVLDMRSMDFKSNSAVAWSNKSDFACANAFNNSIIPEDTFFPSSDVPCDVKLVEKSFETDTNLNFQNLSVIGFRILLLKVAGFNLLMTLRLWSSRAKRSGSGVKQTLNFDLLKLAGDVESNPGPTSMDWIWRILFLVGAATGAHSFEQVQLQQPGAELVKPGASVKMSCKASGYAFSSYWINWMKQKPGQGLEWIGQIYPGDGDTNYNGKFKGRATLTADTSSSTAYMQLSSLTSEDSAVYFCARSITTVVGCAMDYWGQGTSVTVSSTREDLKNVFPPEVAVFEPSKAEIAHTQKATLVCLATGFYPDHVELSWWVNGKEVHSGVCTDPQPLKEQPALNDSRYCLSSRLRVSATFWQNPRNHFRCQVQFYGLSENDEWTQDRAKPVTQIVSAEAWGRADCGITSASYHQGVLSATILYEILLGKATLYAVLVSALVLMAMVKRKDSRGRAKRSGSGATNFSLLKQAGDVEENPGPSRGHMTEYKPTVRLATRDDVPRAVRTLAAAFADYPATRHTVDPDRHIERVTELQELFLTRVGLDIGKVWVADDGAAVAVWTTPESVEAGAVFAEIGPRMAELSGSRLAAQQQMEGLLAPHRPKEPAWFLATVGVSPDHQGKGLGSAVVLPGVEAAERAGVPAFLETSAPRNLPFYERLGFTVTADVEVPEGPRTWCMTRKPGA

SEQ ID NO: 15918 - protein, 996 aa, Artificial Sequence
  Synthetic Polypeptide
MALPVTALLLPLALLLHAARPEVQLLESGGGLVQPGGSLRLSCAASGFIFSSYAMSWVRQAPGKGQEWVSGVSGTGVNTYYADSVKGRFTISRDNSKNTLYLQMNSLRAEDTAVYYCASGKGWDSGSWYEDYRGQGTLVTVSSGTGGGGSGGGGSGGGGSEFDIQMTQSPSSLSASVGDRVTITCKASDHINNWLAWYQQKPGQAPKLLIYGATTLETGVPSRFSGSGSGTDYTLTISSLQPEDFATYYCQQSWNTPWTFGQGTKLEIKRLEDLKNVFPPEVAVFEPSKAEIAHTQKATLVCLATGFYPDHVELSWWVNGKEVHSGVCTDPQPLKEQPALNDSRYCLSSRLRVSATFWQNPRNHFRCQVQFYGLSENDEWTQDRAKPVTQIVSAEAWGRADCGITSASYHQGVLSATILYEILLGKATLYAVLVSALVLMAMVKRKDSRGRAKRSGSGATNFSLLKQAGDVEENPGPTSMDWIWRILFLVGAATGAHSFEQVQLQQPGAELVKPGASVKMSCKASGYAFSSYWINWMKQKPGQGLEWIGQIYPGDGDTNYNGKFKGRATLTADTSSSTAYMQLSSLTSEDSAVYFCARSITTVVGCAMDYWGQGTSVTVSSTRIQNPDPAVYQLRDSKSSDKSVCLFTDFDSQTNVSQSKDSDVYITDKCVLDMRSMDFKSNSAVAWSNKSDFACANAFNNSIIPEDTFFPSSDVPCDVKLVEKSFETDTNLNFQNLSVIGFRILLLKVAGFNLLMTLRLWSSRAKRSGSGVKQTLNFDLLKLAGDVESNPGPSRGHMTEYKPTVRLATRDDVPRAVRTLAAAFADYPATRHTVDPDRHIERVTELQELFLTRVGLDIGKVWVADDGAAVAVWTTPESVEAGAVFAEIGPRMAELSGSRLAAQQQMEGLLAPHRPKEPAWFLATVGVSPDHQGKGLGSAVVLPGVEAAERAGVPAFLETSAPRNLPFYERLGFTVTADVEVPEGPRTWCMTRKPGA

SEQ ID NO: 15919 - protein, 763 aa, Artificial Sequence
  Synthetic Polypeptide
MALPVTALLLPLALLLHAARPEVQLLESGGGLVQPGGSLRLSCAASGFIFSSYAMSWVRQAPGKGQEWVSGVSGTGVNTYYADSVKGRFTISRDNSKNTLYLQMNSLRAEDTAVYYCASGKGWDSGSWYEDYRGQGTLVTVSSGTGGGGSGGGGSGGGGSEFDIQMTQSPSSLSASVGDRVTITCKASDHINNWLAWYQQKPGQAPKLLIYGATTLETGVPSRFSGSGSGTDYTLTISSLQPEDFATYYCQQSWNTPWTFGQGTKLEIKRLEDLKNVFPPEVAVFEPSEAEISHTQKATLVCLATGFYPDHVELSWWVNGKEVHSGVCTDPQPLKEQPALNDSRYCLSSRLRVSATFWQNPRNHFRCQVQFYGLSENDEWTQDRAKPVTQIVSAEAWGRADCGFTSESYQQGVLSATILYEILLGKATLYAVLVSALVLMAMVKRKDSRGRAKRSGSGATNFSLLKQAGDVEENPGPTSMDWIWRILFLVGAATGAHSFEQVQLQQPGAELVKPGASVKMSCKASGYAFSSYWINWMKQKPGQGLEWIGQIYPGDGDTNYNGKFKGRATLTADTSSSTAYMQLSSLTSEDSAVYFCARSITTVVGCAMDYWGQGTSVTVSSTRIQNPDPAVYQLRDSKSSDKSVCLFTDFDSQTNVSQSKDSDVYITDKCVLDMRSMDFKSNSAVAWSNKSDFACANAFNNSIIPEDTFFPSPESSCDVKLVEKSFETDTNLNFQNLSVIGFRILLLKVAGFNLLMTLRLWSS

SEQ ID NO: 15920 - protein, 988 aa, Artificial Sequence
  Synthetic Polypeptide
MALPVTALLLPLALLLHAARPEVQLLESGGGLVQPGGSLRLSCAASGFIFSSYAMSWVRQAPGKGQEWVSGVSGTGVNTYYADSVKGRFTISRDNSKNTLYLQMNSLRAEDTAVYYCASGKGWDSGSWYEDYRGQGTLVTVSSGTGGGGSGGGGSGGGGSEFDIQMTQSPSSLSASVGDRVTITCKASDHINNWLAWYQQKPGQAPKLLIYGATTLETGVPSRFSGSGSGTDYTLTISSLQPEDFATYYCQQSWNTPWTFGQGTKLEIKRLEDLKNVFPPEVAVFEPSEAEISHTQKATLVCLATGFYPDHVELSWWVNGKEVHSGVCTDPQPLKEQPALNDSRYCLSSRLRVSATFWQNPRNHFRCQVQFYGLSENDEWTQDRAKPVTQIVSAEAWGRADCGFTSESYQQGVLSATILYEILLGKATLYAVLVSALVLMAMVKRKDSRGRAKRSGSGATNFSLLKQAGDVEENPGPTSMDWIWRILFLVGAATGAHSFEQVQLQQPGAELVKPGASVKMSCKASGYAFSSYWINWMKQKPGQGLEWIGQIYPGDGDTNYNGKFKGRATLTADTSSSTAYMQLSSLTSEDSAVYFCARSITTVVGCAMDYWGQGTSVTVSSTRIQNPDPAVYQLRDSKSSDKSVCLFTDFDSQTNVSQSKDSDVYITDKCVLDMRSMDFKSNSAVAWSNKSDFACANAFNNSIIPEDTFFPSPESSCDVKLVEKSFETDTNLNFQNLSVIGFRILLLKVAGFNLLMTLRLWSSRAKRSGSGVKQTLNFDLLKLAGDVESNPGPSRGGIHTMATYEVLCEVARKLGTDDREVVLFLLNVFIPQPTLAQLIGALRALKEEGRLTFPLLAECLFRAGRRDLLRDLLHLDPRFLERHLAGTMSYFSPYQLTVLHVDGELCARDIRSLIFLSKDTIGSRSTPQTFLHWVYCMENLDLLGPTDVDALMSMLRSLSRVDLQRQVQTLMGLHLSGPSHSQHYRHTP

SEQ ID NO: 15921 - protein, 767 aa, Artificial Sequence
  Synthetic Polypeptide
MALPVTALLLPLALLLHAARPEVQLLESGGGLVQPGGSLRLSCAASGFIFSSYAMSWVRQAPGKGQEWVSGVSGTGVNTYYADSVKGRFTISRDNSKNTLYLQMNSLRAEDTAVYYCASGKGWDSGSWYEDYRGQGTLVTVSSGTGGGGSGGGGSGGGGSEFDIQMTQSPSSLSASVGDRVTITCKASDHINNWLAWYQQKPGQAPKLLIYGATTLETGVPSRFSGSGSGTDYTLTISSLQPEDFATYYCQQSWNTPWTFGQGTKLEIKRLEIQNPDPAVYQLRDSKSSDKSVCLFTDFDSQTNVSQSKDSDVYITDKCVLDMRSMDFKSNSAVAWSNKSDFACANAFNNSIIPEDTFFPSPESSCDVKLVEKSFETDTNLNFQNLSVIGFRILLLKVAGFNLLMTLRLWSSRAKRSGSGVKQTLNFDLLKLAGDVESNPGPTSMDWIWRILFLVGAATGAHSFEQVQLQQPGAELVKPGASVKMSCKASGYAFSSYWINWMKQKPGQGLEWIGQIYPGDGDTNYNGKFKGRATLTADTSSSTAYMQLSSLTSEDSAVYFCARSITTVVGCAMDYWGQGTSVTVSSTREDLKNVFPPEVAVFEPSEAEISHTQKATLVCLATGFYPDHVELSWWVNGKEVHSGVCTDPQPLKEQPALNDSRYCLSSRLRVSATFWQNPRNHFRCQVQFYGLSENDEWTQDRAKPVTQIVSAEAWGRADCGFTSESYQQGVLSATILYEILLGKATLYAVLVSALVLMAMVKRKDSRG

SEQ ID NO: 15922 - protein, 989 aa, Artificial Sequence
  Synthetic Polypeptide
MALPVTALLLPLALLLHAARPEVQLLESGGGLVQPGGSLRLSCAASGFIFSSYAMSWVRQAPGKGQEWVSGVSGTGVNTYYADSVKGRFTISRDNSKNTLYLQMNSLRAEDTAVYYCASGKGWDSGSWYEDYRGQGTLVTVSSGTGGGGSGGGGSGGGGSEFDIQMTQSPSSLSASVGDRVTITCKASDHINNWLAWYQQKPGQAPKLLIYGATTLETGVPSRFSGSGSGTDYTLTISSLQPEDFATYYCQQSWNTPWTFGQGTKLEIKRLEIQNPDPAVYQLRDSKSSDKSVCLFTDFDSQTNVSQSKDSDVYITDKCVLDMRSMDFKSNSAVAWSNKSDFACANAFNNSIIPEDTFFPSPESSCDVKLVEKSFETDTNLNFQNLSVIGFRILLLKVAGFNLLMTLRLWSSRAKRSGSGVKQTLNFDLLKLAGDVESNPGPTSMDWIWRILFLVGAATGAHSFEQVQLQQPGAELVKPGASVKMSCKASGYAFSSYWINWMKQKPGQGLEWIGQIYPGDGDTNYNGKFKGRATLTADTSSSTAYMQLSSLTSEDSAVYFCARSITTVVGCAMDYWGQGTSVTVSSTREDLKNVFPPEVAVFEPSEAEISHTQKATLVCLATGFYPDHVELSWWVNGKEVHSGVCTDPQPLKEQPALNDSRYCLSSRLRVSATFWQNPRNHFRCQVQFYGLSENDEWTQDRAKPVTQIVSAEAWGRADCGFTSESYQQGVLSATILYEILLGKATLYAVLVSALVLMAMVKRKDSRGRAKRSGSGATNFSLLKQAGDVEENPGPSRGGIHTMATYEVLCEVARKLGTDDREVVLFLLNVFIPQPTLAQLIGALRALKEEGRLTFPLLAECLFRAGRRDLLRDLLHLDPRFLERHLAGTMSYFSPYQLTVLHVDGELCARDIRSLIFLSKDTIGSRSTPQTFLHWVYCMENLDLLGPTDVDALMSMLRSLSRVDLQRQVQTLMGLHLSGPSHSQHYRHTP

SEQ ID NO: 15923 - protein, 1041 aa, Artificial Sequence
  Synthetic Polypeptide
MALPVTALLLPLALLLHAARPLEGKPIPNPLLGLDSTGSGEDLKNVFPPEVAVFEPSKAEIAHTQKATLVCLATGFYPDHVELSWWVNGKEVHSGVCTDPQPLKEQPALNDSRYCLSSRLRVSATFWQNPRNHFRCQVQFYGLSENDEWTQDRAKPVTQIVSAEAWGRADCGITSASYHQGVLSATILYEILLGKATLYAVLVSALVLMAMVKRKDSRGRAKRSGSGATNFSLLKQAGDVEENPGPTSMALPVTALLLPLALLLHAARPEVQLLESGGGLVQPGGSLRLSCAASGFIFSSYAMSWVRQAPGKGQEWVSGVSGTGVNTYYADSVKGRFTISRDNSKNTLYLQMNSLRAEDTAVYYCASGKGWDSGSWYEDYRGQGTLVTVSSGTGGGGSGGGGSGGGGSEFDIQMTQSPSSLSASVGDRVTITCKASDHINNWLAWYQQKPGQAPKLLIYGATTLETGVPSRFSGSGSGTDYTLTISSLQPEDFATYYCQQSWNTPWTFGQGTKLEIKRGGGGSGGGGSGGGGSQVQLQQPGAELVKPGASVKMSCKASGYAFSSYWINWMKQKPGQGLEWIGQIYPGDGDTNYNGKFKGRATLTADTSSSTAYMQLSSLTSEDSAVYFCARSITTVVGCAMDYWGQGTSVTVSSTREQKLISEEDGSGIQNPDPAVYQLRDSKSSDKSVCLFTDFDSQTNVSQSKDSDVYITDKCVLDMRSMDFKSNSAVAWSNKSDFACANAFNNSIIPEDTFFPSSDVPCDVKLVEKSFETDTNLNFQNLSVIGFRILLLKVAGFNLLMTLRLWSSRAKRSGSGVKQTLNFDLLKLAGDVESNPGPSRGHMTEYKPTVRLATRDDVPRAVRTLAAAFADYPATRHTVDPDRHIERVTELQELFLTRVGLDIGKVWVADDGAAVAVWTTPESVEAGAVFAEIGPRMAELSGSRLAAQQQMEGLLAPHRPKEPAWFLATVGVSPDHQGKGLGSAVVLPGVEAAERAGVPAFLETSAPRNLPFYERLGFTVTADVEVPEGPRTWCMTRKPGA

SEQ ID NO: 15924 - protein, 1042 aa, Artificial Sequence
  Synthetic Polypeptide
MALPVTALLLPLALLLHAARPLEQKLISEEDLGSGDRPDPAVYQLRDSKSSDKSVCLFTDFDSQTNVSQSKDSDVYITDKCVLDMRSMDFKSNSAVAWSNKSDFACANAFNNSIIPEDTFFPSPESSCDVKLVEKSFETDTNLNFQNLSVIGFRILLLKVAGFNLLMTLRLWSSSSRAKRSGSGVKQTLNFDLLKLAGDVESNPGPTSMALPVTALLLPLALLLHAARPEVQLLESGGGLVQPGGSLRLSCAASGFIFSSYAMSWVRQAPGKGQEWVSGVSGTGVNTYYADSVKGRFTISRDNSKNTLYLQMNSLRAEDTAVYYCASGKGWDSGSWYEDYRGQGTLVTVSSGTGGGGSGGGGSGGGGSEFDIQMTQSPSSLSASVGDRVTITCKASDHINNWLAWYQQKPGQAPKLLIYGATTLETGVPSRFSGSGSGTDYTLTISSLQPEDFATYYCQQSWNTPWTFGQGTKLEIKRGGGGSGGGGSGGGGSQVQLQQPGAELVKPGASVKMSCKASGYAFSSYWINWMKQKPGQGLEWIGQIYPGDGDTNYNGKFKGRATLTADTSSSTAYMQLSSLTSEDSAVYFCARSITTVVGCAMDYWGQGTSVTVSSTRGKPIPNPLLGLDSTGSGEDLKNVFPPEVAVFEPSEAEISHTQKATLVCLATGFYPDHVELSWWVNGKEVHSGVCTDPQPLKEQPALNDSRYCLSSRLRVSATFWQNPRNHFRCQVQFYGLSENDEWTQDRAKPVTQIVSAEAWGRADCGFTSESYQQGVLSATILYEILLGKATLYAVLVSALVLMAMVKRKDSRGRAKRSGSGATNFSLLKQAGDVEENPGPSRGHMTEYKPTVRLATRDDVPRAVRTLAAAFADYPATRHTVDPDRHIERVTELQELFLTRVGLDIGKVWVADDGAAVAVWTTPESVEAGAVFAEIGPRMAELSGSRLAAQQQMEGLLAPHRPKEPAWFLATVGVSPDHQGKGLGSAVVLPGVEAAERAGVPAFLETSAPRNLPFYERLGFTVTADVEVPEGPRTWCMTRKPGA

SEQ ID NO: 15925 - protein, 996 aa, Artificial Sequence
  Synthetic Polypeptide
MALPVTALLLPLALLLHAARPEVQLLESGGGLVQPGGSLRLSCAASGFIFSSYAMSWVRQAPGKGQEWVSGVSGTGVNTYYADSVKGRFTISRDNSKNTLYLQMNSLRAEDTAVYYCASGKGWDSGSWYEDYRGQGTLVTVSSGTGGGGSGGGGSGGGGSEFDIQMTQSPSSLSASVGDRVTITCKASDHINNWLAWYQQKPGQAPKLLIYGATTLETGVPSRFSGSGSGTDYTLTISSLQPEDFATYYCQQSWNTPWTFGQGTKLEIKRLEDLKNVFPPEVAVFEPSEAEISHTQKATLVCLATGFYPDHVELSWWVNGKEVHSGVSTDPQPLKEQPALNDSRYCLSSRLRVSATFWQNPRNHFRCQVQFYGLSENDEWTQDRAKPVTQIVSAEAWGRADCGFTSESYQQGVLSATILYEILLGKATLYAVLVSALVLMAMVKRKDSRGRAKRSGSGATNFSLLKQAGDVEENPGPTSMDWIWRILFLVGAATGAHSFEQVQLQQPGAELVKPGASVKMSCKASGYAFSSYWINWMKQKPGQGLEWIGQIYPGDGDTNYNGKFKGRATLTADTSSSTAYMQLSSLTSEDSAVYFCARSITTVVGCAMDYWGQGTSVTVSSTRIQNPDPAVYQLRDSKSSDKSVCLFTDFDSQTNVSQSKDSDVYITDKTVLDMRSMDFKSNSAVAWSNKSDFACANAFNNSIIPEDTFFPSPESSCDVKLVEKSFETDTNLNFQNLSVIGFRILLLKVAGFNLLMTLRLWSSRAKRSGSGVKQTLNFDLLKLAGDVESNPGPSRGHMTEYKPTVRLATRDDVPRAVRTLAAAFADYPATRHTVDPDRHIERVTELQELFLTRVGLDIGKVWVADDGAAVAVWTTPESVEAGAVFAEIGPRMAELSGSRLAAQQQMEGLLAPHRPKEPAWFLATVGVSPDHQGKGLGSAVVLPGVEAAERAGVPAFLETSAPRNLPFYERLGFTVTADVEVPEGPRTWCMTRKPGA

SEQ ID NO: 15926 - protein, 1078 aa, Artificial Sequence
  Synthetic Polypeptide
MALPVTALLLPLALLLHAARPEVQLLESGGGLVQPGGSLRLSCAASGFIFSSYAMSWVRQAPGKGQEWVSGVSGTGVNTYYADSVKGRFTISRDNSKNTLYLQMNSLRAEDTAVYYCASGKGWDSGSWYEDYRGQGTLVTVSSGTGGGGSGGGGSGGGGSEFDIQMTQSPSSLSASVGDRVTITCKASDHINNWLAWYQQKPGQAPKLLIYGATTLETGVPSRFSGSGSGTDYTLTISSLQPEDFATYYCQQSWNTPWTFGQGTKLEIKRLEDLKNVFPPEVAVFEPSEAEISHTQKATLVCLATGFYPDHVELSWWVNGKEVHSGVSTDPQPLKEQPALNDSRYCLSSRLRVSATFWQNPRNHFRCQVQFYGLSENDEWTQDRAKPVTQIVSAEAWGRADCGFTSESYQQGVLSATILYEILLGKATLYAVLVSALVLMAMVKRKDSRGRAKRSGSGATNFSLLKQAGDVEENPGPTSMDWIWRILFLVGAATGAHSFEQVQLQQPGAELVKPGASVKMSCKASGYAFSSYWINWMKQKPGQGLEWIGQIYPGDGDTNYNGKFKGRATLTADTSSSTAYMQLSSLTSEDSAVYFCARSITTVVGCAMDYWGQGTSVTVSSTREQKLISEEDGSGTPFPSLAPPIMLLVDGKQQMVVVCLVLDVAPPGLDSPIWFSAGNGSALDAFTYGPSPATDGTWTNLAHLSLPSEELASWEPLVCHTGPGAEGHSRSTQPMHLSGEASTARTCPQEPLRGTPGGALWLGVLRLLLFKLLLFDLLLTCSCLCDPAGPLPSPATTTRLRALGSHRLHPATETGGREATSSPRPQPRDRRWGDTPPGRKPGSPVRAKRSGSGVKQTLNFDLLKLAGDVESNPGPSRGHMTEYKPTVRLATRDDVPRAVRTLAAAFADYPATRHTVDPDRHIERVTELQELFLTRVGLDIGKVWVADDGAAVAVWTTPESVEAGAVFAEIGPRMAELSGSRLAAQQQMEGLLAPHRPKEPAWFLATVGVSPDHQGKGLGSAVVLPGVEAAERAGVPAFLETSAPRNLPFYERLGFTVTADVEVPEGPRTWCMTRKPGA

SEQ ID NO: 15927 - protein, 1096 aa, Artificial Sequence
  Synthetic Polypeptide
MALPVTALLLPLALLLHAARPLEDLKNVFPPEVAVFEPSEAEISHTQKATLVCLATGFYPDHVELSWWVNGKEVHSGVSTDPQPLKEQPALNDSRYCLSSRLRVSATFWQNPRNHFRCQVQFYGLSENDEWTQDRAKPVTQIVSAEAWGRADCGFTSESYQQGVLSATILYEILLGKATLYAVLVSALVLMAMVKRKDSRGRAKRSGSGATNFSLLKQAGDVEENPGPTSMALPVTALLLPLALLLHAARPEVQLLESGGGLVQPGGSLRLSCAASGFIFSSYAMSWVRQAPGKGQEWVSGVSGTGVNTYYADSVKGRFTISRDNSKNTLYLQMNSLRAEDTAVYYCASGKGWDSGSWYEDYRGQGTLVTVSSGTGGGGSGGGGSGGGGSEFDIQMTQSPSSLSASVGDRVTITCKASDHINNWLAWYQQKPGQAPKLLIYGATTLETGVPSRFSGSGSGTDYTLTISSLQPEDFATYYCQQSWNTPWTFGQGTKLEIKRGGGGSGGGGSGGGGSQVQLQQPGAELVKPGASVKMSCKASGYAFSSYWINWMKQKPGQGLEWIGQIYPGDGDTNYNGKFKGRATLTADTSSSTAYMQLSSLTSEDSAVYFCARSITTVVGCAMDYWGQGTSVTVSSTREQKLISEEDLGSGTPFPSLAPPIMLLVDGKQQMVVVCLVLDVAPPGLDSPIWFSAGNGSALDAFTYGPSPATDGTWTNLAHLSLPSEELASWEPLVCHTGPGAEGHSRSTQPMHLSGEASTARTCPQEPLRGTPGGALWLGVLRLLLFKLLLFDLLLTCSCLCDPAGPLPSPATTTRLRALGSHRLHPATETGGREATSSPRPQPRDRRWGDTPPGRKPGSPVRAKRSGSGVKQTLNFDLLKLAGDVESNPGPSRSRGHMTEYKPTVRLATRDDVPRAVRTLAAAFADYPATRHTVDPDRHIERVTELQELFLTRVGLDIGKVWVADDGAAVAVWTTPESVEAGAVFAEIGPRMAELSGSRLAAQQQMEGLLAPHRPKEPAWFLATVGVSPDHQGKGLGSAVVLPGVEAAERAGVPAFLETSAPRNLPFYERLGFTVTADVEVPEGPRTWCMTRKPGA

SEQ ID NO: 15928 - protein, 1033 aa, Artificial Sequence
  Synthetic Polypeptide
MALPVTALLLPLALLLHAARPEVQLLESGGGLVQPGGSLRLSCAASGFIFSSYAMSWVRQAPGKGQEWVSGVSGTGVNTYYADSVKGRFTISRDNSKNTLYLQMNSLRAEDTAVYYCASGKGWDSGSWYEDYRGQGTLVTVSSGTGGGGSGGGGSGGGGSEFDIQMTQSPSSLSASVGDRVTITCKASDHINNWLAWYQQKPGQAPKLLIYGATTLETGVPSRFSGSGSGTDYTLTISSLQPEDFATYYCQQSWNTPWTFGQGTKLEIKRLEGKPIPNPLLGLDSTGSGDKQLDADVSPKPTIFLPSIAETKLQKAGTYLCLLEKFFPDVIKIHWQEKKSNTILGSQEGNTMKTNDTYMKFSWLTVPEKSLDKEHRCIVRHENNKNGVDQEIIFPPIKTDVITMDPKDNCSKDANDTLLLQLTNTSAYYMYLLLLLKSVVYFAIITCCLLRRTAFCCNGEKSRAKRSGSGATNFSLLKQAGDVEENPGPTSMDWIWRILFLVGAATGAHSFEQVQLQQPGAELVKPGASVKMSCKASGYAFSSYWINWMKQKPGQGLEWIGQIYPGDGDTNYNGKFKGRATLTADTSSSTAYMQLSSLTSEDSAVYFCARSITTVVGCAMDYWGQGTSVTVSSTREQKLISEEDGSGSQPHTKPSVFVMKNGTNVACLVKEFYPKDIRINLVSSKKITEFDPAIVISPSGKYNAVKLGKYEDSNSVTCSVQHDNKTVHSTDFEVKTDSTDHVKPKETENTKQPSKSCHKPKAIVHTEKVNMMSLTVLGLRMLFAKTVAVNFLLTAKLFFLRAKRSGSGVKQTLNFDLLKLAGDVESNPGPSRGHMTEYKPTVRLATRDDVPRAVRTLAAAFADYPATRHTVDPDRHIERVTELQELFLTRVGLDIGKVWVADDGAAVAVWTTPESVEAGAVFAEIGPRMAELSGSRLAAQQQMEGLLAPHRPKEPAWFLATVGVSPDHQGKGLGSAVVLPGVEAAERAGVPAFLETSAPRNLPFYERLGFTVTADVEVPEGPRTWCMTRKPGA

SEQ ID NO: 15929 - protein, 771 aa, Artificial Sequence
  Synthetic Polypeptide
MALPVTALLLPLALLLHAARPEVQLLESGGGLVQPGGSLRLSCAASGFIFSSYAMSWVRQAPGKGQEWVSGVSGTGVNTYYADSVKGRFTISRDNSKNTLYLQMNSLRAEDTAVYYCASGKGWDSGSWYEDYRGQGTLVTVSSGTGGGGSGGGGSGGGGSEFDIQMTQSPSSLSASVGDRVTITCKASDHINNWLAWYQQKPGQAPKLLIYGATTLETGVPSRFSGSGSGTDYTLTISSLQPEDFATYYCQQSWNTPWTFGQGTKLEIKRLESQPHTKPSVFVMKNGTNVACLVKEFYPKDIRINLVSSKKITEFDPAIVISPSGKYNAVKLGKYEDSNSVTCSVQHDNKTVHSTDFEVKTDSTDHVKPKETENTKQPSKSCHKPKAIVHTEKVNMMSLTVLGLRMLFAKTVAVNFLLTAKLFFLRAKRSGSGATNFSLLKQAGDVEENPGPTSMDWIWRILFLVGAATGAHSFEQVQLQQPGAELVKPGASVKMSCKASGYAFSSYWINWMKQKPGQGLEWIGQIYPGDGDTNYNGKFKGRATLTADTSSSTAYMQLSSLTSEDSAVYFCARSITTVVGCAMDYWGQGTSVTVSSTRDKQLDADVSPKPTIFLPSIAETKLQKAGTYLCLLEKFFPDVIKIHWQEKKSNTILGSQEGNTMKTNDTYMKFSWLTVPEKSLDKEHRCIVRHENNKNGVDQEIIFPPIKTDVITMDPKDNCSKDANDTLLLQLTNTSAYYMYLLLLLKSVVYFAIITCCLLRRTAFCCNGEKS

SEQ ID NO: 15930 - protein, 1048 aa, Artificial Sequence
  Synthetic Polypeptide
MALPVTALLLPLALLLHAARPLEGKPIPNPLLGLDSTGSGDKQLDADVSPKPTIFLPSIAETKLQKAGTYLCLLEKFFPDVIKIHWQEKKSNTILGSQEGNTMKTNDTYMKFSWLTVPEKSLDKEHRCIVRHENNKNGVDQEIIFPPIKTDVITMDPKDNCSKDANDTLLLQLTNTSAYYMYLLLLLKSVVYFAIITCCLLRRTAFCCNGEKSRAKRSGSGATNFSLLKQAGDVEENPGPTSMALPVTALLLPLALLLHAARPEVQLLESGGGLVQPGGSLRLSCAASGFIFSSYAMSWVRQAPGKGQEWVSGVSGTGVNTYYADSVKGRFTISRDNSKNTLYLQMNSLRAEDTAVYYCASGKGWDSGSWYEDYRGQGTLVTVSSGTGGGGSGGGGSGGGGSEFDIQMTQSPSSLSASVGDRVTITCKASDHINNWLAWYQQKPGQAPKLLIYGATTLETGVPSRFSGSGSGTDYTLTISSLQPEDFATYYCQQSWNTPWTFGQGTKLEIKRGGGGSGGGGSGGGGSQVQLQQPGAELVKPGASVKMSCKASGYAFSSYWINWMKQKPGQGLEWIGQIYPGDGDTNYNGKFKGRATLTADTSSSTAYMQLSSLTSEDSAVYFCARSITTVVGCAMDYWGQGTSVTVSSTREQKLISEEDGSGSQPHTKPSVFVMKNGTNVACLVKEFYPKDIRINLVSSKKITEFDPAIVISPSGKYNAVKLGKYEDSNSVTCSVQHDNKTVHSTDFEVKTDSTDHVKPKETENTKQPSKSCHKPKAIVHTEKVNMMSLTVLGLRMLFAKTVAVNFLLTAKLFFLRAKRSGSGVKQTLNFDLLKLAGDVESNPGPSRGHMTEYKPTVRLATRDDVPRAVRTLAAAFADYPATRHTVDPDRHIERVTELQELFLTRVGLDIGKVWVADDGAAVAVWTTPESVEAGAVFAEIGPRMAELSGSRLAAQQQMEGLLAPHRPKEPAWFLATVGVSPDHQGKGLGSAVVLPGVEAAERAGVPAFLETSAPRNLPFYERLGFTVTADVEVPEGPRTWCMTRKPGA

SEQ ID NO: 15931 - protein, 1173 aa, Artificial Sequence
  Synthetic Polypeptide
MALPVTALLLPLALLLHAARPEVQLLESGGGLVQPGGSLRLSCAASGFIFSSYAMSWVRQAPGKGQEWVSGVSGTGVNTYYADSVKGRFTISRDNSKNTLYLQMNSLRAEDTAVYYCASGKGWDSGSWYEDYRGQGTLVTVSSGTGGGGSGGGGSGGGGSEFDIQMTQSPSSLSASVGDRVTITCKASDHINNWLAWYQQKPGQAPKLLIYGATTLETGVPSRFSGSGSGTDYTLTISSLQPEDFATYYCQQSWNTPWTFGQGTKLEIKRGQPKANPTVTLFPPSSEELQANKATLVCLISDFYPGAVTVAWKADGSPVKAGVETTKPSKQSNNKYAASSYLSLTPEQWKSHRSYSCQVTHEGSTVEKTVAPTECSGSQSFGLLDPKLCYLLDGILFIYGVILTALFLRVKFSRSADAPAYQQGQNQLYNELNLGRREEYDVLDKRRGRDPEMGGKPQRRKNPQEGLYNELQKDKMAEAYSEIGMKGERRRGKGHDGLYQGLSTATKDTYDALHMQALPPRRAKRSGSGATNFSLLKQAGDVEENPGPTSMDWIWRILFLVGAATGAHSFEQVQLQQPGAELVKPGASVKMSCKASGYAFSSYWINWMKQKPGQGLEWIGQIYPGDGDTNYNGKFKGRATLTADTSSSTAYMQLSSLTSEDSAVYFCARSITTVVGCAMDYWGQGTSVTVSSASTKGPSVFPLAPSSKSTSGGTAALGCLVKDYFPEPVTVSWNSGALTSGVHTFPAVLQSSGLYSLSSVVTVPSSSLGTQTYICNVNHKPSNTKVDKRVEPKSCGTQSFGLLDPKLCYLLDGILFIYGVILTALFLRVKFSRSADAPAYQQGQNQLYNELNLGRREEYDVLDKRRGRDPEMGGKPQRRKNPQEGLYNELQKDKMAEAYSEIGMKGERRRGKGHDGLYQGLSTATKDTYDALHMQALPPRRAKRSGSGVKQTLNFDLLKLAGDVESNPGPSRGHMTEYKPTVRLATRDDVPRAVRTLAAAFADYPATRHTVDPDRHIERVTELQELFLTRVGLDIGKVWVADDGAAVAVWTTPESVEAGAVFAEIGPRMAELSGSRLAAQQQMEGLLAPHRPKEPAWFLATVGVSPDHQGKGLGSAVVLPGVEAAERAGVPAFLETSAPRNLPFYERLGFTVTADVEVPEGPRTWCMTRKPGA

SEQ ID NO: 15932 - protein, 959 aa, Artificial Sequence
  Synthetic Polypeptide
MALPVTALLLPLALLLHAARPEVQLLESGGGLVQPGGSLRLSCAASGFIFSSYAMSWVRQAPGKGQEWVSGVSGTGVNTYYADSVKGRFTISRDNSKNTLYLQMNSLRAEDTAVYYCASGKGWDSGSWYEDYRGQGTLVTVSSGTGGGGSGGGGSGGGGSEFDIQMTQSPSSLSASVGDRVTITCKASDHINNWLAWYQQKPGQAPKLLIYGATTLETGVPSRFSGSGSGTDYTLTISSLQPEDFATYYCQQSWNTPWTFGQGTKLEIKRLEDLKNVFPPEVAVFEPSEAEISHTQKATLVCLATGFYPDHVELSWWVNGKEVHSGVSTDPQPLKEQPALNDSRYCLSSRLRVSATFWQNPRNHFRCQVQFYGLSENDEWTQDRAKPVTQIVSAEAWGRADCGSQSFGLLDPKLCYLLDGILFIYGVILTALFLRVKFSRSADAPAYQQGQNQLYNELNLGRREEYDVLDKRRGRDPEMGGKPQRRKNPQEGLYNELQKDKMAEAYSEIGMKGERRRGKGHDGLYQGLSTATKDTYDALHMQALPPRRAKRSGSGATNFSLLKQAGDVEENPGPTSMDWIWRILFLVGAATGAHSFEQVQLQQPGAELVKPGASVKMSCKASGYAFSSYWINWMKQKPGQGLEWIGQIYPGDGDTNYNGKFKGRATLTADTSSSTAYMQLSSLTSEDSAVYFCARSITTVVGCAMDYWGQGTSVTVSSTRIQNPDPAVYQLRDSKSSDKSVCLFTDFDSQTNVSQSKDSDVYITDKTVLDMRSMDFKSNSAVAWSNKSDFACANAFNNSIIPEDTFFPSPESSCGTQSFGLLDPKLCYLLDGILFIYGVILTALFLRVKFSRSADAPAYQQGQNQLYNELNLGRREEYDVLDKRRGRDPEMGGKPQRRKNPQEGLYNELQKDKMAEAYSEIGMKGERRRGKGHDGLYQGLSTATKDTYDALHMQALPPR

SEQ ID NO: 15933 - protein, 959 aa, Artificial Sequence
  Synthetic Polypeptide
MALPVTALLLPLALLLHAARPEVQLLESGGGLVQPGGSLRLSCAASGFIFSSYAMSWVRQAPGKGQEWVSGVSGTGVNTYYADSVKGRFTISRDNSKNTLYLQMNSLRAEDTAVYYCASGKGWDSGSWYEDYRGQGTLVTVSSGTGGGGSGGGGSGGGGSEFDIQMTQSPSSLSASVGDRVTITCKASDHINNWLAWYQQKPGQAPKLLIYGATTLETGVPSRFSGSGSGTDYTLTISSLQPEDFATYYCQQSWNTPWTFGQGTKLEIKRLEDLKNVFPPEVAVFEPSKAEIAHTQKATLVCLATGFYPDHVELSWWVNGKEVHSGVCTDPQPLKEQPALNDSRYCLSSRLRVSATFWQNPRNHFRCQVQFYGLSENDEWTQDRAKPVTQIVSAEAWGRADCGSQSFGLLDPKLCYLLDGILFIYGVILTALFLRVKFSRSADAPAYQQGQNQLYNELNLGRREEYDVLDKRRGRDPEMGGKPQRRKNPQEGLYNELQKDKMAEAYSEIGMKGERRRGKGHDGLYQGLSTATKDTYDALHMQALPPRRAKRSGSGATNFSLLKQAGDVEENPGPTSMDWIWRILFLVGAATGAHSFEQVQLQQPGAELVKPGASVKMSCKASGYAFSSYWINWMKQKPGQGLEWIGQIYPGDGDTNYNGKFKGRATLTADTSSSTAYMQLSSLTSEDSAVYFCARSITTVVGCAMDYWGQGTSVTVSSTRIQNPDPAVYQLRDSKSSDKSVCLFTDFDSQTNVSQSKDSDVYITDKCVLDMRSMDFKSNSAVAWSNKSDFACANAFNNSIIPEDTFFPSSDVPCGTQSFGLLDPKLCYLLDGILFIYGVILTALFLRVKFSRSADAPAYQQGQNQLYNELNLGRREEYDVLDKRRGRDPEMGGKPQRRKNPQEGLYNELQKDKMAEAYSEIGMKGERRRGKGHDGLYQGLSTATKDTYDALHMQALPPR

SEQ ID NO: 15934 - protein, 1030 aa, Artificial Sequence
  Synthetic Polypeptide
MALPVTALLLPLALLLHAARPEVQLLESGGGLVQPGGSLRLSCAASGFIFSSYAMSWVRQAPGKGQEWVSGVSGTGVNTYYADSVKGRFTISRDNSKNTLYLQMNSLRAEDTAVYYCASGKGWDSGSWYEDYRGQGTLVTVSSGTGGGGSGGGGSGGGGSEFDIQMTQSPSSLSASVGDRVTITCKASDHINNWLAWYQQKPGQAPKLLIYGATTLETGVPSRFSGSGSGTDYTLTISSLQPEDFATYYCQQSWNTPWTFGQGTKLEIKRLEGKPIPNPLLGLDSTGSGEDLKNVFPPEVAVFEPSEAEISHTQKATLVCLATGFYPDHVELSWWVNGKEVHSGVSTDPQPLKEQPALNDSRYCLSSRLRVSATFWQNPRNHFRCQVQFYGLSENDEWTQDRAKPVTQIVSAEAWGRADCGSQSFGLLDPKLCYLLDGILFIYGVILTALFLRVKFSRSADAPAYQQGQNQLYNELNLGRREEYDVLDKRRGRDPEMGGKPQRRKNPQEGLYNELQKDKMAEAYSEIGMKGERRRGKGHDGLYQGLSTATKDTYDALHMQALPPRRAKRSGSGATNFSLLKQAGDVEENPGPTSMDWIWRILFLVGAATGAHSFEQVQLQQPGAELVKPGASVKMSCKASGYAFSSYWINWMKQKPGQGLEWIGQIYPGDGDTNYNGKFKGRATLTADTSSSTAYMQLSSLTSEDSAVYFCARSITTVVGCAMDYWGQGTSVTVSSTREQKLISEEDGSGIQNPDPAVYQLRDSKSSDKSVCLFTDFDSQTNVSQSKDSDVYITDKTVLDMRSMDFKSNSAVAWSNKSDFACANAFNNSIIPEDTFFPSPESSCGTQSFGLLDPKLCYLLDGILFIYGVILTALFLRSKRSRLLHSDYMNMTPRRPGPTRKHYQPYAPPRDFAAYRSRVKFSRSADAPAYQQGQNQLYNELNLGRREEYDVLDKRRGRDPEMGGKPQRRKNPQEGLYNELQKDKMAEAYSEIGMKGERRRGKGHDGLYQGLSTATKDTYDALHMQALPPR

SEQ ID NO: 15935 - protein, 1071 aa, Artificial Sequence
  Synthetic Polypeptide
MALPVTALLLPLALLLHAARPEVQLLESGGGLVQPGGSLRLSCAASGFIFSSYAMSWVRQAPGKGQEWVSGVSGTGVNTYYADSVKGRFTISRDNSKNTLYLQMNSLRAEDTAVYYCASGKGWDSGSWYEDYRGQGTLVTVSSGTGGGGSGGGGSGGGGSEFDIQMTQSPSSLSASVGDRVTITCKASDHINNWLAWYQQKPGQAPKLLIYGATTLETGVPSRFSGSGSGTDYTLTISSLQPEDFATYYCQQSWNTPWTFGQGTKLEIKRLEGKPIPNPLLGLDSTGSGEDLKNVFPPEVAVFEPSEAEISHTQKATLVCLATGFYPDHVELSWWVNGKEVHSGVSTDPQPLKEQPALNDSRYCLSSRLRVSATFWQNPRNHFRCQVQFYGLSENDEWTQDRAKPVTQIVSAEAWGRADCGSQSFGLLDPKLCYLLDGILFIYGVILTALFLRSKRSRLLHSDYMNMTPRRPGPTRKHYQPYAPPRDFAAYRSRVKFSRSADAPAYQQGQNQLYNELNLGRREEYDVLDKRRGRDPEMGGKPQRRKNPQEGLYNELQKDKMAEAYSEIGMKGERRRGKGHDGLYQGLSTATKDTYDALHMQALPPRRAKRSGSGATNFSLLKQAGDVEENPGPTSMDWIWRILFLVGAATGAHSFEQVQLQQPGAELVKPGASVKMSCKASGYAFSSYWINWMKQKPGQGLEWIGQIYPGDGDTNYNGKFKGRATLTADTSSSTAYMQLSSLTSEDSAVYFCARSITTVVGCAMDYWGQGTSVTVSSTREQKLISEEDGSGIQNPDPAVYQLRDSKSSDKSVCLFTDFDSQTNVSQSKDSDVYITDKTVLDMRSMDFKSNSAVAWSNKSDFACANAFNNSIIPEDTFFPSPESSCGTQSFGLLDPKLCYLLDGILFIYGVILTALFLRSKRSRLLHSDYMNMTPRRPGPTRKHYQPYAPPRDFAAYRSRVKFSRSADAPAYQQGQNQLYNELNLGRREEYDVLDKRRGRDPEMGGKPQRRKNPQEGLYNELQKDKMAEAYSEIGMKGERRRGKGHDGLYQGLSTATKDTYDALHMQALPPR

SEQ ID NO: 15936 - protein, 1032 aa, Artificial Sequence
  Synthetic Polypeptide
MALPVTALLLPLALLLHAARPEVQLLESGGGLVQPGGSLRLSCAASGFIFSSYAMSWVRQAPGKGQEWVSGVSGTGVNTYYADSVKGRFTISRDNSKNTLYLQMNSLRAEDTAVYYCASGKGWDSGSWYEDYRGQGTLVTVSSGTGGGGSGGGGSGGGGSEFDIQMTQSPSSLSASVGDRVTITCKASDHINNWLAWYQQKPGQAPKLLIYGATTLETGVPSRFSGSGSGTDYTLTISSLQPEDFATYYCQQSWNTPWTFGQGTKLEIKRLEGKPIPNPLLGLDSTGSGEDLKNVFPPEVAVFEPSEAEISHTQKATLVCLATGFYPDHVELSWWVNGKEVHSGVSTDPQPLKEQPALNDSRYCLSSRLRVSATFWQNPRNHFRCQVQFYGLSENDEWTQDRAKPVTQIVSAEAWGRADCGSQSFGLLDPKLCYLLDGILFIYGVILTALFLRVKFSRSADAPAYQQGQNQLYNELNLGRREEYDVLDKRRGRDPEMGGKPQRRKNPQEGLYNELQKDKMAEAYSEIGMKGERRRGKGHDGLYQGLSTATKDTYDALHMQALPPRRAKRSGSGATNFSLLKQAGDVEENPGPTSMDWIWRILFLVGAATGAHSFEQVQLQQPGAELVKPGASVKMSCKASGYAFSSYWINWMKQKPGQGLEWIGQIYPGDGDTNYNGKFKGRATLTADTSSSTAYMQLSSLTSEDSAVYFCARSITTVVGCAMDYWGQGTSVTVSSTREQKLISEEDLGSGIQNPDPAVYQLRDSKSSDKSVCLFTDFDSQTNVSQSKDSDVYITDKTVLDMRSMDFKSNSAVAWSNKSDFACANAFNNSIIPEDTFFPSPESSCGTQSFGLLDPKLCYLLDGILFIYGVILTALFLKRGRKKLLYIFKQPFMRPVQTTQEEDGCSCRFPEEEEGGCELRVKFSRSADAPAYQQGQNQLYNELNLGRREEYDVLDKRRGRDPEMGGKPQRRKNPQEGLYNELQKDKMAEAYSEIGMKGERRRGKGHDGLYQGLSTATKDTYDALHMQALPPR

SEQ ID NO: 15937 - protein, 1074 aa, Artificial Sequence
  Synthetic Polypeptide
MALPVTALLLPLALLLHAARPEVQLLESGGGLVQPGGSLRLSCAASGFIFSSYAMSWVRQAPGKGQEWVSGVSGTGVNTYYADSVKGRFTISRDNSKNTLYLQMNSLRAEDTAVYYCASGKGWDSGSWYEDYRGQGTLVTVSSGTGGGGSGGGGSGGGGSEFDIQMTQSPSSLSASVGDRVTITCKASDHINNWLAWYQQKPGQAPKLLIYGATTLETGVPSRFSGSGSGTDYTLTISSLQPEDFATYYCQQSWNTPWTFGQGTKLEIKRLEGKPIPNPLLGLDSTGSGEDLKNVFPPEVAVFEPSEAEISHTQKATLVCLATGFYPDHVELSWWVNGKEVHSGVSTDPQPLKEQPALNDSRYCLSSRLRVSATFWQNPRNHFRCQVQFYGLSENDEWTQDRAKPVTQIVSAEAWGRADCGSQSFGLLDPKLCYLLDGILFIYGVILTALFLKRGRKKLLYIFKQPFMRPVQTTQEEDGCSCRFPEEEEGGCELRVKFSRSADAPAYQQGQNQLYNELNLGRREEYDVLDKRRGRDPEMGGKPQRRKNPQEGLYNELQKDKMAEAYSEIGMKGERRRGKGHDGLYQGLSTATKDTYDALHMQALPPRRAKRSGSGATNFSLLKQAGDVEENPGPTSMDWIWRILFLVGAATGAHSFEQVQLQQPGAELVKPGASVKMSCKASGYAFSSYWINWMKQKPGQGLEWIGQIYPGDGDTNYNGKFKGRATLTADTSSSTAYMQLSSLTSEDSAVYFCARSITTVVGCAMDYWGQGTSVTVSSTREQKLISEEDLGSGIQNPDPAVYQLRDSKSSDKSVCLFTDFDSQTNVSQSKDSDVYITDKTVLDMRSMDFKSNSAVAWSNKSDFACANAFNNSIIPEDTFFPSPESSCGTQSFGLLDPKLCYLLDGILFIYGVILTALFLKRGRKKLLYIFKQPFMRPVQTTQEEDGCSCRFPEEEEGGCELRVKFSRSADAPAYQQGQNQLYNELNLGRREEYDVLDKRRGRDPEMGGKPQRRKNPQEGLYNELQKDKMAEAYSEIGMKGERRRGKGHDGLYQGLSTATKDTYDALHMQALPPR

SEQ ID NO: 15938 - protein, 964 aa, Artificial Sequence
  Synthetic Polypeptide
MALPVTALLLPLALLLHAARPEVQLLESGGGLVQPGGSLRLSCAASGFIFSSYAMSWVRQAPGKGQEWVSGVSGTGVNTYYADSVKGRFTISRDNSKNTLYLQMNSLRAEDTAVYYCASGKGWDSGSWYEDYRGQGTLVTVSSGTGGGGSGGGGSGGGGSEFDIQMTQSPSSLSASVGDRVTITCKASDHINNWLAWYQQKPGQAPKLLIYGATTLETGVPSRFSGSGSGTDYTLTISSLQPEDFATYYCQQSWNTPWTFGQGTKLEIKRLEQSFGLLDPKLCYLLDGILFIYGVILTALFLRVKFSRSADAPAYQQGQNQLYNELNLGRREEYDVLDKRRGRDPEMGGKPQRRKNPQEGLYNELQKDKMAEAYSEIGMKGERRRGKGHDGLYQGLSTATKDTYDALHMQALPPRRAKRSGSGATNFSLLKQAGDVEENPGPTSMDWIWRILFLVGAATGAHSFEQVQLQQPGAELVKPGASVKMSCKASGYAFSSYWINWMKQKPGQGLEWIGQIYPGDGDTNYNGKFKGRATLTADTSSSTAYMQLSSLTSEDSAVYFCARSITTVVGCAMDYWGQGTSVTVSSTRQSFGLLDPKLCYLLDGILFIYGVILTALFLRVKFSRSADAPAYQQGQNQLYNELNLGRREEYDVLDKRRGRDPEMGGKPQRRKNPQEGLYNELQKDKMAEAYSEIGMKGERRRGKGHDGLYQGLSTATKDTYDALHMQALPPRRAKRSGSGVKQTLNFDLLKLAGDVESNPGPSRGHMTEYKPTVRLATRDDVPRAVRTLAAAFADYPATRHTVDPDRHIERVTELQELFLTRVGLDIGKVWVADDGAAVAVWTTPESVEAGAVFAEIGPRMAELSGSRLAAQQQMEGLLAPHRPKEPAWFLATVGVSPDHQGKGLGSAVVLPGVEAAERAGVPAFLETSAPRNLPFYERLGFTVTADVEVPEGPRTWCMTRKPGA

SEQ ID NO: 15939 - protein, 789 aa, Artificial Sequence
  Synthetic Polypeptide
MALPVTALLLPLALLLHAARPEVQLLESGGGLVQPGGSLRLSCAASGFIFSSYAMSWVRQAPGKGQEWVSGVSGTGVNTYYADSVKGRFTISRDNSKNTLYLQMNSLRAEDTAVYYCASGKGWDSGSWYEDYRGQGTLVTVSSGTGGGGSGGGGSGGGGSEFDIQMTQSPSSLSASVGDRVTITCKASDHINNWLAWYQQKPGQAPKLLIYGATTLETGVPSRFSGSGSGTDYTLTISSLQPEDFATYYCQQSWNTPWTFGQGTKLEIKRLEGQPKANPTVTLFPPSSEELQANKATLVCLISDFYPGAVTVAWKADGSPVKAGVETTKPSKQSNNKYAASSYLSLTPEQWKSHRSYSCQVTHEGSTVEKTVAPTECSPIKTDVITMDPKDNCSKDANDTLLLQLTNTSAYYMYLLLLLKSVVYFAIITCCLLRRTAFCCNGEKSRAKRSGSGATNFSLLKQAGDVEENPGPTSMDWIWRILFLVGAATGAHSFEQVQLQQPGAELVKPGASVKMSCKASGYAFSSYWINWMKQKPGQGLEWIGQIYPGDGDTNYNGKFKGRATLTADTSSSTAYMQLSSLTSEDSAVYFCARSITTVVGCAMDYWGQGTSVTVSSTRASTKGPSVFPLAPSSKSTSGGTAALGCLVKDYFPEPVTVSWNSGALTSGVHTFPAVLQSSGLYSLSSVVTVPSSSLGTQTYICNVNHKPSNTKVDKRVEPKSCEVKTDSTDHVKPKETENTKQPSKSCHKPKAIVHTEKVNMMSLTVLGLRMLFAKTVAVNFLLTAKLFFL

SEQ ID NO: 15940 - protein, 767 aa, Artificial Sequence
  Synthetic Polypeptide
MALPVTALLLPLALLLHAARPEVQLLESGGGLVQPGGSLRLSCAASGFIFSSYAMSWVRQAPGKGQEWVSGVSGTGVNTYYADSVKGRFTISRDNSKNTLYLQMNSLRAEDTAVYYCASGKGWDSGSWYEDYRGQGTLVTVSSGTGGGGSGGGGSGGGGSEFDIQMTQSPSSLSASVGDRVTITCKASDHINNWLAWYQQKPGQAPKLLIYGATTLETGVPSRFSGSGSGTDYTLTISSLQPEDFATYYCQQSWNTPWTFGQGTKLEIKRLEGQPKANPTVTLFPPSSEELQANKATLVCLISDFYPGAVTVAWKADGSPVKAGVETTKPSKQSNNKYAASSYLSLTPEQWKSHRSYSCQVTHEGSTVEKTVAPTECSGRADCGITSASYHQGVLSATILYEILLGKATLYAVLVSALVLMAMVKRKDSRGRAKRSGSGATNFSLLKQAGDVEENPGPTSMDWIWRILFLVGAATGAHSFEQVQLQQPGAELVKPGASVKMSCKASGYAFSSYWINWMKQKPGQGLEWIGQIYPGDGDTNYNGKFKGRATLTADTSSSTAYMQLSSLTSEDSAVYFCARSITTVVGCAMDYWGQGTSVTVSSTRASTKGPSVFPLAPSSKSTSGGTAALGCLVKDYFPEPVTVSWNSGALTSGVHTFPAVLQSSGLYSLSSVVTVPSSSLGTQTYICNVNHKPSNTKVDKRVEPKSCIPEDTFFPSSDVPCDVKLVEKSFETDTNLNFQNLSVIGFRILLLKVAGFNLLMTLRLWSS

SEQ ID NO: 15941 - protein, 767 aa, Artificial Sequence
  Synthetic Polypeptide
MALPVTALLLPLALLLHAARPEVQLLESGGGLVQPGGSLRLSCAASGFIFSSYAMSWVRQAPGKGQEWVSGVSGTGVNTYYADSVKGRFTISRDNSKNTLYLQMNSLRAEDTAVYYCASGKGWDSGSWYEDYRGQGTLVTVSSGTGGGGSGGGGSGGGGSEFDIQMTQSPSSLSASVGDRVTITCKASDHINNWLAWYQQKPGQAPKLLIYGATTLETGVPSRFSGSGSGTDYTLTISSLQPEDFATYYCQQSWNTPWTFGQGTKLEIKRLEGQPKANPTVTLFPPSSEELQANKATLVCLISDFYPGAVTVAWKADGSPVKAGVETTKPSKQSNNKYAASSYLSLTPEQWKSHRSYSCQVTHEGSTVEKTVAPTECSGRADCGFTSESYQQGVLSATILYEILLGKATLYAVLVSALVLMAMVKRKDSRGRAKRSGSGATNFSLLKQAGDVEENPGPTSMDWIWRILFLVGAATGAHSFEQVQLQQPGAELVKPGASVKMSCKASGYAFSSYWINWMKQKPGQGLEWIGQIYPGDGDTNYNGKFKGRATLTADTSSSTAYMQLSSLTSEDSAVYFCARSITTVVGCAMDYWGQGTSVTVSSTRASTKGPSVFPLAPSSKSTSGGTAALGCLVKDYFPEPVTVSWNSGALTSGVHTFPAVLQSSGLYSLSSVVTVPSSSLGTQTYICNVNHKPSNTKVDKRVEPKSCIPEDTFFPSPESSCDVKLVEKSFETDTNLNFQNLSVIGFRILLLKVAGFNLLMTLRLWSS

SEQ ID NO: 15942 - protein, 593 aa, Artificial Sequence
  Synthetic Polypeptide
MALPVTALLLPLALLLHAARPEVQLLESGGGLVQPGGSLRLSCAASGFIFSSYAMSWVRQAPGKGQEWVSGVSGTGVNTYYADSVKGRFTISRDNSKNTLYLQMNSLRAEDTAVYYCASGKGWDSGSWYEDYRGQGTLVTVSSGTGGGGSGGGGSGGGGSEFDIQMTQSPSSLSASVGDRVTITCKASDHINNWLAWYQQKPGQAPKLLIYGATTLETGVPSRFSGSGSGTDYTLTISSLQPEDFATYYCQQSWNTPWTFGQGTKLEIKRGGGGSGGGGSGGGGSQVQLQQPGAELVKPGASVKMSCKASGYAFSSYWINWMKQKPGQGLEWIGQIYPGDGDTNYNGKFKGRATLTADTSSSTAYMQLSSLTSEDSAVYFCARSITTVVGCAMDYWGQGTSVTVSSTRDGNEEMGGITQTPYKVSISGTTVILTCPQYPGSEILWQHNDKNIGGDEDDKNIGSDEDHLSLKEFSELEQSGYYVCYPRGSKPEDANFYLYLRARVCENCMEMDVMSVATIVIVDICITGGLLLLVYYWSKNRKAKAKPVTRGAGAGGRQRGQNKERPPPVPNPDYEPIRKGQRDLYSGLNQRRI

SEQ ID NO: 15943 - protein, 558 aa, Artificial Sequence
  Synthetic Polypeptide
MALPVTALLLPLALLLHAARPEVQLLESGGGLVQPGGSLRLSCAASGFIFSSYAMSWVRQAPGKGQEWVSGVSGTGVNTYYADSVKGRFTISRDNSKNTLYLQMNSLRAEDTAVYYCASGKGWDSGSWYEDYRGQGTLVTVSSGTGGGGSGGGGSGGGGSEFDIQMTQSPSSLSASVGDRVTITCKASDHINNWLAWYQQKPGQAPKLLIYGATTLETGVPSRFSGSGSGTDYTLTISSLQPEDFATYYCQQSWNTPWTFGQGTKLEIKRGGGGSGGGGSGGGGSQVQLQQPGAELVKPGASVKMSCKASGYAFSSYWINWMKQKPGQGLEWIGQIYPGDGDTNYNGKFKGRATLTADTSSSTAYMQLSSLTSEDSAVYFCARSITTVVGCAMDYWGQGTSVTVSSTRFKIPIEELEDRVFVNCNTSITWVEGTVGTLLSDITRLDLGKRILDPRGIYRCNGTDIYKDKESTVQVHYRMCQSCVELDPATVAGIIVTDVIATLLLALGVFCFAGHETGRLSGAADTQALLRNDQVYQPLRDRDDAQYSHLGGNWARNK

SEQ ID NO: 15944 - protein, 568 aa, Artificial Sequence
  Synthetic Polypeptide
MALPVTALLLPLALLLHAARPEVQLLESGGGLVQPGGSLRLSCAASGFIFSSYAMSWVRQAPGKGQEWVSGVSGTGVNTYYADSVKGRFTISRDNSKNTLYLQMNSLRAEDTAVYYCASGKGWDSGSWYEDYRGQGTLVTVSSGTGGGGSGGGGSGGGGSEFDIQMTQSPSSLSASVGDRVTITCKASDHINNWLAWYQQKPGQAPKLLIYGATTLETGVPSRFSGSGSGTDYTLTISSLQPEDFATYYCQQSWNTPWTFGQGTKLEIKRGGGGSGGGGSGGGGSQVQLQQPGAELVKPGASVKMSCKASGYAFSSYWINWMKQKPGQGLEWIGQIYPGDGDTNYNGKFKGRATLTADTSSSTAYMQLSSLTSEDSAVYFCARSITTVVGCAMDYWGQGTSVTVSSTRQSIKGNHLVKVYDYQEDGSVLLTCDAEAKNITWFKDGKMIGFLTEDKKKWNLGSNAKDPRGMYQCKGSQNKSKPLQVYYRMCQNCIELNAATISGFLFAEIVSIFVLAVGVYFIAGQDGVRQSRASDKQTLLPNDQLYQPLKDREDDQYSHLQGNQLRRN

SEQ ID NO: 15945 - protein, 551 aa, Artificial Sequence
  Synthetic Polypeptide
MALPVTALLLPLALLLHAARPEVQLLESGGGLVQPGGSLRLSCAASGFIFSSYAMSWVRQAPGKGQEWVSGVSGTGVNTYYADSVKGRFTISRDNSKNTLYLQMNSLRAEDTAVYYCASGKGWDSGSWYEDYRGQGTLVTVSSGTGGGGSGGGGSGGGGSEFDIQMTQSPSSLSASVGDRVTITCKASDHINNWLAWYQQKPGQAPKLLIYGATTLETGVPSRFSGSGSGTDYTLTISSLQPEDFATYYCQQSWNTPWTFGQGTKLEIKRGGGGSGGGGSGGGGSQVQLQQPGAELVKPGASVKMSCKASGYAFSSYWINWMKQKPGQGLEWIGQIYPGDGDTNYNGKFKGRATLTADTSSSTAYMQLSSLTSEDSAVYFCARSITTVVGCAMDYWGQGTSVTVSSTRQSFGLLDPKLCYLLDGILFIYGVILTALFLRVKFSRSADAPAYQQGQNQLYNELNLGRREEYDVLDKRRGRDPEMGGKPQRRKNPQEGLYNELQKDKMAEAYSEIGMKGERRRGKGHDGLYQGLSTATKDTYDALHMQALPPR

SEQ ID NO: 15946 - protein, 784 aa, Artificial Sequence
  Synthetic Polypeptide
MALPVTALLLPLALLLHAARPEVQLLESGGGLVQPGGSLRLSCAASGFIFSSYAMSWVRQAPGKGQEWVSGVSGTGVNTYYADSVKGRFTISRDNSKNTLYLQMNSLRAEDTAVYYCASGKGWDSGSWYEDYRGQGTLVTVSSGTGGGGSGGGGSGGGGSEFDIQMTQSPSSLSASVGDRVTITCKASDHINNWLAWYQQKPGQAPKLLIYGATTLETGVPSRFSGSGSGTDYTLTISSLQPEDFATYYCQQSWNTPWTFGQGTKLEIKRGGGGSGGGGSGGGGSQVQLQQPGAELVKPGASVKMSCKASGYAFSSYWINWMKQKPGQGLEWIGQIYPGDGDTNYNGKFKGRATLTADTSSSTAYMQLSSLTSEDSAVYFCARSITTVVGCAMDYWGQGTSVTVSSTRGSGIQNPDPAVYQLRDSKSSDKSVCLFTDFDSQTNVSQSKDSDVYITDKTVLDMRSMDFKSNSAVAWSNKSDFACANAFNNSIIPEDTFFPSPESSCDVKLVEKSFETDTNLNFQNLSVIGFRILLLKVAGFNLLMTLRLWSSRAKRSGSGVKQTLNFDLLKLAGDVESNPGPSRGHMTEYKPTVRLATRDDVPRAVRTLAAAFADYPATRHTVDPDRHIERVTELQELFLTRVGLDIGKVWVADDGAAVAVWTTPESVEAGAVFAEIGPRMAELSGSRLAAQQQMEGLLAPHRPKEPAWFLATVGVSPDHQGKGLGSAVVLPGVEAAERAGVPAFLETSAPRNLPFYERLGFTVTADVEVPEGPRTWCMTRKPGA

SEQ ID NO: 15947 - protein, 816 aa, Artificial Sequence
  Synthetic Polypeptide
MALPVTALLLPLALLLHAARPEVQLLESGGGLVQPGGSLRLSCAASGFIFSSYAMSWVRQAPGKGQEWVSGVSGTGVNTYYADSVKGRFTISRDNSKNTLYLQMNSLRAEDTAVYYCASGKGWDSGSWYEDYRGQGTLVTVSSGTGGGGSGGGGSGGGGSEFDIQMTQSPSSLSASVGDRVTITCKASDHINNWLAWYQQKPGQAPKLLIYGATTLETGVPSRFSGSGSGTDYTLTISSLQPEDFATYYCQQSWNTPWTFGQGTKLEIKRGGGGSGGGGSGGGGSQVQLQQPGAELVKPGASVKMSCKASGYAFSSYWINWMKQKPGQGLEWIGQIYPGDGDTNYNGKFKGRATLTADTSSSTAYMQLSSLTSEDSAVYFCARSITTVVGCAMDYWGQGTSVTVSSLEDLKNVFPPEVAVFEPSEAEISHTQKATLVCLATGFYPDHVELSWWVNGKEVHSGVSTDPQPLKEQPALNDSRYCLSSRLRVSATFWQNPRNHFRCQVQFYGLSENDEWTQDRAKPVTQIVSAEAWGRADCGFTSESYQQGVLSATILYEILLGKATLYAVLVSALVLMAMVKRKDSRGRAKRSGSGATNFSLLKQAGDVEENPGPTRGHMTEYKPTVRLATRDDVPRAVRTLAAAFADYPATRHTVDPDRHIERVTELQELFLTRVGLDIGKVWVADDGAAVAVWTTPESVEAGAVFAEIGPRMAELSGSRLAAQQQMEGLLAPHRPKEPAWFLATVGVSPDHQGKGLGSAVVLPGVEAAERAGVPAFLETSAPRNLPFYERLGFTVTADVEVPEGPRTWCMTRKPGA

SEQ ID NO: 15948 - protein, 866 aa, Artificial Sequence
  Synthetic Polypeptide
MALPVTALLLPLALLLHAARPEVQLLESGGGLVQPGGSLRLSCAASGFIFSSYAMSWVRQAPGKGQEWVSGVSGTGVNTYYADSVKGRFTISRDNSKNTLYLQMNSLRAEDTAVYYCASGKGWDSGSWYEDYRGQGTLVTVSSGTGGGGSGGGGSGGGGSEFDIQMTQSPSSLSASVGDRVTITCKASDHINNWLAWYQQKPGQAPKLLIYGATTLETGVPSRFSGSGSGTDYTLTISSLQPEDFATYYCQQSWNTPWTFGQGTKLEIKRGGGGSGGGGSGGGGSQVQLQQPGAELVKPGASVKMSCKASGYAFSSYWINWMKQKPGQGLEWIGQIYPGDGDTNYNGKFKGRATLTADTSSSTAYMQLSSLTSEDSAVYFCARSITTVVGCAMDYWGQGTSVTVSSTREQKLISEEDLGSGTPFPSLAPPIMLLVDGKQQMVVVCLVLDVAPPGLDSPIWFSAGNGSALDAFTYGPSPATDGTWTNLAHLSLPSEELASWEPLVCHTGPGAEGHSRSTQPMHLSGEASTARTCPQEPLRGTPGGALWLGVLRLLLFKLLLFDLLLTCSCLCDPAGPLPSPATTTRLRALGSHRLHPATETGGREATSSPRPQPRDRRWGDTPPGRKPGSPVRAKRSGSGVKQTLNFDLLKLAGDVESNPGPSRSRGHMTEYKPTVRLATRDDVPRAVRTLAAAFADYPATRHTVDPDRHIERVTELQELFLTRVGLDIGKVWVADDGAAVAVWTTPESVEAGAVFAEIGPRMAELSGSRLAAQQQMEGLLAPHRPKEPAWFLATVGVSPDHQGKGLGSAVVLPGVEAAERAGVPAFLETSAPRNLPFYERLGFTVTADVEVPEGPRTWCMTRKPGA

SEQ ID NO: 15949 - protein, 680 aa, Artificial Sequence
  Synthetic Polypeptide
MALPVTALLLPLALLLHAARPEVQLLESGGGLVQPGGSLRLSCAASGFIFSSYAMSWVRQAPGKGQEWVSGVSGTGVNTYYADSVKGRFTISRDNSKNTLYLQMNSLRAEDTAVYYCASGKGWDSGSWYEDYRGQGTLVTVSSGTGGGGSGGGGSGGGGSEFDIQMTQSPSSLSASVGDRVTITCKASDHINNWLAWYQQKPGQAPKLLIYGATTLETGVPSRFSGSGSGTDYTLTISSLQPEDFATYYCQQSWNTPWTFGQGTKLEIKRLEDLKNVFPPEVAVFEPSEAEISHTQKATLVCLATGFYPDHVELSWWVNGKEVHSGVSTDPQPLKEQPALNDSRYCLSSRLRVSATFWQNPRNHFRCQVQFYGLSENDEWTQDRAKPVTQIVSAEAWGRADCGFTSESYQQGVLSATILYEILLGKATLYAVLVSALVLMAMVKRKDSRGRAKRSGSGATNFSLLKQAGDVEENPGPTRGHMTEYKPTVRLATRDDVPRAVRTLAAAFADYPATRHTVDPDRHIERVTELQELFLTRVGLDIGKVWVADDGAAVAVWTTPESVEAGAVFAEIGPRMAELSGSRLAAQQQMEGLLAPHRPKEPAWFLATVGVSPDHQGKGLGSAVVLPGVEAAERAGVPAFLETSAPRNLPFYERLGFTVTADVEVPEGPRTWCMTRKPGA

SEQ ID NO: 15950 - protein, 450 aa, Artificial Sequence
  Synthetic Polypeptide
MALPVTALLLPLALLLHAARPEVQLLESGGGLVQPGGSLRLSCAASGFIFSSYAMSWVRQAPGKGQEWVSGVSGTGVNTYYADSVKGRFTISRDNSKNTLYLQMNSLRAEDTAVYYCASGKGWDSGSWYEDYRGQGTLVTVSSGTGGGGSGGGGSGGGGSEFDIQMTQSPSSLSASVGDRVTITCKASDHINNWLAWYQQKPGQAPKLLIYGATTLETGVPSRFSGSGSGTDYTLTISSLQPEDFATYYCQQSWNTPWTFGQGTKLEIKRLEDLKNVFPPEVAVFEPSEAEISHTQKATLVCLATGFYPDHVELSWWVNGKEVHSGVSTDPQPLKEQPALNDSRYCLSSRLRVSATFWQNPRNHFRCQVQFYGLSENDEWTQDRAKPVTQIVSAEAWGRADCGFTSESYQQGVLSATILYEILLGKATLYAVLVSALVLMAMVKRKDSRG

SEQ ID NO: 15951 - protein, 698 aa, Artificial Sequence
  Synthetic Polypeptide
MALPVTALLLPLALLLHAARPEVQLLESGGGLVQPGGSLRLSCAASGFIFSSYAMSWVRQAPGKGQEWVSGVSGTGVNTYYADSVKGRFTISRDNSKNTLYLQMNSLRAEDTAVYYCASGKGWDSGSWYEDYRGQGTLVTVSSGTGGGGSGGGGSGGGGSEFDIQMTQSPSSLSASVGDRVTITCKASDHINNWLAWYQQKPGQAPKLLIYGATTLETGVPSRFSGSGSGTDYTLTISSLQPEDFATYYCQQSWNTPWTFGQGTKLEIKRLEGKPIPNPLLGLDSTGSGEDLKNVFPPEVAVFEPSEAEISHTQKATLVCLATGFYPDHVELSWWVNGKEVHSGVCTDPQPLKEQPALNDSRYCLSSRLRVSATFWQNPRNHFRCQVQFYGLSENDEWTQDRAKPVTQIVSAEAWGRADCGFTSESYQQGVLSATILYEILLGKATLYAVLVSALVLMAMVKRKDSRGRAKRSGSGATNFSLLKQAGDVEENPGPTRGHMTEYKPTVRLATRDDVPRAVRTLAAAFADYPATRHTVDPDRHIERVTELQELFLTRVGLDIGKVWVADDGAAVAVWTTPESVEAGAVFAEIGPRMAELSGSRLAAQQQMEGLLAPHRPKEPAWFLATVGVSPDHQGKGLGSAVVLPGVEAAERAGVPAFLETSAPRNLPFYERLGFTVTADVEVPEGPRTWCMTRKPGA

SEQ ID NO: 15952 - protein, 468 aa, Artificial Sequence
  Synthetic Polypeptide
MALPVTALLLPLALLLHAARPEVQLLESGGGLVQPGGSLRLSCAASGFIFSSYAMSWVRQAPGKGQEWVSGVSGTGVNTYYADSVKGRFTISRDNSKNTLYLQMNSLRAEDTAVYYCASGKGWDSGSWYEDYRGQGTLVTVSSGTGGGGSGGGGSGGGGSEFDIQMTQSPSSLSASVGDRVTITCKASDHINNWLAWYQQKPGQAPKLLIYGATTLETGVPSRFSGSGSGTDYTLTISSLQPEDFATYYCQQSWNTPWTFGQGTKLEIKRLEGKPIPNPLLGLDSTGSGEDLKNVFPPEVAVFEPSEAEISHTQKATLVCLATGFYPDHVELSWWVNGKEVHSGVCTDPQPLKEQPALNDSRYCLSSRLRVSATFWQNPRNHFRCQVQFYGLSENDEWTQDRAKPVTQIVSAEAWGRADCGFTSESYQQGVLSATILYEILLGKATLYAVLVSALVLMAMVKRKDSRG

SEQ ID NO: 15953 - protein, 784 aa, Artificial Sequence
  Synthetic Polypeptide
MALPVTALLLPLALLLHAARPEVQLLESGGGLVQPGGSLRLSCAASGFIFSSYAMSWVRQAPGKGQEWVSGVSGTGVNTYYADSVKGRFTISRDNSKNTLYLQMNSLRAEDTAVYYCASGKGWDSGSWYEDYRGQGTLVTVSSGTGGGGSGGGGSGGGGSEFDIQMTQSPSSLSASVGDRVTITCKASDHINNWLAWYQQKPGQAPKLLIYGATTLETGVPSRFSGSGSGTDYTLTISSLQPEDFATYYCQQSWNTPWTFGQGTKLEIKRGGGGSGGGGSGGGGSQVQLQQPGAELVKPGASVKMSCKASGYAFSSYWINWMKQKPGQGLEWIGQIYPGDGDTNYNGKFKGRATLTADTSSSTAYMQLSSLTSEDSAVYFCARSITTVVGCAMDYWGQGTSVTVSSTRGSGIQNPDPAVYQLRDSKSSDKSVCLFTDFDSQTNVSQSKDSDVYITDKTVLDMRSMDFKSNSAVAWSNKSDFACANAFNNSIIPEDTFFPSSDVPCDVKLVEKSFETDTNLNFQNLSVIGFRILLLKVAGFNLLMTLRLWSSRAKRSGSGVKQTLNFDLLKLAGDVESNPGPSRGHMTEYKPTVRLATRDDVPRAVRTLAAAFADYPATRHTVDPDRHIERVTELQELFLTRVGLDIGKVWVADDGAAVAVWTTPESVEAGAVFAEIGPRMAELSGSRLAAQQQMEGLLAPHRPKEPAWFLATVGVSPDHQGKGLGSAVVLPGVEAAERAGVPAFLETSAPRNLPFYERLGFTVTADVEVPEGPRTWCMTRKPGA

SEQ ID NO: 15954 - protein, 816 aa, Artificial Sequence
  Synthetic Polypeptide
MALPVTALLLPLALLLHAARPEVQLLESGGGLVQPGGSLRLSCAASGFIFSSYAMSWVRQAPGKGQEWVSGVSGTGVNTYYADSVKGRFTISRDNSKNTLYLQMNSLRAEDTAVYYCASGKGWDSGSWYEDYRGQGTLVTVSSGTGGGGSGGGGSGGGGSEFDIQMTQSPSSLSASVGDRVTITCKASDHINNWLAWYQQKPGQAPKLLIYGATTLETGVPSRFSGSGSGTDYTLTISSLQPEDFATYYCQQSWNTPWTFGQGTKLEIKRGGGGSGGGGSGGGGSQVQLQQPGAELVKPGASVKMSCKASGYAFSSYWINWMKQKPGQGLEWIGQIYPGDGDTNYNGKFKGRATLTADTSSSTAYMQLSSLTSEDSAVYFCARSITTVVGCAMDYWGQGTSVTVSSLEDLKNVFPPEVAVFEPSKAEIAHTQKATLVCLATGFYPDHVELSWWVNGKEVHSGVSTDPQPLKEQPALNDSRYCLSSRLRVSATFWQNPRNHFRCQVQFYGLSENDEWTQDRAKPVTQIVSAEAWGRADCGITSASYHQGVLSATILYEILLGKATLYAVLVSALVLMAMVKRKDSRGRAKRSGSGATNFSLLKQAGDVEENPGPTRGHMTEYKPTVRLATRDDVPRAVRTLAAAFADYPATRHTVDPDRHIERVTELQELFLTRVGLDIGKVWVADDGAAVAVWTTPESVEAGAVFAEIGPRMAELSGSRLAAQQQMEGLLAPHRPKEPAWFLATVGVSPDHQGKGLGSAVVLPGVEAAERAGVPAFLETSAPRNLPFYERLGFTVTADVEVPEGPRTWCMTRKPGA

SEQ ID NO: 15955 - protein, 640 aa, Artificial Sequence; identical to SEQ ID NO: 14777
  Synthetic Polypeptide

SEQ ID NO: 15956 - protein, 993 aa, Artificial Sequence; identical to SEQ ID NO: 14778
  Synthetic Polypeptide

SEQ ID NO: 15957 - protein, 992 aa, Artificial Sequence; identical to SEQ ID NO: 14779
  Synthetic Polypeptide

SEQ ID NO: 15958 - protein, 992 aa, Artificial Sequence; identical to SEQ ID NO: 14780
  Synthetic Polypeptide

SEQ ID NO: 15959 - protein, 759 aa, Artificial Sequence; identical to SEQ ID NO: 14781
  Synthetic Polypeptide

SEQ ID NO: 15960 - protein, 984 aa, Artificial Sequence; identical to SEQ ID NO: 14782
  Synthetic Polypeptide

SEQ ID NO: 15961 - protein, 763 aa, Artificial Sequence; identical to SEQ ID NO: 14783
  Synthetic Polypeptide

SEQ ID NO: 15962 - protein, 985 aa, Artificial Sequence; identical to SEQ ID NO: 14784
  Synthetic Polypeptide

SEQ ID NO: 15963 - protein, 992 aa, Artificial Sequence; identical to SEQ ID NO: 14785
  Synthetic Polypeptide

SEQ ID NO: 15964 - protein, 1074 aa, Artificial Sequence; identical to SEQ ID NO: 14786
  Synthetic Polypeptide

SEQ ID NO: 15965 - protein, 1029 aa, Artificial Sequence; identical to SEQ ID NO: 14787
  Synthetic Polypeptide

SEQ ID NO: 15966 - protein, 767 aa, Artificial Sequence; identical to SEQ ID NO: 14788
  Synthetic Polypeptide

SEQ ID NO: 15967 - protein, 1169 aa, Artificial Sequence; identical to SEQ ID NO: 14789
  Synthetic Polypeptide

SEQ ID NO: 15968 - protein, 955 aa, Artificial Sequence; identical to SEQ ID NO: 14790
  Synthetic Polypeptide

SEQ ID NO: 15969 - protein, 955 aa, Artificial Sequence; identical to SEQ ID NO: 14791
  Synthetic Polypeptide

SEQ ID NO: 15970 - protein, 1026 aa, Artificial Sequence; identical to SEQ ID NO: 14792
  Synthetic Polypeptide

SEQ ID NO: 15971 - protein, 1067 aa, Artificial Sequence; identical to SEQ ID NO: 14793
  Synthetic Polypeptide

SEQ ID NO: 15972 - protein, 1028 aa, Artificial Sequence; identical to SEQ ID NO: 14794
  Synthetic Polypeptide

SEQ ID NO: 15973 - protein, 1070 aa, Artificial Sequence; identical to SEQ ID NO: 14795
  Synthetic Polypeptide

SEQ ID NO: 15974 - protein, 960 aa, Artificial Sequence; identical to SEQ ID NO: 14796
  Synthetic Polypeptide

SEQ ID NO: 15975 - protein, 785 aa, Artificial Sequence; identical to SEQ ID NO: 14797
  Synthetic Polypeptide

SEQ ID NO: 15976 - protein, 763 aa, Artificial Sequence; identical to SEQ ID NO: 14798
  Synthetic Polypeptide

SEQ ID NO: 15977 - protein, 763 aa, Artificial Sequence; identical to SEQ ID NO: 14799
  Synthetic Polypeptide

SEQ ID NO: 15978 - protein, 593 aa, Artificial Sequence; identical to SEQ ID NO: 14800
  Synthetic Polypeptide

SEQ ID NO: 15979 - protein, 558 aa, Artificial Sequence; identical to SEQ ID NO: 14801
  Synthetic Polypeptide

SEQ ID NO: 15980 - protein, 568 aa, Artificial Sequence; identical to SEQ ID NO: 14802
  Synthetic Polypeptide

SEQ ID NO: 15981 - protein, 551 aa, Artificial Sequence; identical to SEQ ID NO: 14803
  Synthetic Polypeptide

SEQ ID NO: 15982 - protein, 587 aa, Artificial Sequence; identical to SEQ ID NO: 14804
  Synthetic Polypeptide

SEQ ID NO: 15983 - protein, 421 aa, Artificial Sequence; identical to SEQ ID NO: 14805
  Synthetic Polypeptide

SEQ ID NO: 15984 - protein, 599 aa, Artificial Sequence; identical to SEQ ID NO: 14806
  Synthetic Polypeptide

SEQ ID NO: 15985 - protein, 433 aa, Artificial Sequence; identical to SEQ ID NO: 14807
  Synthetic Polypeptide

SEQ ID NO: 15986 - protein, 1134 aa, Artificial Sequence
  Synthetic Polypeptide
MALPVTALLLPLALLLHAARPEVQLLESGGGLVQPGGSLRLSCAASGFIFSSYAMSWVRQAPGKGQEWVSGVSGTGVNTYYADSVKGRFTISRDNSKNTLYLQMNSLRAEDTAVYYCASGKGWDSGSWYEDYRGQGTLVTVSSGTGGGGSGGGGSGGGGSEFDIQMTQSPSSLSASVGDRVTITCKASDHINNWLAWYQQKPGQAPKLLIYGATTLETGVPSRFSGSGSGTDYTLTISSLQPEDFATYYCQQSWNTPWTFGQGTKLEIKRLEIQNPDPAVYQLRDSKSSDKSVCLFTDFDSQTNVSQSKDSDVYITDKCVLDMRSMDFKSNSAVAWSNKSDFACANAFNNSIIPEDTFFPSSDVPCDVKLVEKSFETDTNLNFQNLSVIGFRILLLKVAGFNLLMTLRLWSSRAKRSGSGVKQTLNFDLLKLAGDVESNPGPTSMDWIWRILFLVGAATGAHSGPQVQLQESGGGLAQAGGSLRLSCAASGRTFSMGWFRQAPGKEREFVAAITYSGGSPYYASSVRGRFTISRDNAKNTVYLQMNSLKPEDTAVYYCAANPTYGSDWNAENWGQGTQVTVSSGSGGGGSGGGGSGGGGSFEQVQLQQPGAELVKPGASVKMSCKASGYAFSSYWINWMKQKPGQGLEWIGQIYPGDGDTNYNGKFKGRATLTADTSSSTAYMQLSSLTSEDSAVYFCARSITTVVGCAMDYWGQGTSVTVSSTREDLKNVFPPEVAVFEPSKAEIAHTQKATLVCLATGFYPDHVELSWWVNGKEVHSGVCTDPQPLKEQPALNDSRYCLSSRLRVSATFWQNPRNHFRCQVQFYGLSENDEWTQDRAKPVTQIVSAEAWGRADCGITSASYHQGVLSATILYEILLGKATLYAVLVSALVLMAMVKRKDSRGRAKRSGSGATNFSLLKQAGDVEENPGPSRGHMTEYKPTVRLATRDDVPRAVRTLAAAFADYPATRHTVDPDRHIERVTELQELFLTRVGLDIGKVWVADDGAAVAVWTTPESVEAGAVFAEIGPRMAELSGSRLAAQQQMEGLLAPHRPKEPAWFLATVGVSPDHQGKGLGSAVVLPGVEAAERAGVPAFLETSAPRNLPFYERLGFTVTADVEVPEGPRTWCMTRKPGA

SEQ ID NO: 15987 - protein, 1133 aa, Artificial Sequence
  Synthetic Polypeptide
MALPVTALLLPLALLLHAARPEVQLLESGGGLVQPGGSLRLSCAASGFIFSSYAMSWVRQAPGKGQEWVSGVSGTGVNTYYADSVKGRFTISRDNSKNTLYLQMNSLRAEDTAVYYCASGKGWDSGSWYEDYRGQGTLVTVSSGTGGGGSGGGGSGGGGSEFDIQMTQSPSSLSASVGDRVTITCKASDHINNWLAWYQQKPGQAPKLLIYGATTLETGVPSRFSGSGSGTDYTLTISSLQPEDFATYYCQQSWNTPWTFGQGTKLEIKRLEDLKNVFPPEVAVFEPSKAEIAHTQKATLVCLATGFYPDHVELSWWVNGKEVHSGVCTDPQPLKEQPALNDSRYCLSSRLRVSATFWQNPRNHFRCQVQFYGLSENDEWTQDRAKPVTQIVSAEAWGRADCGITSASYHQGVLSATILYEILLGKATLYAVLVSALVLMAMVKRKDSRGRAKRSGSGATNFSLLKQAGDVEENPGPTSMDWIWRILFLVGAATGAHSGPQVQLQESGGGLAQAGGSLRLSCAASGRTFSMGWFRQAPGKEREFVAAITYSGGSPYYASSVRGRFTISRDNAKNTVYLQMNSLKPEDTAVYYCAANPTYGSDWNAENWGQGTQVTVSSGSGGGGSGGGGSGGGGSFEQVQLQQPGAELVKPGASVKMSCKASGYAFSSYWINWMKQKPGQGLEWIGQIYPGDGDTNYNGKFKGRATLTADTSSSTAYMQLSSLTSEDSAVYFCARSITTVVGCAMDYWGQGTSVTVSSTRIQNPDPAVYQLRDSKSSDKSVCLFTDFDSQTNVSQSKDSDVYITDKCVLDMRSMDFKSNSAVAWSNKSDFACANAFNNSIIPEDTFFPSSDVPCDVKLVEKSFETDTNLNFQNLSVIGFRILLLKVAGFNLLMTLRLWSSRAKRSGSGVKQTLNFDLLKLAGDVESNPGPSRGHMTEYKPTVRLATRDDVPRAVRTLAAAFADYPATRHTVDPDRHIERVTELQELFLTRVGLDIGKVWVADDGAAVAVWTTPESVEAGAVFAEIGPRMAELSGSRLAAQQQMEGLLAPHRPKEPAWFLATVGVSPDHQGKGLGSAVVLPGVEAAERAGVPAFLETSAPRNLPFYERLGFTVTADVEVPEGPRTWCMTRKPGA

SEQ ID NO: 15988 - protein, 1133 aa, Artificial Sequence
  Synthetic Polypeptide
MALPVTALLLPLALLLHAARPEVQLLESGGGLVQPGGSLRLSCAASGFIFSSYAMSWVRQAPGKGQEWVSGVSGTGVNTYYADSVKGRFTISRDNSKNTLYLQMNSLRAEDTAVYYCASGKGWDSGSWYEDYRGQGTLVTVSSGTGGGGSGGGGSGGGGSEFDIQMTQSPSSLSASVGDRVTITCKASDHINNWLAWYQQKPGQAPKLLIYGATTLETGVPSRFSGSGSGTDYTLTISSLQPEDFATYYCQQSWNTPWTFGQGTKLEIKRLEDLKNVFPPEVAVFEPSEAEISHTQKATLVCLATGFYPDHVELSWWVNGKEVHSGVCTDPQPLKEQPALNDSRYCLSSRLRVSATFWQNPRNHFRCQVQFYGLSENDEWTQDRAKPVTQIVSAEAWGRADCGFTSESYQQGVLSATILYEILLGKATLYAVLVSALVLMAMVKRKDSRGRAKRSGSGATNFSLLKQAGDVEENPGPTSMDWIWRILFLVGAATGAHSGPQVQLQESGGGLAQAGGSLRLSCAASGRTFSMGWFRQAPGKEREFVAAITYSGGSPYYASSVRGRFTISRDNAKNTVYLQMNSLKPEDTAVYYCAANPTYGSDWNAENWGQGTQVTVSSGSGGGGSGGGGSGGGGSFEQVQLQQPGAELVKPGASVKMSCKASGYAFSSYWINWMKQKPGQGLEWIGQIYPGDGDTNYNGKFKGRATLTADTSSSTAYMQLSSLTSEDSAVYFCARSITTVVGCAMDYWGQGTSVTVSSTRIQNPDPAVYQLRDSKSSDKSVCLFTDFDSQTNVSQSKDSDVYITDKCVLDMRSMDFKSNSAVAWSNKSDFACANAFNNSIIPEDTFFPSPESSCDVKLVEKSFETDTNLNFQNLSVIGFRILLLKVAGFNLLMTLRLWSSRAKRSGSGVKQTLNFDLLKLAGDVESNPGPSRGHMTEYKPTVRLATRDDVPRAVRTLAAAFADYPATRHTVDPDRHIERVTELQELFLTRVGLDIGKVWVADDGAAVAVWTTPESVEAGAVFAEIGPRMAELSGSRLAAQQQMEGLLAPHRPKEPAWFLATVGVSPDHQGKGLGSAVVLPGVEAAERAGVPAFLETSAPRNLPFYERLGFTVTADVEVPEGPRTWCMTRKPGA

SEQ ID NO: 15989 - protein, 900 aa, Artificial Sequence
  Synthetic Polypeptide
MALPVTALLLPLALLLHAARPEVQLLESGGGLVQPGGSLRLSCAASGFIFSSYAMSWVRQAPGKGQEWVSGVSGTGVNTYYADSVKGRFTISRDNSKNTLYLQMNSLRAEDTAVYYCASGKGWDSGSWYEDYRGQGTLVTVSSGTGGGGSGGGGSGGGGSEFDIQMTQSPSSLSASVGDRVTITCKASDHINNWLAWYQQKPGQAPKLLIYGATTLETGVPSRFSGSGSGTDYTLTISSLQPEDFATYYCQQSWNTPWTFGQGTKLEIKRLEDLKNVFPPEVAVFEPSEAEISHTQKATLVCLATGFYPDHVELSWWVNGKEVHSGVCTDPQPLKEQPALNDSRYCLSSRLRVSATFWQNPRNHFRCQVQFYGLSENDEWTQDRAKPVTQIVSAEAWGRADCGFTSESYQQGVLSATILYEILLGKATLYAVLVSALVLMAMVKRKDSRGRAKRSGSGATNFSLLKQAGDVEENPGPTSMDWIWRILFLVGAATGAHSGPQVQLQESGGGLAQAGGSLRLSCAASGRTFSMGWFRQAPGKEREFVAAITYSGGSPYYASSVRGRFTISRDNAKNTVYLQMNSLKPEDTAVYYCAANPTYGSDWNAENWGQGTQVTVSSGSGGGGSGGGGSGGGGSFEQVQLQQPGAELVKPGASVKMSCKASGYAFSSYWINWMKQKPGQGLEWIGQIYPGDGDTNYNGKFKGRATLTADTSSSTAYMQLSSLTSEDSAVYFCARSITTVVGCAMDYWGQGTSVTVSSTRIQNPDPAVYQLRDSKSSDKSVCLFTDFDSQTNVSQSKDSDVYITDKCVLDMRSMDFKSNSAVAWSNKSDFACANAFNNSIIPEDTFFPSPESSCDVKLVEKSFETDTNLNFQNLSVIGFRILLLKVAGFNLLMTLRLWSS

SEQ ID NO: 15990 - protein, 1125 aa, Artificial Sequence
  Synthetic Polypeptide
MALPVTALLLPLALLLHAARPEVQLLESGGGLVQPGGSLRLSCAASGFIFSSYAMSWVRQAPGKGQEWVSGVSGTGVNTYYADSVKGRFTISRDNSKNTLYLQMNSLRAEDTAVYYCASGKGWDSGSWYEDYRGQGTLVTVSSGTGGGGSGGGGSGGGGSEFDIQMTQSPSSLSASVGDRVTITCKASDHINNWLAWYQQKPGQAPKLLIYGATTLETGVPSRFSGSGSGTDYTLTISSLQPEDFATYYCQQSWNTPWTFGQGTKLEIKRLEDLKNVFPPEVAVFEPSEAEISHTQKATLVCLATGFYPDHVELSWWVNGKEVHSGVCTDPQPLKEQPALNDSRYCLSSRLRVSATFWQNPRNHFRCQVQFYGLSENDEWTQDRAKPVTQIVSAEAWGRADCGFTSESYQQGVLSATILYEILLGKATLYAVLVSALVLMAMVKRKDSRGRAKRSGSGATNFSLLKQAGDVEENPGPTSMDWIWRILFLVGAATGAHSGPQVQLQESGGGLAQAGGSLRLSCAASGRTFSMGWFRQAPGKEREFVAAITYSGGSPYYASSVRGRFTISRDNAKNTVYLQMNSLKPEDTAVYYCAANPTYGSDWNAENWGQGTQVTVSSGSGGGGSGGGGSGGGGSFEQVQLQQPGAELVKPGASVKMSCKASGYAFSSYWINWMKQKPGQGLEWIGQIYPGDGDTNYNGKFKGRATLTADTSSSTAYMQLSSLTSEDSAVYFCARSITTVVGCAMDYWGQGTSVTVSSTRIQNPDPAVYQLRDSKSSDKSVCLFTDFDSQTNVSQSKDSDVYITDKCVLDMRSMDFKSNSAVAWSNKSDFACANAFNNSIIPEDTFFPSPESSCDVKLVEKSFETDTNLNFQNLSVIGFRILLLKVAGFNLLMTLRLWSSRAKRSGSGVKQTLNFDLLKLAGDVESNPGPSRGGIHTMATYEVLCEVARKLGTDDREVVLFLLNVFIPQPTLAQLIGALRALKEEGRLTFPLLAECLFRAGRRDLLRDLLHLDPRFLERHLAGTMSYFSPYQLTVLHVDGELCARDIRSLIFLSKDTIGSRSTPQTFLHWVYCMENLDLLGPTDVDALMSMLRSLSRVDLQRQVQTLMGLHLSGPSHSQHYRHTP

SEQ ID NO: 15991 - protein, 904 aa, Artificial Sequence
  Synthetic Polypeptide
MALPVTALLLPLALLLHAARPEVQLLESGGGLVQPGGSLRLSCAASGFIFSSYAMSWVRQAPGKGQEWVSGVSGTGVNTYYADSVKGRFTISRDNSKNTLYLQMNSLRAEDTAVYYCASGKGWDSGSWYEDYRGQGTLVTVSSGTGGGGSGGGGSGGGGSEFDIQMTQSPSSLSASVGDRVTITCKASDHINNWLAWYQQKPGQAPKLLIYGATTLETGVPSRFSGSGSGTDYTLTISSLQPEDFATYYCQQSWNTPWTFGQGTKLEIKRLEIQNPDPAVYQLRDSKSSDKSVCLFTDFDSQTNVSQSKDSDVYITDKCVLDMRSMDFKSNSAVAWSNKSDFACANAFNNSIIPEDTFFPSPESSCDVKLVEKSFETDTNLNFQNLSVIGFRILLLKVAGFNLLMTLRLWSSRAKRSGSGVKQTLNFDLLKLAGDVESNPGPTSMDWIWRILFLVGAATGAHSGPQVQLQESGGGLAQAGGSLRLSCAASGRTFSMGWFRQAPGKEREFVAAITYSGGSPYYASSVRGRFTISRDNAKNTVYLQMNSLKPEDTAVYYCAANPTYGSDWNAENWGQGTQVTVSSGSGGGGSGGGGSGGGGSFEQVQLQQPGAELVKPGASVKMSCKASGYAFSSYWINWMKQKPGQGLEWIGQIYPGDGDTNYNGKFKGRATLTADTSSSTAYMQLSSLTSEDSAVYFCARSITTVVGCAMDYWGQGTSVTVSSTREDLKNVFPPEVAVFEPSEAEISHTQKATLVCLATGFYPDHVELSWWVNGKEVHSGVCTDPQPLKEQPALNDSRYCLSSRLRVSATFWQNPRNHFRCQVQFYGLSENDEWTQDRAKPVTQIVSAEAWGRADCGFTSESYQQGVLSATILYEILLGKATLYAVLVSALVLMAMVKRKDSRG

SEQ ID NO: 15992 - protein, 1126 aa, Artificial Sequence
  Synthetic Polypeptide
MALPVTALLLPLALLLHAARPEVQLLESGGGLVQPGGSLRLSCAASGFIFSSYAMSWVRQAPGKGQEWVSGVSGTGVNTYYADSVKGRFTISRDNSKNTLYLQMNSLRAEDTAVYYCASGKGWDSGSWYEDYRGQGTLVTVSSGTGGGGSGGGGSGGGGSEFDIQMTQSPSSLSASVGDRVTITCKASDHINNWLAWYQQKPGQAPKLLIYGATTLETGVPSRFSGSGSGTDYTLTISSLQPEDFATYYCQQSWNTPWTFGQGTKLEIKRLEIQNPDPAVYQLRDSKSSDKSVCLFTDFDSQTNVSQSKDSDVYITDKCVLDMRSMDFKSNSAVAWSNKSDFACANAFNNSIIPEDTFFPSPESSCDVKLVEKSFETDTNLNFQNLSVIGFRILLLKVAGFNLLMTLRLWSSRAKRSGSGVKQTLNFDLLKLAGDVESNPGPTSMDWIWRILFLVGAATGAHSGPQVQLQESGGGLAQAGGSLRLSCAASGRTFSMGWFRQAPGKEREFVAAITYSGGSPYYASSVRGRFTISRDNAKNTVYLQMNSLKPEDTAVYYCAANPTYGSDWNAENWGQGTQVTVSSGSGGGGSGGGGSGGGGSFEQVQLQQPGAELVKPGASVKMSCKASGYAFSSYWINWMKQKPGQGLEWIGQIYPGDGDTNYNGKFKGRATLTADTSSSTAYMQLSSLTSEDSAVYFCARSITTVVGCAMDYWGQGTSVTVSSTREDLKNVFPPEVAVFEPSEAEISHTQKATLVCLATGFYPDHVELSWWVNGKEVHSGVCTDPQPLKEQPALNDSRYCLSSRLRVSATFWQNPRNHFRCQVQFYGLSENDEWTQDRAKPVTQIVSAEAWGRADCGFTSESYQQGVLSATILYEILLGKATLYAVLVSALVLMAMVKRKDSRGRAKRSGSGATNFSLLKQAGDVEENPGPSRGGIHTMATYEVLCEVARKLGTDDREVVLFLLNVFIPQPTLAQLIGALRALKEEGRLTFPLLAECLFRAGRRDLLRDLLHLDPRFLERHLAGTMSYFSPYQLTVLHVDGELCARDIRSLIFLSKDTIGSRSTPQTFLHWVYCMENLDLLGPTDVDALMSMLRSLSRVDLQRQVQTLMGLHLSGPSHSQHYRHTP

SEQ ID NO: 15993 - protein, 1133 aa, Artificial Sequence
  Synthetic Polypeptide
MALPVTALLLPLALLLHAARPEVQLLESGGGLVQPGGSLRLSCAASGFIFSSYAMSWVRQAPGKGQEWVSGVSGTGVNTYYADSVKGRFTISRDNSKNTLYLQMNSLRAEDTAVYYCASGKGWDSGSWYEDYRGQGTLVTVSSGTGGGGSGGGGSGGGGSEFDIQMTQSPSSLSASVGDRVTITCKASDHINNWLAWYQQKPGQAPKLLIYGATTLETGVPSRFSGSGSGTDYTLTISSLQPEDFATYYCQQSWNTPWTFGQGTKLEIKRLEDLKNVFPPEVAVFEPSEAEISHTQKATLVCLATGFYPDHVELSWWVNGKEVHSGVSTDPQPLKEQPALNDSRYCLSSRLRVSATFWQNPRNHFRCQVQFYGLSENDEWTQDRAKPVTQIVSAEAWGRADCGFTSESYQQGVLSATILYEILLGKATLYAVLVSALVLMAMVKRKDSRGRAKRSGSGATNFSLLKQAGDVEENPGPTSMDWIWRILFLVGAATGAHSGPQVQLQESGGGLAQAGGSLRLSCAASGRTFSMGWFRQAPGKEREFVAAITYSGGSPYYASSVRGRFTISRDNAKNTVYLQMNSLKPEDTAVYYCAANPTYGSDWNAENWGQGTQVTVSSGSGGGGSGGGGSGGGGSFEQVQLQQPGAELVKPGASVKMSCKASGYAFSSYWINWMKQKPGQGLEWIGQIYPGDGDTNYNGKFKGRATLTADTSSSTAYMQLSSLTSEDSAVYFCARSITTVVGCAMDYWGQGTSVTVSSTRIQNPDPAVYQLRDSKSSDKSVCLFTDFDSQTNVSQSKDSDVYITDKTVLDMRSMDFKSNSAVAWSNKSDFACANAFNNSIIPEDTFFPSPESSCDVKLVEKSFETDTNLNFQNLSVIGFRILLLKVAGFNLLMTLRLWSSRAKRSGSGVKQTLNFDLLKLAGDVESNPGPSRGHMTEYKPTVRLATRDDVPRAVRTLAAAFADYPATRHTVDPDRHIERVTELQELFLTRVGLDIGKVWVADDGAAVAVWTTPESVEAGAVFAEIGPRMAELSGSRLAAQQQMEGLLAPHRPKEPAWFLATVGVSPDHQGKGLGSAVVLPGVEAAERAGVPAFLETSAPRNLPFYERLGFTVTADVEVPEGPRTWCMTRKPGA

SEQ ID NO: 15994 - protein, 1215 aa, Artificial Sequence
  Synthetic Polypeptide
MALPVTALLLPLALLLHAARPEVQLLESGGGLVQPGGSLRLSCAASGFIFSSYAMSWVRQAPGKGQEWVSGVSGTGVNTYYADSVKGRFTISRDNSKNTLYLQMNSLRAEDTAVYYCASGKGWDSGSWYEDYRGQGTLVTVSSGTGGGGSGGGGSGGGGSEFDIQMTQSPSSLSASVGDRVTITCKASDHINNWLAWYQQKPGQAPKLLIYGATTLETGVPSRFSGSGSGTDYTLTISSLQPEDFATYYCQQSWNTPWTFGQGTKLEIKRLEDLKNVFPPEVAVFEPSEAEISHTQKATLVCLATGFYPDHVELSWWVNGKEVHSGVSTDPQPLKEQPALNDSRYCLSSRLRVSATFWQNPRNHFRCQVQFYGLSENDEWTQDRAKPVTQIVSAEAWGRADCGFTSESYQQGVLSATILYEILLGKATLYAVLVSALVLMAMVKRKDSRGRAKRSGSGATNFSLLKQAGDVEENPGPTSMDWIWRILFLVGAATGAHSGPQVQLQESGGGLAQAGGSLRLSCAASGRTFSMGWFRQAPGKEREFVAAITYSGGSPYYASSVRGRFTISRDNAKNTVYLQMNSLKPEDTAVYYCAANPTYGSDWNAENWGQGTQVTVSSGSGGGGSGGGGSGGGGSFEQVQLQQPGAELVKPGASVKMSCKASGYAFSSYWINWMKQKPGQGLEWIGQIYPGDGDTNYNGKFKGRATLTADTSSSTAYMQLSSLTSEDSAVYFCARSITTVVGCAMDYWGQGTSVTVSSTREQKLISEEDGSGTPFPSLAPPIMLLVDGKQQMVVVCLVLDVAPPGLDSPIWFSAGNGSALDAFTYGPSPATDGTWTNLAHLSLPSEELASWEPLVCHTGPGAEGHSRSTQPMHLSGEASTARTCPQEPLRGTPGGALWLGVLRLLLFKLLLFDLLLTCSCLCDPAGPLPSPATTTRLRALGSHRLHPATETGGREATSSPRPQPRDRRWGDTPPGRKPGSPVRAKRSGSGVKQTLNFDLLKLAGDVESNPGPSRGHMTEYKPTVRLATRDDVPRAVRTLAAAFADYPATRHTVDPDRHIERVTELQELFLTRVGLDIGKVWVADDGAAVAVWTTPESVEAGAVFAEIGPRMAELSGSRLAAQQQMEGLLAPHRPKEPAWFLATVGVSPDHQGKGLGSAVVLPGVEAAERAGVPAFLETSAPRNLPFYERLGFTVTADVEVPEGPRTWCMTRKPGA

SEQ ID NO: 15995 - protein, 1170 aa, Artificial Sequence
  Synthetic Polypeptide
MALPVTALLLPLALLLHAARPEVQLLESGGGLVQPGGSLRLSCAASGFIFSSYAMSWVRQAPGKGQEWVSGVSGTGVNTYYADSVKGRFTISRDNSKNTLYLQMNSLRAEDTAVYYCASGKGWDSGSWYEDYRGQGTLVTVSSGTGGGGSGGGGSGGGGSEFDIQMTQSPSSLSASVGDRVTITCKASDHINNWLAWYQQKPGQAPKLLIYGATTLETGVPSRFSGSGSGTDYTLTISSLQPEDFATYYCQQSWNTPWTFGQGTKLEIKRLEGKPIPNPLLGLDSTGSGDKQLDADVSPKPTIFLPSIAETKLQKAGTYLCLLEKFFPDVIKIHWQEKKSNTILGSQEGNTMKTNDTYMKFSWLTVPEKSLDKEHRCIVRHENNKNGVDQEIIFPPIKTDVITMDPKDNCSKDANDTLLLQLTNTSAYYMYLLLLLKSVVYFAIITCCLLRRTAFCCNGEKSRAKRSGSGATNFSLLKQAGDVEENPGPTSMDWIWRILFLVGAATGAHSGPQVQLQESGGGLAQAGGSLRLSCAASGRTFSMGWFRQAPGKEREFVAAITYSGGSPYYASSVRGRFTISRDNAKNTVYLQMNSLKPEDTAVYYCAANPTYGSDWNAENWGQGTQVTVSSGSGGGGSGGGGSGGGGSFEQVQLQQPGAELVKPGASVKMSCKASGYAFSSYWINWMKQKPGQGLEWIGQIYPGDGDTNYNGKFKGRATLTADTSSSTAYMQLSSLTSEDSAVYFCARSITTVVGCAMDYWGQGTSVTVSSTREQKLISEEDGSGSQPHTKPSVFVMKNGTNVACLVKEFYPKDIRINLVSSKKITEFDPAIVISPSGKYNAVKLGKYEDSNSVTCSVQHDNKTVHSTDFEVKTDSTDHVKPKETENTKQPSKSCHKPKAIVHTEKVNMMSLTVLGLRMLFAKTVAVNFLLTAKLFFLRAKRSGSGVKQTLNFDLLKLAGDVESNPGPSRGHMTEYKPTVRLATRDDVPRAVRTLAAAFADYPATRHTVDPDRHIERVTELQELFLTRVGLDIGKVWVADDGAAVAVWTTPESVEAGAVFAEIGPRMAELSGSRLAAQQQMEGLLAPHRPKEPAWFLATVGVSPDHQGKGLGSAVVLPGVEAAERAGVPAFLETSAPRNLPFYERLGFTVTADVEVPEGPRTWCMTRKPGA

SEQ ID NO: 15996 - protein, 908 aa, Artificial Sequence
  Synthetic Polypeptide
MALPVTALLLPLALLLHAARPEVQLLESGGGLVQPGGSLRLSCAASGFIFSSYAMSWVRQAPGKGQEWVSGVSGTGVNTYYADSVKGRFTISRDNSKNTLYLQMNSLRAEDTAVYYCASGKGWDSGSWYEDYRGQGTLVTVSSGTGGGGSGGGGSGGGGSEFDIQMTQSPSSLSASVGDRVTITCKASDHINNWLAWYQQKPGQAPKLLIYGATTLETGVPSRFSGSGSGTDYTLTISSLQPEDFATYYCQQSWNTPWTFGQGTKLEIKRLESQPHTKPSVFVMKNGTNVACLVKEFYPKDIRINLVSSKKITEFDPAIVISPSGKYNAVKLGKYEDSNSVTCSVQHDNKTVHSTDFEVKTDSTDHVKPKETENTKQPSKSCHKPKAIVHTEKVNMMSLTVLGLRMLFAKTVAVNFLLTAKLFFLRAKRSGSGATNFSLLKQAGDVEENPGPTSMDWIWRILFLVGAATGAHSGPQVQLQESGGGLAQAGGSLRLSCAASGRTFSMGWFRQAPGKEREFVAAITYSGGSPYYASSVRGRFTISRDNAKNTVYLQMNSLKPEDTAVYYCAANPTYGSDWNAENWGQGTQVTVSSGSGGGGSGGGGSGGGGSFEQVQLQQPGAELVKPGASVKMSCKASGYAFSSYWINWMKQKPGQGLEWIGQIYPGDGDTNYNGKFKGRATLTADTSSSTAYMQLSSLTSEDSAVYFCARSITTVVGCAMDYWGQGTSVTVSSTRDKQLDADVSPKPTIFLPSIAETKLQKAGTYLCLLEKFFPDVIKIHWQEKKSNTILGSQEGNTMKTNDTYMKFSWLTVPEKSLDKEHRCIVRHENNKNGVDQEIIFPPIKTDVITMDPKDNCSKDANDTLLLQLTNTSAYYMYLLLLLKSVVYFAIITCCLLRRTAFCCNGEKS

SEQ ID NO: 15997 - protein, 1310 aa, Artificial Sequence
  Synthetic Polypeptide
MALPVTALLLPLALLLHAARPEVQLLESGGGLVQPGGSLRLSCAASGFIFSSYAMSWVRQAPGKGQEWVSGVSGTGVNTYYADSVKGRFTISRDNSKNTLYLQMNSLRAEDTAVYYCASGKGWDSGSWYEDYRGQGTLVTVSSGTGGGGSGGGGSGGGGSEFDIQMTQSPSSLSASVGDRVTITCKASDHINNWLAWYQQKPGQAPKLLIYGATTLETGVPSRFSGSGSGTDYTLTISSLQPEDFATYYCQQSWNTPWTFGQGTKLEIKRGQPKANPTVTLFPPSSEELQANKATLVCLISDFYPGAVTVAWKADGSPVKAGVETTKPSKQSNNKYAASSYLSLTPEQWKSHRSYSCQVTHEGSTVEKTVAPTECSGSQSFGLLDPKLCYLLDGILFIYGVILTALFLRVKFSRSADAPAYQQGQNQLYNELNLGRREEYDVLDKRRGRDPEMGGKPQRRKNPQEGLYNELQKDKMAEAYSEIGMKGERRRGKGHDGLYQGLSTATKDTYDALHMQALPPRRAKRSGSGATNFSLLKQAGDVEENPGPTSMDWIWRILFLVGAATGAHSGPQVQLQESGGGLAQAGGSLRLSCAASGRTFSMGWFRQAPGKEREFVAAITYSGGSPYYASSVRGRFTISRDNAKNTVYLQMNSLKPEDTAVYYCAANPTYGSDWNAENWGQGTQVTVSSGSGGGGSGGGGSGGGGSFEQVQLQQPGAELVKPGASVKMSCKASGYAFSSYWINWMKQKPGQGLEWIGQIYPGDGDTNYNGKFKGRATLTADTSSSTAYMQLSSLTSEDSAVYFCARSITTVVGCAMDYWGQGTSVTVSSASTKGPSVFPLAPSSKSTSGGTAALGCLVKDYFPEPVTVSWNSGALTSGVHTFPAVLQSSGLYSLSSVVTVPSSSLGTQTYICNVNHKPSNTKVDKRVEPKSCGTQSFGLLDPKLCYLLDGILFIYGVILTALFLRVKFSRSADAPAYQQGQNQLYNELNLGRREEYDVLDKRRGRDPEMGGKPQRRKNPQEGLYNELQKDKMAEAYSEIGMKGERRRGKGHDGLYQGLSTATKDTYDALHMQALPPRRAKRSGSGVKQTLNFDLLKLAGDVESNPGPSRGHMTEYKPTVRLATRDDVPRAVRTLAAAFADYPATRHTVDPDRHIERVTELQELFLTRVGLDIGKVWVADDGAAVAVWTTPESVEAGAVFAEIGPRMAELSGSRLAAQQQMEGLLAPHRPKEPAWFLATVGVSPDHQGKGLGSAVVLPGVEAAERAGVPAFLETSAPRNLPFYERLGFTVTADVEVPEGPRTWCMTRKPGA

SEQ ID NO: 15998 - protein, 1096 aa, Artificial Sequence
  Synthetic Polypeptide
MALPVTALLLPLALLLHAARPEVQLLESGGGLVQPGGSLRLSCAASGFIFSSYAMSWVRQAPGKGQEWVSGVSGTGVNTYYADSVKGRFTISRDNSKNTLYLQMNSLRAEDTAVYYCASGKGWDSGSWYEDYRGQGTLVTVSSGTGGGGSGGGGSGGGGSEFDIQMTQSPSSLSASVGDRVTITCKASDHINNWLAWYQQKPGQAPKLLIYGATTLETGVPSRFSGSGSGTDYTLTISSLQPEDFATYYCQQSWNTPWTFGQGTKLEIKRLEDLKNVFPPEVAVFEPSEAEISHTQKATLVCLATGFYPDHVELSWWVNGKEVHSGVSTDPQPLKEQPALNDSRYCLSSRLRVSATFWQNPRNHFRCQVQFYGLSENDEWTQDRAKPVTQIVSAEAWGRADCGSQSFGLLDPKLCYLLDGILFIYGVILTALFLRVKFSRSADAPAYQQGQNQLYNELNLGRREEYDVLDKRRGRDPEMGGKPQRRKNPQEGLYNELQKDKMAEAYSEIGMKGERRRGKGHDGLYQGLSTATKDTYDALHMQALPPRRAKRSGSGATNFSLLKQAGDVEENPGPTSMDWIWRILFLVGAATGAHSGPQVQLQESGGGLAQAGGSLRLSCAASGRTFSMGWFRQAPGKEREFVAAITYSGGSPYYASSVRGRFTISRDNAKNTVYLQMNSLKPEDTAVYYCAANPTYGSDWNAENWGQGTQVTVSSGSGGGGSGGGGSGGGGSFEQVQLQQPGAELVKPGASVKMSCKASGYAFSSYWINWMKQKPGQGLEWIGQIYPGDGDTNYNGKFKGRATLTADTSSSTAYMQLSSLTSEDSAVYFCARSITTVVGCAMDYWGQGTSVTVSSTRIQNPDPAVYQLRDSKSSDKSVCLFTDFDSQTNVSQSKDSDVYITDKTVLDMRSMDFKSNSAVAWSNKSDFACANAFNNSIIPEDTFFPSPESSCGTQSFGLLDPKLCYLLDGILFIYGVILTALFLRVKFSRSADAPAYQQGQNQLYNELNLGRREEYDVLDKRRGRDPEMGGKPQRRKNPQEGLYNELQKDKMAEAYSEIGMKGERRRGKGHDGLYQGLSTATKDTYDALHMQALPPR

SEQ ID NO: 15999 - protein, 1096 aa, Artificial Sequence
  Synthetic Polypeptide
MALPVTALLLPLALLLHAARPEVQLLESGGGLVQPGGSLRLSCAASGFIFSSYAMSWVRQAPGKGQEWVSGVSGTGVNTYYADSVKGRFTISRDNSKNTLYLQMNSLRAEDTAVYYCASGKGWDSGSWYEDYRGQGTLVTVSSGTGGGGSGGGGSGGGGSEFDIQMTQSPSSLSASVGDRVTITCKASDHINNWLAWYQQKPGQAPKLLIYGATTLETGVPSRFSGSGSGTDYTLTISSLQPEDFATYYCQQSWNTPWTFGQGTKLEIKRLEDLKNVFPPEVAVFEPSKAEIAHTQKATLVCLATGFYPDHVELSWWVNGKEVHSGVCTDPQPLKEQPALNDSRYCLSSRLRVSATFWQNPRNHFRCQVQFYGLSENDEWTQDRAKPVTQIVSAEAWGRADCGSQSFGLLDPKLCYLLDGILFIYGVILTALFLRVKFSRSADAPAYQQGQNQLYNELNLGRREEYDVLDKRRGRDPEMGGKPQRRKNPQEGLYNELQKDKMAEAYSEIGMKGERRRGKGHDGLYQGLSTATKDTYDALHMQALPPRRAKRSGSGATNFSLLKQAGDVEENPGPTSMDWIWRILFLVGAATGAHSGPQVQLQESGGGLAQAGGSLRLSCAASGRTFSMGWFRQAPGKEREFVAAITYSGGSPYYASSVRGRFTISRDNAKNTVYLQMNSLKPEDTAVYYCAANPTYGSDWNAENWGQGTQVTVSSGSGGGGSGGGGSGGGGSFEQVQLQQPGAELVKPGASVKMSCKASGYAFSSYWINWMKQKPGQGLEWIGQIYPGDGDTNYNGKFKGRATLTADTSSSTAYMQLSSLTSEDSAVYFCARSITTVVGCAMDYWGQGTSVTVSSTRIQNPDPAVYQLRDSKSSDKSVCLFTDFDSQTNVSQSKDSDVYITDKCVLDMRSMDFKSNSAVAWSNKSDFACANAFNNSIIPEDTFFPSSDVPCGTQSFGLLDPKLCYLLDGILFIYGVILTALFLRVKFSRSADAPAYQQGQNQLYNELNLGRREEYDVLDKRRGRDPEMGGKPQRRKNPQEGLYNELQKDKMAEAYSEIGMKGERRRGKGHDGLYQGLSTATKDTYDALHMQALPPR

SEQ ID NO: 16000 - protein, 1167 aa, Artificial Sequence
  Synthetic Polypeptide
MALPVTALLLPLALLLHAARPEVQLLESGGGLVQPGGSLRLSCAASGFIFSSYAMSWVRQAPGKGQEWVSGVSGTGVNTYYADSVKGRFTISRDNSKNTLYLQMNSLRAEDTAVYYCASGKGWDSGSWYEDYRGQGTLVTVSSGTGGGGSGGGGSGGGGSEFDIQMTQSPSSLSASVGDRVTITCKASDHINNWLAWYQQKPGQAPKLLIYGATTLETGVPSRFSGSGSGTDYTLTISSLQPEDFATYYCQQSWNTPWTFGQGTKLEIKRLEGKPIPNPLLGLDSTGSGEDLKNVFPPEVAVFEPSEAEISHTQKATLVCLATGFYPDHVELSWWVNGKEVHSGVSTDPQPLKEQPALNDSRYCLSSRLRVSATFWQNPRNHFRCQVQFYGLSENDEWTQDRAKPVTQIVSAEAWGRADCGSQSFGLLDPKLCYLLDGILFIYGVILTALFLRVKFSRSADAPAYQQGQNQLYNELNLGRREEYDVLDKRRGRDPEMGGKPQRRKNPQEGLYNELQKDKMAEAYSEIGMKGERRRGKGHDGLYQGLSTATKDTYDALHMQALPPRRAKRSGSGATNFSLLKQAGDVEENPGPTSMDWIWRILFLVGAATGAHSGPQVQLQESGGGLAQAGGSLRLSCAASGRTFSMGWFRQAPGKEREFVAAITYSGGSPYYASSVRGRFTISRDNAKNTVYLQMNSLKPEDTAVYYCAANPTYGSDWNAENWGQGTQVTVSSGSGGGGSGGGGSGGGGSFEQVQLQQPGAELVKPGASVKMSCKASGYAFSSYWINWMKQKPGQGLEWIGQIYPGDGDTNYNGKFKGRATLTADTSSSTAYMQLSSLTSEDSAVYFCARSITTVVGCAMDYWGQGTSVTVSSTREQKLISEEDGSGIQNPDPAVYQLRDSKSSDKSVCLFTDFDSQTNVSQSKDSDVYITDKTVLDMRSMDFKSNSAVAWSNKSDFACANAFNNSIIPEDTFFPSPESSCGTQSFGLLDPKLCYLLDGILFIYGVILTALFLRSKRSRLLHSDYMNMTPRRPGPTRKHYQPYAPPRDFAAYRSRVKFSRSADAPAYQQGQNQLYNELNLGRREEYDVLDKRRGRDPEMGGKPQRRKNPQEGLYNELQKDKMAEAYSEIGMKGERRRGKGHDGLYQGLSTATKDTYDALHMQALPPR

SEQ ID NO: 16001 - protein, 1208 aa, Artificial Sequence
  Synthetic Polypeptide
MALPVTALLLPLALLLHAARPEVQLLESGGGLVQPGGSLRLSCAASGFIFSSYAMSWVRQAPGKGQEWVSGVSGTGVNTYYADSVKGRFTISRDNSKNTLYLQMNSLRAEDTAVYYCASGKGWDSGSWYEDYRGQGTLVTVSSGTGGGGSGGGGSGGGGSEFDIQMTQSPSSLSASVGDRVTITCKASDHINNWLAWYQQKPGQAPKLLIYGATTLETGVPSRFSGSGSGTDYTLTISSLQPEDFATYYCQQSWNTPWTFGQGTKLEIKRLEGKPIPNPLLGLDSTGSGEDLKNVFPPEVAVFEPSEAEISHTQKATLVCLATGFYPDHVELSWWVNGKEVHSGVSTDPQPLKEQPALNDSRYCLSSRLRVSATFWQNPRNHFRCQVQFYGLSENDEWTQDRAKPVTQIVSAEAWGRADCGSQSFGLLDPKLCYLLDGILFIYGVILTALFLRSKRSRLLHSDYMNMTPRRPGPTRKHYQPYAPPRDFAAYRSRVKFSRSADAPAYQQGQNQLYNELNLGRREEYDVLDKRRGRDPEMGGKPQRRKNPQEGLYNELQKDKMAEAYSEIGMKGERRRGKGHDGLYQGLSTATKDTYDALHMQALPPRRAKRSGSGATNFSLLKQAGDVEENPGPTSMDWIWRILFLVGAATGAHSGPQVQLQESGGGLAQAGGSLRLSCAASGRTFSMGWFRQAPGKEREFVAAITYSGGSPYYASSVRGRFTISRDNAKNTVYLQMNSLKPEDTAVYYCAANPTYGSDWNAENWGQGTQVTVSSGSGGGGSGGGGSGGGGSFEQVQLQQPGAELVKPGASVKMSCKASGYAFSSYWINWMKQKPGQGLEWIGQIYPGDGDTNYNGKFKGRATLTADTSSSTAYMQLSSLTSEDSAVYFCARSITTVVGCAMDYWGQGTSVTVSSTREQKLISEEDGSGIQNPDPAVYQLRDSKSSDKSVCLFTDFDSQTNVSQSKDSDVYITDKTVLDMRSMDFKSNSAVAWSNKSDFACANAFNNSIIPEDTFFPSPESSCGTQSFGLLDPKLCYLLDGILFIYGVILTALFLRSKRSRLLHSDYMNMTPRRPGPTRKHYQPYAPPRDFAAYRSRVKFSRSADAPAYQQGQNQLYNELNLGRREEYDVLDKRRGRDPEMGGKPQRRKNPQEGLYNELQKDKMAEAYSEIGMKGERRRGKGHDGLYQGLSTATKDTYDALHMQALPPR

SEQ ID NO: 16002 - protein, 1169 aa, Artificial Sequence
  Synthetic Polypeptide
MALPVTALLLPLALLLHAARPEVQLLESGGGLVQPGGSLRLSCAASGFIFSSYAMSWVRQAPGKGQEWVSGVSGTGVNTYYADSVKGRFTISRDNSKNTLYLQMNSLRAEDTAVYYCASGKGWDSGSWYEDYRGQGTLVTVSSGTGGGGSGGGGSGGGGSEFDIQMTQSPSSLSASVGDRVTITCKASDHINNWLAWYQQKPGQAPKLLIYGATTLETGVPSRFSGSGSGTDYTLTISSLQPEDFATYYCQQSWNTPWTFGQGTKLEIKRLEGKPIPNPLLGLDSTGSGEDLKNVFPPEVAVFEPSEAEISHTQKATLVCLATGFYPDHVELSWWVNGKEVHSGVSTDPQPLKEQPALNDSRYCLSSRLRVSATFWQNPRNHFRCQVQFYGLSENDEWTQDRAKPVTQIVSAEAWGRADCGSQSFGLLDPKLCYLLDGILFIYGVILTALFLRVKFSRSADAPAYQQGQNQLYNELNLGRREEYDVLDKRRGRDPEMGGKPQRRKNPQEGLYNELQKDKMAEAYSEIGMKGERRRGKGHDGLYQGLSTATKDTYDALHMQALPPRRAKRSGSGATNFSLLKQAGDVEENPGPTSMDWIWRILFLVGAATGAHSGPQVQLQESGGGLAQAGGSLRLSCAASGRTFSMGWFRQAPGKEREFVAAITYSGGSPYYASSVRGRFTISRDNAKNTVYLQMNSLKPEDTAVYYCAANPTYGSDWNAENWGQGTQVTVSSGSGGGGSGGGGSGGGGSFEQVQLQQPGAELVKPGASVKMSCKASGYAFSSYWINWMKQKPGQGLEWIGQIYPGDGDTNYNGKFKGRATLTADTSSSTAYMQLSSLTSEDSAVYFCARSITTVVGCAMDYWGQGTSVTVSSTREQKLISEEDLGSGIQNPDPAVYQLRDSKSSDKSVCLFTDFDSQTNVSQSKDSDVYITDKTVLDMRSMDFKSNSAVAWSNKSDFACANAFNNSIIPEDTFFPSPESSCGTQSFGLLDPKLCYLLDGILFIYGVILTALFLKRGRKKLLYIFKQPFMRPVQTTQEEDGCSCRFPEEEEGGCELRVKFSRSADAPAYQQGQNQLYNELNLGRREEYDVLDKRRGRDPEMGGKPQRRKNPQEGLYNELQKDKMAEAYSEIGMKGERRRGKGHDGLYQGLSTATKDTYDALHMQALPPR

SEQ ID NO: 16003 - protein, 1211 aa, Artificial Sequence
  Synthetic Polypeptide
MALPVTALLLPLALLLHAARPEVQLLESGGGLVQPGGSLRLSCAASGFIFSSYAMSWVRQAPGKGQEWVSGVSGTGVNTYYADSVKGRFTISRDNSKNTLYLQMNSLRAEDTAVYYCASGKGWDSGSWYEDYRGQGTLVTVSSGTGGGGSGGGGSGGGGSEFDIQMTQSPSSLSASVGDRVTITCKASDHINNWLAWYQQKPGQAPKLLIYGATTLETGVPSRFSGSGSGTDYTLTISSLQPEDFATYYCQQSWNTPWTFGQGTKLEIKRLEGKPIPNPLLGLDSTGSGEDLKNVFPPEVAVFEPSEAEISHTQKATLVCLATGFYPDHVELSWWVNGKEVHSGVSTDPQPLKEQPALNDSRYCLSSRLRVSATFWQNPRNHFRCQVQFYGLSENDEWTQDRAKPVTQIVSAEAWGRADCGSQSFGLLDPKLCYLLDGILFIYGVILTALFLKRGRKKLLYIFKQPFMRPVQTTQEEDGCSCRFPEEEEGGCELRVKFSRSADAPAYQQGQNQLYNELNLGRREEYDVLDKRRGRDPEMGGKPQRRKNPQEGLYNELQKDKMAEAYSEIGMKGERRRGKGHDGLYQGLSTATKDTYDALHMQALPPRRAKRSGSGATNFSLLKQAGDVEENPGPTSMDWIWRILFLVGAATGAHSGPQVQLQESGGGLAQAGGSLRLSCAASGRTFSMGWFRQAPGKEREFVAAITYSGGSPYYASSVRGRFTISRDNAKNTVYLQMNSLKPEDTAVYYCAANPTYGSDWNAENWGQGTQVTVSSGSGGGGSGGGGSGGGGSFEQVQLQQPGAELVKPGASVKMSCKASGYAFSSYWINWMKQKPGQGLEWIGQIYPGDGDTNYNGKFKGRATLTADTSSSTAYMQLSSLTSEDSAVYFCARSITTVVGCAMDYWGQGTSVTVSSTREQKLISEEDLGSGIQNPDPAVYQLRDSKSSDKSVCLFTDFDSQTNVSQSKDSDVYITDKTVLDMRSMDFKSNSAVAWSNKSDFACANAFNNSIIPEDTFFPSPESSCGTQSFGLLDPKLCYLLDGILFIYGVILTALFLKRGRKKLLYIFKQPFMRPVQTTQEEDGCSCRFPEEEEGGCELRVKFSRSADAPAYQQGQNQLYNELNLGRREEYDVLDKRRGRDPEMGGKPQRRKNPQEGLYNELQKDKMAEAYSEIGMKGERRRGKGHDGLYQGLSTATKDTYDALHMQALPPR

SEQ ID NO: 16004 - protein, 1101 aa, Artificial Sequence
  Synthetic Polypeptide
MALPVTALLLPLALLLHAARPEVQLLESGGGLVQPGGSLRLSCAASGFIFSSYAMSWVRQAPGKGQEWVSGVSGTGVNTYYADSVKGRFTISRDNSKNTLYLQMNSLRAEDTAVYYCASGKGWDSGSWYEDYRGQGTLVTVSSGTGGGGSGGGGSGGGGSEFDIQMTQSPSSLSASVGDRVTITCKASDHINNWLAWYQQKPGQAPKLLIYGATTLETGVPSRFSGSGSGTDYTLTISSLQPEDFATYYCQQSWNTPWTFGQGTKLEIKRLEQSFGLLDPKLCYLLDGILFIYGVILTALFLRVKFSRSADAPAYQQGQNQLYNELNLGRREEYDVLDKRRGRDPEMGGKPQRRKNPQEGLYNELQKDKMAEAYSEIGMKGERRRGKGHDGLYQGLSTATKDTYDALHMQALPPRRAKRSGSGATNFSLLKQAGDVEENPGPTSMDWIWRILFLVGAATGAHSGPQVQLQESGGGLAQAGGSLRLSCAASGRTFSMGWFRQAPGKEREFVAAITYSGGSPYYASSVRGRFTISRDNAKNTVYLQMNSLKPEDTAVYYCAANPTYGSDWNAENWGQGTQVTVSSGSGGGGSGGGGSGGGGSFEQVQLQQPGAELVKPGASVKMSCKASGYAFSSYWINWMKQKPGQGLEWIGQIYPGDGDTNYNGKFKGRATLTADTSSSTAYMQLSSLTSEDSAVYFCARSITTVVGCAMDYWGQGTSVTVSSTRQSFGLLDPKLCYLLDGILFIYGVILTALFLRVKFSRSADAPAYQQGQNQLYNELNLGRREEYDVLDKRRGRDPEMGGKPQRRKNPQEGLYNELQKDKMAEAYSEIGMKGERRRGKGHDGLYQGLSTATKDTYDALHMQALPPRRAKRSGSGVKQTLNFDLLKLAGDVESNPGPSRGHMTEYKPTVRLATRDDVPRAVRTLAAAFADYPATRHTVDPDRHIERVTELQELFLTRVGLDIGKVWVADDGAAVAVWTTPESVEAGAVFAEIGPRMAELSGSRLAAQQQMEGLLAPHRPKEPAWFLATVGVSPDHQGKGLGSAVVLPGVEAAERAGVPAFLETSAPRNLPFYERLGFTVTADVEVPEGPRTWCMTRKPGA

SEQ ID NO: 16005 - protein, 926 aa, Artificial Sequence
  Synthetic Polypeptide
MALPVTALLLPLALLLHAARPEVQLLESGGGLVQPGGSLRLSCAASGFIFSSYAMSWVRQAPGKGQEWVSGVSGTGVNTYYADSVKGRFTISRDNSKNTLYLQMNSLRAEDTAVYYCASGKGWDSGSWYEDYRGQGTLVTVSSGTGGGGSGGGGSGGGGSEFDIQMTQSPSSLSASVGDRVTITCKASDHINNWLAWYQQKPGQAPKLLIYGATTLETGVPSRFSGSGSGTDYTLTISSLQPEDFATYYCQQSWNTPWTFGQGTKLEIKRLEGQPKANPTVTLFPPSSEELQANKATLVCLISDFYPGAVTVAWKADGSPVKAGVETTKPSKQSNNKYAASSYLSLTPEQWKSHRSYSCQVTHEGSTVEKTVAPTECSPIKTDVITMDPKDNCSKDANDTLLLQLTNTSAYYMYLLLLLKSVVYFAIITCCLLRRTAFCCNGEKSRAKRSGSGATNFSLLKQAGDVEENPGPTSMDWIWRILFLVGAATGAHSGPQVQLQESGGGLAQAGGSLRLSCAASGRTFSMGWFRQAPGKEREFVAAITYSGGSPYYASSVRGRFTISRDNAKNTVYLQMNSLKPEDTAVYYCAANPTYGSDWNAENWGQGTQVTVSSGSGGGGSGGGGSGGGGSFEQVQLQQPGAELVKPGASVKMSCKASGYAFSSYWINWMKQKPGQGLEWIGQIYPGDGDTNYNGKFKGRATLTADTSSSTAYMQLSSLTSEDSAVYFCARSITTVVGCAMDYWGQGTSVTVSSTRASTKGPSVFPLAPSSKSTSGGTAALGCLVKDYFPEPVTVSWNSGALTSGVHTFPAVLQSSGLYSLSSVVTVPSSSLGTQTYICNVNHKPSNTKVDKRVEPKSCEVKTDSTDHVKPKETENTKQPSKSCHKPKAIVHTEKVNMMSLTVLGLRMLFAKTVAVNFLLTAKLFFL

SEQ ID NO: 16006 - protein, 904 aa, Artificial Sequence
  Synthetic Polypeptide
MALPVTALLLPLALLLHAARPEVQLLESGGGLVQPGGSLRLSCAASGFIFSSYAMSWVRQAPGKGQEWVSGVSGTGVNTYYADSVKGRFTISRDNSKNTLYLQMNSLRAEDTAVYYCASGKGWDSGSWYEDYRGQGTLVTVSSGTGGGGSGGGGSGGGGSEFDIQMTQSPSSLSASVGDRVTITCKASDHINNWLAWYQQKPGQAPKLLIYGATTLETGVPSRFSGSGSGTDYTLTISSLQPEDFATYYCQQSWNTPWTFGQGTKLEIKRLEGQPKANPTVTLFPPSSEELQANKATLVCLISDFYPGAVTVAWKADGSPVKAGVETTKPSKQSNNKYAASSYLSLTPEQWKSHRSYSCQVTHEGSTVEKTVAPTECSGRADCGITSASYHQGVLSATILYEILLGKATLYAVLVSALVLMAMVKRKDSRGRAKRSGSGATNFSLLKQAGDVEENPGPTSMDWIWRILFLVGAATGAHSGPQVQLQESGGGLAQAGGSLRLSCAASGRTFSMGWFRQAPGKEREFVAAITYSGGSPYYASSVRGRFTISRDNAKNTVYLQMNSLKPEDTAVYYCAANPTYGSDWNAENWGQGTQVTVSSGSGGGGSGGGGSGGGGSFEQVQLQQPGAELVKPGASVKMSCKASGYAFSSYWINWMKQKPGQGLEWIGQIYPGDGDTNYNGKFKGRATLTADTSSSTAYMQLSSLTSEDSAVYFCARSITTVVGCAMDYWGQGTSVTVSSTRASTKGPSVFPLAPSSKSTSGGTAALGCLVKDYFPEPVTVSWNSGALTSGVHTFPAVLQSSGLYSLSSVVTVPSSSLGTQTYICNVNHKPSNTKVDKRVEPKSCIPEDTFFPSSDVPCDVKLVEKSFETDTNLNFQNLSVIGFRILLLKVAGFNLLMTLRLWSS

SEQ ID NO: 16007 - protein, 904 aa, Artificial Sequence
  Synthetic Polypeptide
MALPVTALLLPLALLLHAARPEVQLLESGGGLVQPGGSLRLSCAASGFIFSSYAMSWVRQAPGKGQEWVSGVSGTGVNTYYADSVKGRFTISRDNSKNTLYLQMNSLRAEDTAVYYCASGKGWDSGSWYEDYRGQGTLVTVSSGTGGGGSGGGGSGGGGSEFDIQMTQSPSSLSASVGDRVTITCKASDHINNWLAWYQQKPGQAPKLLIYGATTLETGVPSRFSGSGSGTDYTLTISSLQPEDFATYYCQQSWNTPWTFGQGTKLEIKRLEGQPKANPTVTLFPPSSEELQANKATLVCLISDFYPGAVTVAWKADGSPVKAGVETTKPSKQSNNKYAASSYLSLTPEQWKSHRSYSCQVTHEGSTVEKTVAPTECSGRADCGFTSESYQQGVLSATILYEILLGKATLYAVLVSALVLMAMVKRKDSRGRAKRSGSGATNFSLLKQAGDVEENPGPTSMDWIWRILFLVGAATGAHSGPQVQLQESGGGLAQAGGSLRLSCAASGRTFSMGWFRQAPGKEREFVAAITYSGGSPYYASSVRGRFTISRDNAKNTVYLQMNSLKPEDTAVYYCAANPTYGSDWNAENWGQGTQVTVSSGSGGGGSGGGGSGGGGSFEQVQLQQPGAELVKPGASVKMSCKASGYAFSSYWINWMKQKPGQGLEWIGQIYPGDGDTNYNGKFKGRATLTADTSSSTAYMQLSSLTSEDSAVYFCARSITTVVGCAMDYWGQGTSVTVSSTRASTKGPSVFPLAPSSKSTSGGTAALGCLVKDYFPEPVTVSWNSGALTSGVHTFPAVLQSSGLYSLSSVVTVPSSSLGTQTYICNVNHKPSNTKVDKRVEPKSCIPEDTFFPSPESSCDVKLVEKSFETDTNLNFQNLSVIGFRILLLKVAGFNLLMTLRLWSS

SEQ ID NO: 16008 - protein, 767 aa, Artificial Sequence
  Synthetic Polypeptide
MALPVTALLLPLALLLHAARPEVQLLESGGGLVQPGGSLRLSCAASGFTFSSYAMSWVRQAPGKGLEWVSSISGSGDYIYYADSVKGRFTISRDISKNTLYLQMNSLRAEDTAVYYCAKEGTGANSSLADYRGQGTLVTVSSGGGSGGGSEVQLLESGGGLVQPGGSLRLSCAASGFIFSSYAMSWVRQAPGKGQEWVSGVSGTGVNTYYADSVKGRFTISRDNSKNTLYLQMNSLRAEDTAVYYCASGKGWDSGSWYEDYRGQGTLVTVSSGTGGGGSGGGGSGGGGSEFDIQMTQSPSSLSASVGDRVTITCKASDHINNWLAWYQQKPGQAPKLLIYGATTLETGVPSRFSGSGSGTDYTLTISSLQPEDFATYYCQQSWNTPWTFGQGTKLEIKRGGGGSGGGGSGGGGSQVQLQQPGAELVKPGASVKMSCKASGYAFSSYWINWMKQKPGQGLEWIGQIYPGDGDTNYNGKFKGRATLTADTSSSTAYMQLSSLTSEDSAVYFCARSITTVVGCAMDYWGQGTSVTVSSTREQKLISEEDLKIEVMYPPPYLDNEKSNGTIIHVKGKHLCPSPLFPGPSKPFWVLVVVGGVLACYSLLVTVAFIIFWVRSKRSRLLHSDYMNMTPRRPGPTRKHYQPYAPPRDFAAYRSRVKFSRSADAPAYQQGQNQLYNELNLGRREEYDVLDKRRGRDPEMGGKPRRKNPQEGLYNELQKDKMAEAYSEIGMKGERRRGKGHDGLYQGLSTATKDTYDALHMQALPPR

SEQ ID NO: 16009 - protein, 773 aa, Artificial Sequence
  Synthetic Polypeptide
MALPVTALLLPLALLLHAARPEVQLLESGGGLVQPGGSLRLSCAASGFTFSSYAMSWVRQAPGKGLEWVSSISGSGDYIYYADSVKGRFTISRDISKNTLYLQMNSLRAEDTAVYYCAKEGTGANSSLADYRGQGTLVTVSSGGGSGGGSEVQLLESGGGLVQPGGSLRLSCAASGFIFSSYAMSWVRQAPGKGQEWVSGVSGTGVNTYYADSVKGRFTISRDNSKNTLYLQMNSLRAEDTAVYYCASGKGWDSGSWYEDYRGQGTLVTVSSGTGGGGSGGGGSGGGGSEFDIQMTQSPSSLSASVGDRVTITCKASDHINNWLAWYQQKPGQAPKLLIYGATTLETGVPSRFSGSGSGTDYTLTISSLQPEDFATYYCQQSWNTPWTFGQGTKLEIKRGGGGSGGGGSGGGGSQVQLQQPGAELVKPGASVKMSCKASGYAFSSYWINWMKQKPGQGLEWIGQIYPGDGDTNYNGKFKGRATLTADTSSSTAYMQLSSLTSEDSAVYFCARSITTVVGCAMDYWGQGTSVTVSSTREQKLISEEDLAKPTTTPAPRPPTPAPTIASQPLSLRPEACRPAAGGAVHTRGLDFACDIYIWAPLAGTCGVLLLSLVITLYCKRGRKKLLYIFKQPFMRPVQTTQEEDGCSCRFPEEEEGGCELRVKFSRSADAPAYQQGQNQLYNELNLGRREEYDVLDKRRGRDPEMGGKPRRKNPQEGLYNELQKDKMAEAYSEIGMKGERRRGKGHDGLYQGLSTATKDTYDALHMQALPPR

SEQ ID NO: 16010 - protein, 1186 aa, Artificial Sequence
  Synthetic Polypeptide
MALPVTALLLPLALLLHAARPEVQLLESGGGLVQPGGSLRLSCAASGFTFSSYAMSWVRQAPGKGLEWVSSISGSGDYIYYADSVKGRFTISRDISKNTLYLQMNSLRAEDTAVYYCAKEGTGANSSLADYRGQGTLVTVSSGGGSGGGSEVQLLESGGGLVQPGGSLRLSCAASGFIFSSYAMSWVRQAPGKGQEWVSGVSGTGVNTYYADSVKGRFTISRDNSKNTLYLQMNSLRAEDTAVYYCASGKGWDSGSWYEDYRGQGTLVTVSSGTGGGGSGGGGSGGGGSEFDIQMTQSPSSLSASVGDRVTITCKASDHINNWLAWYQQKPGQAPKLLIYGATTLETGVPSRFSGSGSGTDYTLTISSLQPEDFATYYCQQSWNTPWTFGQGTKLEIKRGGGGSGGGGSGGGGSQVQLQQPGAELVKPGASVKMSCKASGYAFSSYWINWMKQKPGQGLEWIGQIYPGDGDTNYNGKFKGRATLTADTSSSTAYMQLSSLTSEDSAVYFCARSITTVVGCAMDYWGQGTSVTVSSTREQKLISEEDLAKPTTTPAPRPPTPAPTIASQPLSLRPEACRPAAGGAVHTRGLDFACDIYIWAPLAGTCGVLLLSLVITLYCGRARVKFSRSADAPAYQQGQNQLYNELNLGRREEYDVLDKRRGRDPEMGGKPRRKNPQEGLYNELQKDKMAEAYSEIGMKGERRRGKGHDGLYQGLSTATKDTYDALHMQALPPRSRGSGATNFSLLKQAGDVEENPGPGIHMATYEVLCEVARKLGTDDREVVLFLLNVFIPQPTLAQLIGALRALKEEGRLTFPLLAECLFRAGRRDLLRDLLHLDPRFLERHLAGTMSYFSPYQLTVLHVDGELCARDIRSLIFLSKDTIGSRSTPQTFLHWVYCMENLDLLGPTDVDALMSMLRSLSRVDLQRQVQTLMGLHLSGPSHSQHYRHTPLETDFYDYKDDDDKTSGSGEGRGSLLTCGDVEENPGPHMTEYKPTVRLATRDDVPRAVRTLAAAFADYPATRHTVDPDRHIERVTELQELFLTRVGLDIGKVWVADDGAAVAVWTTPESVEAGAVFAEIGPRMAELSGSRLAAQQQMEGLLAPHRPKEPAWFLATVGVSPDHQGKGLGSAVVLPGVEAAERAGVPAFLETSAPRNLPFYERLGFTVTADVEVPEGPRTWCMTRKPGA

SEQ ID NO: 16011 - protein, 1126 aa, Artificial Sequence
  Synthetic Polypeptide
MALPVTALLLPLALLLHAARPEVQLLESGGGLVQPGGSLRLSCAASGFTFSSYAMSWVRQAPGKGLEWVSSISGSGDYIYYADSVKGRFTISRDISKNTLYLQMNSLRAEDTAVYYCAKEGTGANSSLADYRGQGTLVTVSSGGGSGGGSEVQLLESGGGLVQPGGSLRLSCAASGFIFSSYAMSWVRQAPGKGQEWVSGVSGTGVNTYYADSVKGRFTISRDNSKNTLYLQMNSLRAEDTAVYYCASGKGWDSGSWYEDYRGQGTLVTVSSGTGGGGSGGGGSGGGGSEFDIQMTQSPSSLSASVGDRVTITCKASDHINNWLAWYQQKPGQAPKLLIYGATTLETGVPSRFSGSGSGTDYTLTISSLQPEDFATYYCQQSWNTPWTFGQGTKLEIKRLEIQNPDPAVYQLRDSKSSDKSVCLFTDFDSQTNVSQSKDSDVYITDKCVLDMRSMDFKSNSAVAWSNKSDFACANAFNNSIIPEDTFFPSSDVPCDVKLVEKSFETDTNLNFQNLSVIGFRILLLKVAGFNLLMTLRLWSSRAKRSGSGVKQTLNFDLLKLAGDVESNPGPTSMDWIWRILFLVGAATGAHSFEQVQLQQPGAELVKPGASVKMSCKASGYAFSSYWINWMKQKPGQGLEWIGQIYPGDGDTNYNGKFKGRATLTADTSSSTAYMQLSSLTSEDSAVYFCARSITTVVGCAMDYWGQGTSVTVSSTREDLKNVFPPEVAVFEPSKAEIAHTQKATLVCLATGFYPDHVELSWWVNGKEVHSGVCTDPQPLKEQPALNDSRYCLSSRLRVSATFWQNPRNHFRCQVQFYGLSENDEWTQDRAKPVTQIVSAEAWGRADCGITSASYHQGVLSATILYEILLGKATLYAVLVSALVLMAMVKRKDSRGRAKRSGSGATNFSLLKQAGDVEENPGPSRGHMTEYKPTVRLATRDDVPRAVRTLAAAFADYPATRHTVDPDRHIERVTELQELFLTRVGLDIGKVWVADDGAAVAVWTTPESVEAGAVFAEIGPRMAELSGSRLAAQQQMEGLLAPHRPKEPAWFLATVGVSPDHQGKGLGSAVVLPGVEAAERAGVPAFLETSAPRNLPFYERLGFTVTADVEVPEGPRTWCMTRKPGA

SEQ ID NO: 16012 - protein, 1125 aa, Artificial Sequence
  Synthetic Polypeptide
MALPVTALLLPLALLLHAARPEVQLLESGGGLVQPGGSLRLSCAASGFTFSSYAMSWVRQAPGKGLEWVSSISGSGDYIYYADSVKGRFTISRDISKNTLYLQMNSLRAEDTAVYYCAKEGTGANSSLADYRGQGTLVTVSSGGGSGGGSEVQLLESGGGLVQPGGSLRLSCAASGFIFSSYAMSWVRQAPGKGQEWVSGVSGTGVNTYYADSVKGRFTISRDNSKNTLYLQMNSLRAEDTAVYYCASGKGWDSGSWYEDYRGQGTLVTVSSGTGGGGSGGGGSGGGGSEFDIQMTQSPSSLSASVGDRVTITCKASDHINNWLAWYQQKPGQAPKLLIYGATTLETGVPSRFSGSGSGTDYTLTISSLQPEDFATYYCQQSWNTPWTFGQGTKLEIKRLEDLKNVFPPEVAVFEPSKAEIAHTQKATLVCLATGFYPDHVELSWWVNGKEVHSGVCTDPQPLKEQPALNDSRYCLSSRLRVSATFWQNPRNHFRCQVQFYGLSENDEWTQDRAKPVTQIVSAEAWGRADCGITSASYHQGVLSATILYEILLGKATLYAVLVSALVLMAMVKRKDSRGRAKRSGSGATNFSLLKQAGDVEENPGPTSMDWIWRILFLVGAATGAHSFEQVQLQQPGAELVKPGASVKMSCKASGYAFSSYWINWMKQKPGQGLEWIGQIYPGDGDTNYNGKFKGRATLTADTSSSTAYMQLSSLTSEDSAVYFCARSITTVVGCAMDYWGQGTSVTVSSTRIQNPDPAVYQLRDSKSSDKSVCLFTDFDSQTNVSQSKDSDVYITDKCVLDMRSMDFKSNSAVAWSNKSDFACANAFNNSIIPEDTFFPSSDVPCDVKLVEKSFETDTNLNFQNLSVIGFRILLLKVAGFNLLMTLRLWSSRAKRSGSGVKQTLNFDLLKLAGDVESNPGPSRGHMTEYKPTVRLATRDDVPRAVRTLAAAFADYPATRHTVDPDRHIERVTELQELFLTRVGLDIGKVWVADDGAAVAVWTTPESVEAGAVFAEIGPRMAELSGSRLAAQQQMEGLLAPHRPKEPAWFLATVGVSPDHQGKGLGSAVVLPGVEAAERAGVPAFLETSAPRNLPFYERLGFTVTADVEVPEGPRTWCMTRKPGA

SEQ ID NO: 16013 - protein, 892 aa, Artificial Sequence
  Synthetic Polypeptide
MALPVTALLLPLALLLHAARPEVQLLESGGGLVQPGGSLRLSCAASGFTFSSYAMSWVRQAPGKGLEWVSSISGSGDYIYYADSVKGRFTISRDISKNTLYLQMNSLRAEDTAVYYCAKEGTGANSSLADYRGQGTLVTVSSGGGSGGGSEVQLLESGGGLVQPGGSLRLSCAASGFIFSSYAMSWVRQAPGKGQEWVSGVSGTGVNTYYADSVKGRFTISRDNSKNTLYLQMNSLRAEDTAVYYCASGKGWDSGSWYEDYRGQGTLVTVSSGTGGGGSGGGGSGGGGSEFDIQMTQSPSSLSASVGDRVTITCKASDHINNWLAWYQQKPGQAPKLLIYGATTLETGVPSRFSGSGSGTDYTLTISSLQPEDFATYYCQQSWNTPWTFGQGTKLEIKRLEDLKNVFPPEVAVFEPSEAEISHTQKATLVCLATGFYPDHVELSWWVNGKEVHSGVCTDPQPLKEQPALNDSRYCLSSRLRVSATFWQNPRNHFRCQVQFYGLSENDEWTQDRAKPVTQIVSAEAWGRADCGFTSESYQQGVLSATILYEILLGKATLYAVLVSALVLMAMVKRKDSRGRAKRSGSGATNFSLLKQAGDVEENPGPTSMDWIWRILFLVGAATGAHSFEQVQLQQPGAELVKPGASVKMSCKASGYAFSSYWINWMKQKPGQGLEWIGQIYPGDGDTNYNGKFKGRATLTADTSSSTAYMQLSSLTSEDSAVYFCARSITTVVGCAMDYWGQGTSVTVSSTRIQNPDPAVYQLRDSKSSDKSVCLFTDFDSQTNVSQSKDSDVYITDKCVLDMRSMDFKSNSAVAWSNKSDFACANAFNNSIIPEDTFFPSPESSCDVKLVEKSFETDTNLNFQNLSVIGFRILLLKVAGFNLLMTLRLWSS

SEQ ID NO: 16014 - protein, 1117 aa, Artificial Sequence
  Synthetic Polypeptide
MALPVTALLLPLALLLHAARPEVQLLESGGGLVQPGGSLRLSCAASGFTFSSYAMSWVRQAPGKGLEWVSSISGSGDYIYYADSVKGRFTISRDISKNTLYLQMNSLRAEDTAVYYCAKEGTGANSSLADYRGQGTLVTVSSGGGSGGGSEVQLLESGGGLVQPGGSLRLSCAASGFIFSSYAMSWVRQAPGKGQEWVSGVSGTGVNTYYADSVKGRFTISRDNSKNTLYLQMNSLRAEDTAVYYCASGKGWDSGSWYEDYRGQGTLVTVSSGTGGGGSGGGGSGGGGSEFDIQMTQSPSSLSASVGDRVTITCKASDHINNWLAWYQQKPGQAPKLLIYGATTLETGVPSRFSGSGSGTDYTLTISSLQPEDFATYYCQQSWNTPWTFGQGTKLEIKRLEDLKNVFPPEVAVFEPSEAEISHTQKATLVCLATGFYPDHVELSWWVNGKEVHSGVCTDPQPLKEQPALNDSRYCLSSRLRVSATFWQNPRNHFRCQVQFYGLSENDEWTQDRAKPVTQIVSAEAWGRADCGFTSESYQQGVLSATILYEILLGKATLYAVLVSALVLMAMVKRKDSRGRAKRSGSGATNFSLLKQAGDVEENPGPTSMDWIWRILFLVGAATGAHSFEQVQLQQPGAELVKPGASVKMSCKASGYAFSSYWINWMKQKPGQGLEWIGQIYPGDGDTNYNGKFKGRATLTADTSSSTAYMQLSSLTSEDSAVYFCARSITTVVGCAMDYWGQGTSVTVSSTRIQNPDPAVYQLRDSKSSDKSVCLFTDFDSQTNVSQSKDSDVYITDKCVLDMRSMDFKSNSAVAWSNKSDFACANAFNNSIIPEDTFFPSPESSCDVKLVEKSFETDTNLNFQNLSVIGFRILLLKVAGFNLLMTLRLWSSRAKRSGSGVKQTLNFDLLKLAGDVESNPGPSRGGIHTMATYEVLCEVARKLGTDDREVVLFLLNVFIPQPTLAQLIGALRALKEEGRLTFPLLAECLFRAGRRDLLRDLLHLDPRFLERHLAGTMSYFSPYQLTVLHVDGELCARDIRSLIFLSKDTIGSRSTPQTFLHWVYCMENLDLLGPTDVDALMSMLRSLSRVDLQRQVQTLMGLHLSGPSHSQHYRHTP

SEQ ID NO: 16015 - protein, 896 aa, Artificial Sequence
  Synthetic Polypeptide
MALPVTALLLPLALLLHAARPEVQLLESGGGLVQPGGSLRLSCAASGFTFSSYAMSWVRQAPGKGLEWVSSISGSGDYIYYADSVKGRFTISRDISKNTLYLQMNSLRAEDTAVYYCAKEGTGANSSLADYRGQGTLVTVSSGGGSGGGSEVQLLESGGGLVQPGGSLRLSCAASGFIFSSYAMSWVRQAPGKGQEWVSGVSGTGVNTYYADSVKGRFTISRDNSKNTLYLQMNSLRAEDTAVYYCASGKGWDSGSWYEDYRGQGTLVTVSSGTGGGGSGGGGSGGGGSEFDIQMTQSPSSLSASVGDRVTITCKASDHINNWLAWYQQKPGQAPKLLIYGATTLETGVPSRFSGSGSGTDYTLTISSLQPEDFATYYCQQSWNTPWTFGQGTKLEIKRLEIQNPDPAVYQLRDSKSSDKSVCLFTDFDSQTNVSQSKDSDVYITDKCVLDMRSMDFKSNSAVAWSNKSDFACANAFNNSIIPEDTFFPSPESSCDVKLVEKSFETDTNLNFQNLSVIGFRILLLKVAGFNLLMTLRLWSSRAKRSGSGVKQTLNFDLLKLAGDVESNPGPTSMDWIWRILFLVGAATGAHSFEQVQLQQPGAELVKPGASVKMSCKASGYAFSSYWINWMKQKPGQGLEWIGQIYPGDGDTNYNGKFKGRATLTADTSSSTAYMQLSSLTSEDSAVYFCARSITTVVGCAMDYWGQGTSVTVSSTREDLKNVFPPEVAVFEPSEAEISHTQKATLVCLATGFYPDHVELSWWVNGKEVHSGVCTDPQPLKEQPALNDSRYCLSSRLRVSATFWQNPRNHFRCQVQFYGLSENDEWTQDRAKPVTQIVSAEAWGRADCGFTSESYQQGVLSATILYEILLGKATLYAVLVSALVLMAMVKRKDSRG

SEQ ID NO: 16016 - protein, 1118 aa, Artificial Sequence
  Synthetic Polypeptide
MALPVTALLLPLALLLHAARPEVQLLESGGGLVQPGGSLRLSCAASGFTFSSYAMSWVRQAPGKGLEWVSSISGSGDYIYYADSVKGRFTISRDISKNTLYLQMNSLRAEDTAVYYCAKEGTGANSSLADYRGQGTLVTVSSGGGSGGGSEVQLLESGGGLVQPGGSLRLSCAASGFIFSSYAMSWVRQAPGKGQEWVSGVSGTGVNTYYADSVKGRFTISRDNSKNTLYLQMNSLRAEDTAVYYCASGKGWDSGSWYEDYRGQGTLVTVSSGTGGGGSGGGGSGGGGSEFDIQMTQSPSSLSASVGDRVTITCKASDHINNWLAWYQQKPGQAPKLLIYGATTLETGVPSRFSGSGSGTDYTLTISSLQPEDFATYYCQQSWNTPWTFGQGTKLEIKRLEIQNPDPAVYQLRDSKSSDKSVCLFTDFDSQTNVSQSKDSDVYITDKCVLDMRSMDFKSNSAVAWSNKSDFACANAFNNSIIPEDTFFPSPESSCDVKLVEKSFETDTNLNFQNLSVIGFRILLLKVAGFNLLMTLRLWSSRAKRSGSGVKQTLNFDLLKLAGDVESNPGPTSMDWIWRILFLVGAATGAHSFEQVQLQQPGAELVKPGASVKMSCKASGYAFSSYWINWMKQKPGQGLEWIGQIYPGDGDTNYNGKFKGRATLTADTSSSTAYMQLSSLTSEDSAVYFCARSITTVVGCAMDYWGQGTSVTVSSTREDLKNVFPPEVAVFEPSEAEISHTQKATLVCLATGFYPDHVELSWWVNGKEVHSGVCTDPQPLKEQPALNDSRYCLSSRLRVSATFWQNPRNHFRCQVQFYGLSENDEWTQDRAKPVTQIVSAEAWGRADCGFTSESYQQGVLSATILYEILLGKATLYAVLVSALVLMAMVKRKDSRGRAKRSGSGATNFSLLKQAGDVEENPGPSRGGIHTMATYEVLCEVARKLGTDDREVVLFLLNVFIPQPTLAQLIGALRALKEEGRLTFPLLAECLFRAGRRDLLRDLLHLDPRFLERHLAGTMSYFSPYQLTVLHVDGELCARDIRSLIFLSKDTIGSRSTPQTFLHWVYCMENLDLLGPTDVDALMSMLRSLSRVDLQRQVQTLMGLHLSGPSHSQHYRHTP

SEQ ID NO: 16017 - protein, 1170 aa, Artificial Sequence
  Synthetic Polypeptide
MALPVTALLLPLALLLHAARPLEGKPIPNPLLGLDSTGSGEDLKNVFPPEVAVFEPSKAEIAHTQKATLVCLATGFYPDHVELSWWVNGKEVHSGVCTDPQPLKEQPALNDSRYCLSSRLRVSATFWQNPRNHFRCQVQFYGLSENDEWTQDRAKPVTQIVSAEAWGRADCGITSASYHQGVLSATILYEILLGKATLYAVLVSALVLMAMVKRKDSRGRAKRSGSGATNFSLLKQAGDVEENPGPTSMALPVTALLLPLALLLHAARPEVQLLESGGGLVQPGGSLRLSCAASGFTFSSYAMSWVRQAPGKGLEWVSSISGSGDYIYYADSVKGRFTISRDISKNTLYLQMNSLRAEDTAVYYCAKEGTGANSSLADYRGQGTLVTVSSGGGSGGGSEVQLLESGGGLVQPGGSLRLSCAASGFIFSSYAMSWVRQAPGKGQEWVSGVSGTGVNTYYADSVKGRFTISRDNSKNTLYLQMNSLRAEDTAVYYCASGKGWDSGSWYEDYRGQGTLVTVSSGTGGGGSGGGGSGGGGSEFDIQMTQSPSSLSASVGDRVTITCKASDHINNWLAWYQQKPGQAPKLLIYGATTLETGVPSRFSGSGSGTDYTLTISSLQPEDFATYYCQQSWNTPWTFGQGTKLEIKRGGGGSGGGGSGGGGSQVQLQQPGAELVKPGASVKMSCKASGYAFSSYWINWMKQKPGQGLEWIGQIYPGDGDTNYNGKFKGRATLTADTSSSTAYMQLSSLTSEDSAVYFCARSITTVVGCAMDYWGQGTSVTVSSTREQKLISEEDGSGIQNPDPAVYQLRDSKSSDKSVCLFTDFDSQTNVSQSKDSDVYITDKCVLDMRSMDFKSNSAVAWSNKSDFACANAFNNSIIPEDTFFPSSDVPCDVKLVEKSFETDTNLNFQNLSVIGFRILLLKVAGFNLLMTLRLWSSRAKRSGSGVKQTLNFDLLKLAGDVESNPGPSRGHMTEYKPTVRLATRDDVPRAVRTLAAAFADYPATRHTVDPDRHIERVTELQELFLTRVGLDIGKVWVADDGAAVAVWTTPESVEAGAVFAEIGPRMAELSGSRLAAQQQMEGLLAPHRPKEPAWFLATVGVSPDHQGKGLGSAVVLPGVEAAERAGVPAFLETSAPRNLPFYERLGFTVTADVEVPEGPRTWCMTRKPGA

SEQ ID NO: 16018 - protein, 1171 aa, Artificial Sequence
  Synthetic Polypeptide
MALPVTALLLPLALLLHAARPLEQKLISEEDLGSGDRPDPAVYQLRDSKSSDKSVCLFTDFDSQTNVSQSKDSDVYITDKCVLDMRSMDFKSNSAVAWSNKSDFACANAFNNSIIPEDTFFPSPESSCDVKLVEKSFETDTNLNFQNLSVIGFRILLLKVAGFNLLMTLRLWSSSSRAKRSGSGVKQTLNFDLLKLAGDVESNPGPTSMALPVTALLLPLALLLHAARPEVQLLESGGGLVQPGGSLRLSCAASGFTFSSYAMSWVRQAPGKGLEWVSSISGSGDYIYYADSVKGRFTISRDISKNTLYLQMNSLRAEDTAVYYCAKEGTGANSSLADYRGQGTLVTVSSGGGSGGGSEVQLLESGGGLVQPGGSLRLSCAASGFIFSSYAMSWVRQAPGKGQEWVSGVSGTGVNTYYADSVKGRFTISRDNSKNTLYLQMNSLRAEDTAVYYCASGKGWDSGSWYEDYRGQGTLVTVSSGTGGGGSGGGGSGGGGSEFDIQMTQSPSSLSASVGDRVTITCKASDHINNWLAWYQQKPGQAPKLLIYGATTLETGVPSRFSGSGSGTDYTLTISSLQPEDFATYYCQQSWNTPWTFGQGTKLEIKRGGGGSGGGGSGGGGSQVQLQQPGAELVKPGASVKMSCKASGYAFSSYWINWMKQKPGQGLEWIGQIYPGDGDTNYNGKFKGRATLTADTSSSTAYMQLSSLTSEDSAVYFCARSITTVVGCAMDYWGQGTSVTVSSTRGKPIPNPLLGLDSTGSGEDLKNVFPPEVAVFEPSEAEISHTQKATLVCLATGFYPDHVELSWWVNGKEVHSGVCTDPQPLKEQPALNDSRYCLSSRLRVSATFWQNPRNHFRCQVQFYGLSENDEWTQDRAKPVTQIVSAEAWGRADCGFTSESYQQGVLSATILYEILLGKATLYAVLVSALVLMAMVKRKDSRGRAKRSGSGATNFSLLKQAGDVEENPGPSRGHMTEYKPTVRLATRDDVPRAVRTLAAAFADYPATRHTVDPDRHIERVTELQELFLTRVGLDIGKVWVADDGAAVAVWTTPESVEAGAVFAEIGPRMAELSGSRLAAQQQMEGLLAPHRPKEPAWFLATVGVSPDHQGKGLGSAVVLPGVEAAERAGVPAFLETSAPRNLPFYERLGFTVTADVEVPEGPRTWCMTRKPGA

SEQ ID NO: 16019 - protein, 1125 aa, Artificial Sequence
  Synthetic Polypeptide
MALPVTALLLPLALLLHAARPEVQLLESGGGLVQPGGSLRLSCAASGFTFSSYAMSWVRQAPGKGLEWVSSISGSGDYIYYADSVKGRFTISRDISKNTLYLQMNSLRAEDTAVYYCAKEGTGANSSLADYRGQGTLVTVSSGGGSGGGSEVQLLESGGGLVQPGGSLRLSCAASGFIFSSYAMSWVRQAPGKGQEWVSGVSGTGVNTYYADSVKGRFTISRDNSKNTLYLQMNSLRAEDTAVYYCASGKGWDSGSWYEDYRGQGTLVTVSSGTGGGGSGGGGSGGGGSEFDIQMTQSPSSLSASVGDRVTITCKASDHINNWLAWYQQKPGQAPKLLIYGATTLETGVPSRFSGSGSGTDYTLTISSLQPEDFATYYCQQSWNTPWTFGQGTKLEIKRLEDLKNVFPPEVAVFEPSEAEISHTQKATLVCLATGFYPDHVELSWWVNGKEVHSGVSTDPQPLKEQPALNDSRYCLSSRLRVSATFWQNPRNHFRCQVQFYGLSENDEWTQDRAKPVTQIVSAEAWGRADCGFTSESYQQGVLSATILYEILLGKATLYAVLVSALVLMAMVKRKDSRGRAKRSGSGATNFSLLKQAGDVEENPGPTSMDWIWRILFLVGAATGAHSFEQVQLQQPGAELVKPGASVKMSCKASGYAFSSYWINWMKQKPGQGLEWIGQIYPGDGDTNYNGKFKGRATLTADTSSSTAYMQLSSLTSEDSAVYFCARSITTVVGCAMDYWGQGTSVTVSSTRIQNPDPAVYQLRDSKSSDKSVCLFTDFDSQTNVSQSKDSDVYITDKTVLDMRSMDFKSNSAVAWSNKSDFACANAFNNSIIPEDTFFPSPESSCDVKLVEKSFETDTNLNFQNLSVIGFRILLLKVAGFNLLMTLRLWSSRAKRSGSGVKQTLNFDLLKLAGDVESNPGPSRGHMTEYKPTVRLATRDDVPRAVRTLAAAFADYPATRHTVDPDRHIERVTELQELFLTRVGLDIGKVWVADDGAAVAVWTTPESVEAGAVFAEIGPRMAELSGSRLAAQQQMEGLLAPHRPKEPAWFLATVGVSPDHQGKGLGSAVVLPGVEAAERAGVPAFLETSAPRNLPFYERLGFTVTADVEVPEGPRTWCMTRKPGA

SEQ ID NO: 16020 - protein, 1207 aa, Artificial Sequence
  Synthetic Polypeptide
MALPVTALLLPLALLLHAARPEVQLLESGGGLVQPGGSLRLSCAASGFTFSSYAMSWVRQAPGKGLEWVSSISGSGDYIYYADSVKGRFTISRDISKNTLYLQMNSLRAEDTAVYYCAKEGTGANSSLADYRGQGTLVTVSSGGGSGGGSEVQLLESGGGLVQPGGSLRLSCAASGFIFSSYAMSWVRQAPGKGQEWVSGVSGTGVNTYYADSVKGRFTISRDNSKNTLYLQMNSLRAEDTAVYYCASGKGWDSGSWYEDYRGQGTLVTVSSGTGGGGSGGGGSGGGGSEFDIQMTQSPSSLSASVGDRVTITCKASDHINNWLAWYQQKPGQAPKLLIYGATTLETGVPSRFSGSGSGTDYTLTISSLQPEDFATYYCQQSWNTPWTFGQGTKLEIKRLEDLKNVFPPEVAVFEPSEAEISHTQKATLVCLATGFYPDHVELSWWVNGKEVHSGVSTDPQPLKEQPALNDSRYCLSSRLRVSATFWQNPRNHFRCQVQFYGLSENDEWTQDRAKPVTQIVSAEAWGRADCGFTSESYQQGVLSATILYEILLGKATLYAVLVSALVLMAMVKRKDSRGRAKRSGSGATNFSLLKQAGDVEENPGPTSMDWIWRILFLVGAATGAHSFEQVQLQQPGAELVKPGASVKMSCKASGYAFSSYWINWMKQKPGQGLEWIGQIYPGDGDTNYNGKFKGRATLTADTSSSTAYMQLSSLTSEDSAVYFCARSITTVVGCAMDYWGQGTSVTVSSTREQKLISEEDGSGTPFPSLAPPIMLLVDGKQQMVVVCLVLDVAPPGLDSPIWFSAGNGSALDAFTYGPSPATDGTWTNLAHLSLPSEELASWEPLVCHTGPGAEGHSRSTQPMHLSGEASTARTCPQEPLRGTPGGALWLGVLRLLLFKLLLFDLLLTCSCLCDPAGPLPSPATTTRLRALGSHRLHPATETGGREATSSPRPQPRDRRWGDTPPGRKPGSPVRAKRSGSGVKQTLNFDLLKLAGDVESNPGPSRGHMTEYKPTVRLATRDDVPRAVRTLAAAFADYPATRHTVDPDRHIERVTELQELFLTRVGLDIGKVWVADDGAAVAVWTTPESVEAGAVFAEIGPRMAELSGSRLAAQQQMEGLLAPHRPKEPAWFLATVGVSPDHQGKGLGSAVVLPGVEAAERAGVPAFLETSAPRNLPFYERLGFTVTADVEVPEGPRTWCMTRKPGA

SEQ ID NO: 16021 - protein, 1225 aa, Artificial Sequence
  Synthetic Polypeptide
MALPVTALLLPLALLLHAARPLEDLKNVFPPEVAVFEPSEAEISHTQKATLVCLATGFYPDHVELSWWVNGKEVHSGVSTDPQPLKEQPALNDSRYCLSSRLRVSATFWQNPRNHFRCQVQFYGLSENDEWTQDRAKPVTQIVSAEAWGRADCGFTSESYQQGVLSATILYEILLGKATLYAVLVSALVLMAMVKRKDSRGRAKRSGSGATNFSLLKQAGDVEENPGPTSMALPVTALLLPLALLLHAARPEVQLLESGGGLVQPGGSLRLSCAASGFTFSSYAMSWVRQAPGKGLEWVSSISGSGDYIYYADSVKGRFTISRDISKNTLYLQMNSLRAEDTAVYYCAKEGTGANSSLADYRGQGTLVTVSSGGGSGGGSEVQLLESGGGLVQPGGSLRLSCAASGFIFSSYAMSWVRQAPGKGQEWVSGVSGTGVNTYYADSVKGRFTISRDNSKNTLYLQMNSLRAEDTAVYYCASGKGWDSGSWYEDYRGQGTLVTVSSGTGGGGSGGGGSGGGGSEFDIQMTQSPSSLSASVGDRVTITCKASDHINNWLAWYQQKPGQAPKLLIYGATTLETGVPSRFSGSGSGTDYTLTISSLQPEDFATYYCQQSWNTPWTFGQGTKLEIKRGGGGSGGGGSGGGGSQVQLQQPGAELVKPGASVKMSCKASGYAFSSYWINWMKQKPGQGLEWIGQIYPGDGDTNYNGKFKGRATLTADTSSSTAYMQLSSLTSEDSAVYFCARSITTVVGCAMDYWGQGTSVTVSSTREQKLISEEDLGSGTPFPSLAPPIMLLVDGKQQMVVVCLVLDVAPPGLDSPIWFSAGNGSALDAFTYGPSPATDGTWTNLAHLSLPSEELASWEPLVCHTGPGAEGHSRSTQPMHLSGEASTARTCPQEPLRGTPGGALWLGVLRLLLFKLLLFDLLLTCSCLCDPAGPLPSPATTTRLRALGSHRLHPATETGGREATSSPRPQPRDRRWGDTPPGRKPGSPVRAKRSGSGVKQTLNFDLLKLAGDVESNPGPSRSRGHMTEYKPTVRLATRDDVPRAVRTLAAAFADYPATRHTVDPDRHIERVTELQELFLTRVGLDIGKVWVADDGAAVAVWTTPESVEAGAVFAEIGPRMAELSGSRLAAQQQMEGLLAPHRPKEPAWFLATVGVSPDHQGKGLGSAVVLPGVEAAERAGVPAFLETSAPRNLPFYERLGFTVTADVEVPEGPRTWCMTRKPGA

SEQ ID NO: 16022 - protein, 1162 aa, Artificial Sequence
  Synthetic Polypeptide
MALPVTALLLPLALLLHAARPEVQLLESGGGLVQPGGSLRLSCAASGFTFSSYAMSWVRQAPGKGLEWVSSISGSGDYIYYADSVKGRFTISRDISKNTLYLQMNSLRAEDTAVYYCAKEGTGANSSLADYRGQGTLVTVSSGGGSGGGSEVQLLESGGGLVQPGGSLRLSCAASGFIFSSYAMSWVRQAPGKGQEWVSGVSGTGVNTYYADSVKGRFTISRDNSKNTLYLQMNSLRAEDTAVYYCASGKGWDSGSWYEDYRGQGTLVTVSSGTGGGGSGGGGSGGGGSEFDIQMTQSPSSLSASVGDRVTITCKASDHINNWLAWYQQKPGQAPKLLIYGATTLETGVPSRFSGSGSGTDYTLTISSLQPEDFATYYCQQSWNTPWTFGQGTKLEIKRLEGKPIPNPLLGLDSTGSGDKQLDADVSPKPTIFLPSIAETKLQKAGTYLCLLEKFFPDVIKIHWQEKKSNTILGSQEGNTMKTNDTYMKFSWLTVPEKSLDKEHRCIVRHENNKNGVDQEIIFPPIKTDVITMDPKDNCSKDANDTLLLQLTNTSAYYMYLLLLLKSVVYFAIITCCLLRRTAFCCNGEKSRAKRSGSGATNFSLLKQAGDVEENPGPTSMDWIWRILFLVGAATGAHSFEQVQLQQPGAELVKPGASVKMSCKASGYAFSSYWINWMKQKPGQGLEWIGQIYPGDGDTNYNGKFKGRATLTADTSSSTAYMQLSSLTSEDSAVYFCARSITTVVGCAMDYWGQGTSVTVSSTREQKLISEEDGSGSQPHTKPSVFVMKNGTNVACLVKEFYPKDIRINLVSSKKITEFDPAIVISPSGKYNAVKLGKYEDSNSVTCSVQHDNKTVHSTDFEVKTDSTDHVKPKETENTKQPSKSCHKPKAIVHTEKVNMMSLTVLGLRMLFAKTVAVNFLLTAKLFFLRAKRSGSGVKQTLNFDLLKLAGDVESNPGPSRGHMTEYKPTVRLATRDDVPRAVRTLAAAFADYPATRHTVDPDRHIERVTELQELFLTRVGLDIGKVWVADDGAAVAVWTTPESVEAGAVFAEIGPRMAELSGSRLAAQQQMEGLLAPHRPKEPAWFLATVGVSPDHQGKGLGSAVVLPGVEAAERAGVPAFLETSAPRNLPFYERLGFTVTADVEVPEGPRTWCMTRKPGA

SEQ ID NO: 16023 - protein, 900 aa, Artificial Sequence
  Synthetic Polypeptide
MALPVTALLLPLALLLHAARPEVQLLESGGGLVQPGGSLRLSCAASGFTFSSYAMSWVRQAPGKGLEWVSSISGSGDYIYYADSVKGRFTISRDISKNTLYLQMNSLRAEDTAVYYCAKEGTGANSSLADYRGQGTLVTVSSGGGSGGGSEVQLLESGGGLVQPGGSLRLSCAASGFIFSSYAMSWVRQAPGKGQEWVSGVSGTGVNTYYADSVKGRFTISRDNSKNTLYLQMNSLRAEDTAVYYCASGKGWDSGSWYEDYRGQGTLVTVSSGTGGGGSGGGGSGGGGSEFDIQMTQSPSSLSASVGDRVTITCKASDHINNWLAWYQQKPGQAPKLLIYGATTLETGVPSRFSGSGSGTDYTLTISSLQPEDFATYYCQQSWNTPWTFGQGTKLEIKRLESQPHTKPSVFVMKNGTNVACLVKEFYPKDIRINLVSSKKITEFDPAIVISPSGKYNAVKLGKYEDSNSVTCSVQHDNKTVHSTDFEVKTDSTDHVKPKETENTKQPSKSCHKPKAIVHTEKVNMMSLTVLGLRMLFAKTVAVNFLLTAKLFFLRAKRSGSGATNFSLLKQAGDVEENPGPTSMDWIWRILFLVGAATGAHSFEQVQLQQPGAELVKPGASVKMSCKASGYAFSSYWINWMKQKPGQGLEWIGQIYPGDGDTNYNGKFKGRATLTADTSSSTAYMQLSSLTSEDSAVYFCARSITTVVGCAMDYWGQGTSVTVSSTRDKQLDADVSPKPTIFLPSIAETKLQKAGTYLCLLEKFFPDVIKIHWQEKKSNTILGSQEGNTMKTNDTYMKFSWLTVPEKSLDKEHRCIVRHENNKNGVDQEIIFPPIKTDVITMDPKDNCSKDANDTLLLQLTNTSAYYMYLLLLLKSVVYFAIITCCLLRRTAFCCNGEKS

SEQ ID NO: 16024 - protein, 1177 aa, Artificial Sequence
  Synthetic Polypeptide
MALPVTALLLPLALLLHAARPLEGKPIPNPLLGLDSTGSGDKQLDADVSPKPTIFLPSIAETKLQKAGTYLCLLEKFFPDVIKIHWQEKKSNTILGSQEGNTMKTNDTYMKFSWLTVPEKSLDKEHRCIVRHENNKNGVDQEIIFPPIKTDVITMDPKDNCSKDANDTLLLQLTNTSAYYMYLLLLLKSVVYFAIITCCLLRRTAFCCNGEKSRAKRSGSGATNFSLLKQAGDVEENPGPTSMALPVTALLLPLALLLHAARPEVQLLESGGGLVQPGGSLRLSCAASGFTFSSYAMSWVRQAPGKGLEWVSSISGSGDYIYYADSVKGRFTISRDISKNTLYLQMNSLRAEDTAVYYCAKEGTGANSSLADYRGQGTLVTVSSGGGSGGGSEVQLLESGGGLVQPGGSLRLSCAASGFIFSSYAMSWVRQAPGKGQEWVSGVSGTGVNTYYADSVKGRFTISRDNSKNTLYLQMNSLRAEDTAVYYCASGKGWDSGSWYEDYRGQGTLVTVSSGTGGGGSGGGGSGGGGSEFDIQMTQSPSSLSASVGDRVTITCKASDHINNWLAWYQQKPGQAPKLLIYGATTLETGVPSRFSGSGSGTDYTLTISSLQPEDFATYYCQQSWNTPWTFGQGTKLEIKRGGGGSGGGGSGGGGSQVQLQQPGAELVKPGASVKMSCKASGYAFSSYWINWMKQKPGQGLEWIGQIYPGDGDTNYNGKFKGRATLTADTSSSTAYMQLSSLTSEDSAVYFCARSITTVVGCAMDYWGQGTSVTVSSTREQKLISEEDGSGSQPHTKPSVFVMKNGTNVACLVKEFYPKDIRINLVSSKKITEFDPAIVISPSGKYNAVKLGKYEDSNSVTCSVQHDNKTVHSTDFEVKTDSTDHVKPKETENTKQPSKSCHKPKAIVHTEKVNMMSLTVLGLRMLFAKTVAVNFLLTAKLFFLRAKRSGSGVKQTLNFDLLKLAGDVESNPGPSRGHMTEYKPTVRLATRDDVPRAVRTLAAAFADYPATRHTVDPDRHIERVTELQELFLTRVGLDIGKVWVADDGAAVAVWTTPESVEAGAVFAEIGPRMAELSGSRLAAQQQMEGLLAPHRPKEPAWFLATVGVSPDHQGKGLGSAVVLPGVEAAERAGVPAFLETSAPRNLPFYERLGFTVTADVEVPEGPRTWCMTRKPGA

SEQ ID NO: 16025 - protein, 1302 aa, Artificial Sequence
  Synthetic Polypeptide
MALPVTALLLPLALLLHAARPEVQLLESGGGLVQPGGSLRLSCAASGFTFSSYAMSWVRQAPGKGLEWVSSISGSGDYIYYADSVKGRFTISRDISKNTLYLQMNSLRAEDTAVYYCAKEGTGANSSLADYRGQGTLVTVSSGGGSGGGSEVQLLESGGGLVQPGGSLRLSCAASGFIFSSYAMSWVRQAPGKGQEWVSGVSGTGVNTYYADSVKGRFTISRDNSKNTLYLQMNSLRAEDTAVYYCASGKGWDSGSWYEDYRGQGTLVTVSSGTGGGGSGGGGSGGGGSEFDIQMTQSPSSLSASVGDRVTITCKASDHINNWLAWYQQKPGQAPKLLIYGATTLETGVPSRFSGSGSGTDYTLTISSLQPEDFATYYCQQSWNTPWTFGQGTKLEIKRGQPKANPTVTLFPPSSEELQANKATLVCLISDFYPGAVTVAWKADGSPVKAGVETTKPSKQSNNKYAASSYLSLTPEQWKSHRSYSCQVTHEGSTVEKTVAPTECSGSQSFGLLDPKLCYLLDGILFIYGVILTALFLRVKFSRSADAPAYQQGQNQLYNELNLGRREEYDVLDKRRGRDPEMGGKPQRRKNPQEGLYNELQKDKMAEAYSEIGMKGERRRGKGHDGLYQGLSTATKDTYDALHMQALPPRRAKRSGSGATNFSLLKQAGDVEENPGPTSMDWIWRILFLVGAATGAHSFEQVQLQQPGAELVKPGASVKMSCKASGYAFSSYWINWMKQKPGQGLEWIGQIYPGDGDTNYNGKFKGRATLTADTSSSTAYMQLSSLTSEDSAVYFCARSITTVVGCAMDYWGQGTSVTVSSASTKGPSVFPLAPSSKSTSGGTAALGCLVKDYFPEPVTVSWNSGALTSGVHTFPAVLQSSGLYSLSSVVTVPSSSLGTQTYICNVNHKPSNTKVDKRVEPKSCGTQSFGLLDPKLCYLLDGILFIYGVILTALFLRVKFSRSADAPAYQQGQNQLYNELNLGRREEYDVLDKRRGRDPEMGGKPQRRKNPQEGLYNELQKDKMAEAYSEIGMKGERRRGKGHDGLYQGLSTATKDTYDALHMQALPPRRAKRSGSGVKQTLNFDLLKLAGDVESNPGPSRGHMTEYKPTVRLATRDDVPRAVRTLAAAFADYPATRHTVDPDRHIERVTELQELFLTRVGLDIGKVWVADDGAAVAVWTTPESVEAGAVFAEIGPRMAELSGSRLAAQQQMEGLLAPHRPKEPAWFLATVGVSPDHQGKGLGSAVVLPGVEAAERAGVPAFLETSAPRNLPFYERLGFTVTADVEVPEGPRTWCMTRKPGA

SEQ ID NO: 16026 - protein, 1088 aa, Artificial Sequence
  Synthetic Polypeptide
MALPVTALLLPLALLLHAARPEVQLLESGGGLVQPGGSLRLSCAASGFTFSSYAMSWVRQAPGKGLEWVSSISGSGDYIYYADSVKGRFTISRDISKNTLYLQMNSLRAEDTAVYYCAKEGTGANSSLADYRGQGTLVTVSSGGGSGGGSEVQLLESGGGLVQPGGSLRLSCAASGFIFSSYAMSWVRQAPGKGQEWVSGVSGTGVNTYYADSVKGRFTISRDNSKNTLYLQMNSLRAEDTAVYYCASGKGWDSGSWYEDYRGQGTLVTVSSGTGGGGSGGGGSGGGGSEFDIQMTQSPSSLSASVGDRVTITCKASDHINNWLAWYQQKPGQAPKLLIYGATTLETGVPSRFSGSGSGTDYTLTISSLQPEDFATYYCQQSWNTPWTFGQGTKLEIKRLEDLKNVFPPEVAVFEPSEAEISHTQKATLVCLATGFYPDHVELSWWVNGKEVHSGVSTDPQPLKEQPALNDSRYCLSSRLRVSATFWQNPRNHFRCQVQFYGLSENDEWTQDRAKPVTQIVSAEAWGRADCGSQSFGLLDPKLCYLLDGILFIYGVILTALFLRVKFSRSADAPAYQQGQNQLYNELNLGRREEYDVLDKRRGRDPEMGGKPQRRKNPQEGLYNELQKDKMAEAYSEIGMKGERRRGKGHDGLYQGLSTATKDTYDALHMQALPPRRAKRSGSGATNFSLLKQAGDVEENPGPTSMDWIWRILFLVGAATGAHSFEQVQLQQPGAELVKPGASVKMSCKASGYAFSSYWINWMKQKPGQGLEWIGQIYPGDGDTNYNGKFKGRATLTADTSSSTAYMQLSSLTSEDSAVYFCARSITTVVGCAMDYWGQGTSVTVSSTRIQNPDPAVYQLRDSKSSDKSVCLFTDFDSQTNVSQSKDSDVYITDKTVLDMRSMDFKSNSAVAWSNKSDFACANAFNNSIIPEDTFFPSPESSCGTQSFGLLDPKLCYLLDGILFIYGVILTALFLRVKFSRSADAPAYQQGQNQLYNELNLGRREEYDVLDKRRGRDPEMGGKPQRRKNPQEGLYNELQKDKMAEAYSEIGMKGERRRGKGHDGLYQGLSTATKDTYDALHMQALPPR

SEQ ID NO: 16027 - protein, 1088 aa, Artificial Sequence
  Synthetic Polypeptide
MALPVTALLLPLALLLHAARPEVQLLESGGGLVQPGGSLRLSCAASGFTFSSYAMSWVRQAPGKGLEWVSSISGSGDYIYYADSVKGRFTISRDISKNTLYLQMNSLRAEDTAVYYCAKEGTGANSSLADYRGQGTLVTVSSGGGSGGGSEVQLLESGGGLVQPGGSLRLSCAASGFIFSSYAMSWVRQAPGKGQEWVSGVSGTGVNTYYADSVKGRFTISRDNSKNTLYLQMNSLRAEDTAVYYCASGKGWDSGSWYEDYRGQGTLVTVSSGTGGGGSGGGGSGGGGSEFDIQMTQSPSSLSASVGDRVTITCKASDHINNWLAWYQQKPGQAPKLLIYGATTLETGVPSRFSGSGSGTDYTLTISSLQPEDFATYYCQQSWNTPWTFGQGTKLEIKRLEDLKNVFPPEVAVFEPSKAEIAHTQKATLVCLATGFYPDHVELSWWVNGKEVHSGVCTDPQPLKEQPALNDSRYCLSSRLRVSATFWQNPRNHFRCQVQFYGLSENDEWTQDRAKPVTQIVSAEAWGRADCGSQSFGLLDPKLCYLLDGILFIYGVILTALFLRVKFSRSADAPAYQQGQNQLYNELNLGRREEYDVLDKRRGRDPEMGGKPQRRKNPQEGLYNELQKDKMAEAYSEIGMKGERRRGKGHDGLYQGLSTATKDTYDALHMQALPPRRAKRSGSGATNFSLLKQAGDVEENPGPTSMDWIWRILFLVGAATGAHSFEQVQLQQPGAELVKPGASVKMSCKASGYAFSSYWINWMKQKPGQGLEWIGQIYPGDGDTNYNGKFKGRATLTADTSSSTAYMQLSSLTSEDSAVYFCARSITTVVGCAMDYWGQGTSVTVSSTRIQNPDPAVYQLRDSKSSDKSVCLFTDFDSQTNVSQSKDSDVYITDKCVLDMRSMDFKSNSAVAWSNKSDFACANAFNNSIIPEDTFFPSSDVPCGTQSFGLLDPKLCYLLDGILFIYGVILTALFLRVKFSRSADAPAYQQGQNQLYNELNLGRREEYDVLDKRRGRDPEMGGKPQRRKNPQEGLYNELQKDKMAEAYSEIGMKGERRRGKGHDGLYQGLSTATKDTYDALHMQALPPR

SEQ ID NO: 16028 - protein, 1159 aa, Artificial Sequence
  Synthetic Polypeptide
MALPVTALLLPLALLLHAARPEVQLLESGGGLVQPGGSLRLSCAASGFTFSSYAMSWVRQAPGKGLEWVSSISGSGDYIYYADSVKGRFTISRDISKNTLYLQMNSLRAEDTAVYYCAKEGTGANSSLADYRGQGTLVTVSSGGGSGGGSEVQLLESGGGLVQPGGSLRLSCAASGFIFSSYAMSWVRQAPGKGQEWVSGVSGTGVNTYYADSVKGRFTISRDNSKNTLYLQMNSLRAEDTAVYYCASGKGWDSGSWYEDYRGQGTLVTVSSGTGGGGSGGGGSGGGGSEFDIQMTQSPSSLSASVGDRVTITCKASDHINNWLAWYQQKPGQAPKLLIYGATTLETGVPSRFSGSGSGTDYTLTISSLQPEDFATYYCQQSWNTPWTFGQGTKLEIKRLEGKPIPNPLLGLDSTGSGEDLKNVFPPEVAVFEPSEAEISHTQKATLVCLATGFYPDHVELSWWVNGKEVHSGVSTDPQPLKEQPALNDSRYCLSSRLRVSATFWQNPRNHFRCQVQFYGLSENDEWTQDRAKPVTQIVSAEAWGRADCGSQSFGLLDPKLCYLLDGILFIYGVILTALFLRVKFSRSADAPAYQQGQNQLYNELNLGRREEYDVLDKRRGRDPEMGGKPQRRKNPQEGLYNELQKDKMAEAYSEIGMKGERRRGKGHDGLYQGLSTATKDTYDALHMQALPPRRAKRSGSGATNFSLLKQAGDVEENPGPTSMDWIWRILFLVGAATGAHSFEQVQLQQPGAELVKPGASVKMSCKASGYAFSSYWINWMKQKPGQGLEWIGQIYPGDGDTNYNGKFKGRATLTADTSSSTAYMQLSSLTSEDSAVYFCARSITTVVGCAMDYWGQGTSVTVSSTREQKLISEEDGSGIQNPDPAVYQLRDSKSSDKSVCLFTDFDSQTNVSQSKDSDVYITDKTVLDMRSMDFKSNSAVAWSNKSDFACANAFNNSIIPEDTFFPSPESSCGTQSFGLLDPKLCYLLDGILFIYGVILTALFLRSKRSRLLHSDYMNMTPRRPGPTRKHYQPYAPPRDFAAYRSRVKFSRSADAPAYQQGQNQLYNELNLGRREEYDVLDKRRGRDPEMGGKPQRRKNPQEGLYNELQKDKMAEAYSEIGMKGERRRGKGHDGLYQGLSTATKDTYDALHMQALPPR

SEQ ID NO: 16029 - protein, 1200 aa, Artificial Sequence
  Synthetic Polypeptide
MALPVTALLLPLALLLHAARPEVQLLESGGGLVQPGGSLRLSCAASGFTFSSYAMSWVRQAPGKGLEWVSSISGSGDYIYYADSVKGRFTISRDISKNTLYLQMNSLRAEDTAVYYCAKEGTGANSSLADYRGQGTLVTVSSGGGSGGGSEVQLLESGGGLVQPGGSLRLSCAASGFIFSSYAMSWVRQAPGKGQEWVSGVSGTGVNTYYADSVKGRFTISRDNSKNTLYLQMNSLRAEDTAVYYCASGKGWDSGSWYEDYRGQGTLVTVSSGTGGGGSGGGGSGGGGSEFDIQMTQSPSSLSASVGDRVTITCKASDHINNWLAWYQQKPGQAPKLLIYGATTLETGVPSRFSGSGSGTDYTLTISSLQPEDFATYYCQQSWNTPWTFGQGTKLEIKRLEGKPIPNPLLGLDSTGSGEDLKNVFPPEVAVFEPSEAEISHTQKATLVCLATGFYPDHVELSWWVNGKEVHSGVSTDPQPLKEQPALNDSRYCLSSRLRVSATFWQNPRNHFRCQVQFYGLSENDEWTQDRAKPVTQIVSAEAWGRADCGSQSFGLLDPKLCYLLDGILFIYGVILTALFLRSKRSRLLHSDYMNMTPRRPGPTRKHYQPYAPPRDFAAYRSRVKFSRSADAPAYQQGQNQLYNELNLGRREEYDVLDKRRGRDPEMGGKPQRRKNPQEGLYNELQKDKMAEAYSEIGMKGERRRGKGHDGLYQGLSTATKDTYDALHMQALPPRRAKRSGSGATNFSLLKQAGDVEENPGPTSMDWIWRILFLVGAATGAHSFEQVQLQQPGAELVKPGASVKMSCKASGYAFSSYWINWMKQKPGQGLEWIGQIYPGDGDTNYNGKFKGRATLTADTSSSTAYMQLSSLTSEDSAVYFCARSITTVVGCAMDYWGQGTSVTVSSTREQKLISEEDGSGIQNPDPAVYQLRDSKSSDKSVCLFTDFDSQTNVSQSKDSDVYITDKTVLDMRSMDFKSNSAVAWSNKSDFACANAFNNSIIPEDTFFPSPESSCGTQSFGLLDPKLCYLLDGILFIYGVILTALFLRSKRSRLLHSDYMNMTPRRPGPTRKHYQPYAPPRDFAAYRSRVKFSRSADAPAYQQGQNQLYNELNLGRREEYDVLDKRRGRDPEMGGKPQRRKNPQEGLYNELQKDKMAEAYSEIGMKGERRRGKGHDGLYQGLSTATKDTYDALHMQALPPR

SEQ ID NO: 16030 - protein, 1161 aa, Artificial Sequence
  Synthetic Polypeptide
MALPVTALLLPLALLLHAARPEVQLLESGGGLVQPGGSLRLSCAASGFTFSSYAMSWVRQAPGKGLEWVSSISGSGDYIYYADSVKGRFTISRDISKNTLYLQMNSLRAEDTAVYYCAKEGTGANSSLADYRGQGTLVTVSSGGGSGGGSEVQLLESGGGLVQPGGSLRLSCAASGFIFSSYAMSWVRQAPGKGQEWVSGVSGTGVNTYYADSVKGRFTISRDNSKNTLYLQMNSLRAEDTAVYYCASGKGWDSGSWYEDYRGQGTLVTVSSGTGGGGSGGGGSGGGGSEFDIQMTQSPSSLSASVGDRVTITCKASDHINNWLAWYQQKPGQAPKLLIYGATTLETGVPSRFSGSGSGTDYTLTISSLQPEDFATYYCQQSWNTPWTFGQGTKLEIKRLEGKPIPNPLLGLDSTGSGEDLKNVFPPEVAVFEPSEAEISHTQKATLVCLATGFYPDHVELSWWVNGKEVHSGVSTDPQPLKEQPALNDSRYCLSSRLRVSATFWQNPRNHFRCQVQFYGLSENDEWTQDRAKPVTQIVSAEAWGRADCGSQSFGLLDPKLCYLLDGILFIYGVILTALFLRVKFSRSADAPAYQQGQNQLYNELNLGRREEYDVLDKRRGRDPEMGGKPQRRKNPQEGLYNELQKDKMAEAYSEIGMKGERRRGKGHDGLYQGLSTATKDTYDALHMQALPPRRAKRSGSGATNFSLLKQAGDVEENPGPTSMDWIWRILFLVGAATGAHSFEQVQLQQPGAELVKPGASVKMSCKASGYAFSSYWINWMKQKPGQGLEWIGQIYPGDGDTNYNGKFKGRATLTADTSSSTAYMQLSSLTSEDSAVYFCARSITTVVGCAMDYWGQGTSVTVSSTREQKLISEEDLGSGIQNPDPAVYQLRDSKSSDKSVCLFTDFDSQTNVSQSKDSDVYITDKTVLDMRSMDFKSNSAVAWSNKSDFACANAFNNSIIPEDTFFPSPESSCGTQSFGLLDPKLCYLLDGILFIYGVILTALFLKRGRKKLLYIFKQPFMRPVQTTQEEDGCSCRFPEEEEGGCELRVKFSRSADAPAYQQGQNQLYNELNLGRREEYDVLDKRRGRDPEMGGKPQRRKNPQEGLYNELQKDKMAEAYSEIGMKGERRRGKGHDGLYQGLSTATKDTYDALHMQALPPR

SEQ ID NO: 16031 - protein, 1203 aa, Artificial Sequence
  Synthetic Polypeptide
MALPVTALLLPLALLLHAARPEVQLLESGGGLVQPGGSLRLSCAASGFTFSSYAMSWVRQAPGKGLEWVSSISGSGDYIYYADSVKGRFTISRDISKNTLYLQMNSLRAEDTAVYYCAKEGTGANSSLADYRGQGTLVTVSSGGGSGGGSEVQLLESGGGLVQPGGSLRLSCAASGFIFSSYAMSWVRQAPGKGQEWVSGVSGTGVNTYYADSVKGRFTISRDNSKNTLYLQMNSLRAEDTAVYYCASGKGWDSGSWYEDYRGQGTLVTVSSGTGGGGSGGGGSGGGGSEFDIQMTQSPSSLSASVGDRVTITCKASDHINNWLAWYQQKPGQAPKLLIYGATTLETGVPSRFSGSGSGTDYTLTISSLQPEDFATYYCQQSWNTPWTFGQGTKLEIKRLEGKPIPNPLLGLDSTGSGEDLKNVFPPEVAVFEPSEAEISHTQKATLVCLATGFYPDHVELSWWVNGKEVHSGVSTDPQPLKEQPALNDSRYCLSSRLRVSATFWQNPRNHFRCQVQFYGLSENDEWTQDRAKPVTQIVSAEAWGRADCGSQSFGLLDPKLCYLLDGILFIYGVILTALFLKRGRKKLLYIFKQPFMRPVQTTQEEDGCSCRFPEEEEGGCELRVKFSRSADAPAYQQGQNQLYNELNLGRREEYDVLDKRRGRDPEMGGKPQRRKNPQEGLYNELQKDKMAEAYSEIGMKGERRRGKGHDGLYQGLSTATKDTYDALHMQALPPRRAKRSGSGATNFSLLKQAGDVEENPGPTSMDWIWRILFLVGAATGAHSFEQVQLQQPGAELVKPGASVKMSCKASGYAFSSYWINWMKQKPGQGLEWIGQIYPGDGDTNYNGKFKGRATLTADTSSSTAYMQLSSLTSEDSAVYFCARSITTVVGCAMDYWGQGTSVTVSSTREQKLISEEDLGSGIQNPDPAVYQLRDSKSSDKSVCLFTDFDSQTNVSQSKDSDVYITDKTVLDMRSMDFKSNSAVAWSNKSDFACANAFNNSIIPEDTFFPSPESSCGTQSFGLLDPKLCYLLDGILFIYGVILTALFLKRGRKKLLYIFKQPFMRPVQTTQEEDGCSCRFPEEEEGGCELRVKFSRSADAPAYQQGQNQLYNELNLGRREEYDVLDKRRGRDPEMGGKPQRRKNPQEGLYNELQKDKMAEAYSEIGMKGERRRGKGHDGLYQGLSTATKDTYDALHMQALPPR

SEQ ID NO: 16032 - protein, 1093 aa, Artificial Sequence
  Synthetic Polypeptide
MALPVTALLLPLALLLHAARPEVQLLESGGGLVQPGGSLRLSCAASGFTFSSYAMSWVRQAPGKGLEWVSSISGSGDYIYYADSVKGRFTISRDISKNTLYLQMNSLRAEDTAVYYCAKEGTGANSSLADYRGQGTLVTVSSGGGSGGGSEVQLLESGGGLVQPGGSLRLSCAASGFIFSSYAMSWVRQAPGKGQEWVSGVSGTGVNTYYADSVKGRFTISRDNSKNTLYLQMNSLRAEDTAVYYCASGKGWDSGSWYEDYRGQGTLVTVSSGTGGGGSGGGGSGGGGSEFDIQMTQSPSSLSASVGDRVTITCKASDHINNWLAWYQQKPGQAPKLLIYGATTLETGVPSRFSGSGSGTDYTLTISSLQPEDFATYYCQQSWNTPWTFGQGTKLEIKRLEQSFGLLDPKLCYLLDGILFIYGVILTALFLRVKFSRSADAPAYQQGQNQLYNELNLGRREEYDVLDKRRGRDPEMGGKPQRRKNPQEGLYNELQKDKMAEAYSEIGMKGERRRGKGHDGLYQGLSTATKDTYDALHMQALPPRRAKRSGSGATNFSLLKQAGDVEENPGPTSMDWIWRILFLVGAATGAHSFEQVQLQQPGAELVKPGASVKMSCKASGYAFSSYWINWMKQKPGQGLEWIGQIYPGDGDTNYNGKFKGRATLTADTSSSTAYMQLSSLTSEDSAVYFCARSITTVVGCAMDYWGQGTSVTVSSTRQSFGLLDPKLCYLLDGILFIYGVILTALFLRVKFSRSADAPAYQQGQNQLYNELNLGRREEYDVLDKRRGRDPEMGGKPQRRKNPQEGLYNELQKDKMAEAYSEIGMKGERRRGKGHDGLYQGLSTATKDTYDALHMQALPPRRAKRSGSGVKQTLNFDLLKLAGDVESNPGPSRGHMTEYKPTVRLATRDDVPRAVRTLAAAFADYPATRHTVDPDRHIERVTELQELFLTRVGLDIGKVWVADDGAAVAVWTTPESVEAGAVFAEIGPRMAELSGSRLAAQQQMEGLLAPHRPKEPAWFLATVGVSPDHQGKGLGSAVVLPGVEAAERAGVPAFLETSAPRNLPFYERLGFTVTADVEVPEGPRTWCMTRKPGA

SEQ ID NO: 16033 - protein, 918 aa, Artificial Sequence
  Synthetic Polypeptide
MALPVTALLLPLALLLHAARPEVQLLESGGGLVQPGGSLRLSCAASGFTFSSYAMSWVRQAPGKGLEWVSSISGSGDYIYYADSVKGRFTISRDISKNTLYLQMNSLRAEDTAVYYCAKEGTGANSSLADYRGQGTLVTVSSGGGSGGGSEVQLLESGGGLVQPGGSLRLSCAASGFIFSSYAMSWVRQAPGKGQEWVSGVSGTGVNTYYADSVKGRFTISRDNSKNTLYLQMNSLRAEDTAVYYCASGKGWDSGSWYEDYRGQGTLVTVSSGTGGGGSGGGGSGGGGSEFDIQMTQSPSSLSASVGDRVTITCKASDHINNWLAWYQQKPGQAPKLLIYGATTLETGVPSRFSGSGSGTDYTLTISSLQPEDFATYYCQQSWNTPWTFGQGTKLEIKRLEGQPKANPTVTLFPPSSEELQANKATLVCLISDFYPGAVTVAWKADGSPVKAGVETTKPSKQSNNKYAASSYLSLTPEQWKSHRSYSCQVTHEGSTVEKTVAPTECSPIKTDVITMDPKDNCSKDANDTLLLQLTNTSAYYMYLLLLLKSVVYFAIITCCLLRRTAFCCNGEKSRAKRSGSGATNFSLLKQAGDVEENPGPTSMDWIWRILFLVGAATGAHSFEQVQLQQPGAELVKPGASVKMSCKASGYAFSSYWINWMKQKPGQGLEWIGQIYPGDGDTNYNGKFKGRATLTADTSSSTAYMQLSSLTSEDSAVYFCARSITTVVGCAMDYWGQGTSVTVSSTRASTKGPSVFPLAPSSKSTSGGTAALGCLVKDYFPEPVTVSWNSGALTSGVHTFPAVLQSSGLYSLSSVVTVPSSSLGTQTYICNVNHKPSNTKVDKRVEPKSCEVKTDSTDHVKPKETENTKQPSKSCHKPKAIVHTEKVNMMSLTVLGLRMLFAKTVAVNFLLTAKLFFL

SEQ ID NO: 16034 - protein, 896 aa, Artificial Sequence
  Synthetic Polypeptide
MALPVTALLLPLALLLHAARPEVQLLESGGGLVQPGGSLRLSCAASGFTFSSYAMSWVRQAPGKGLEWVSSISGSGDYIYYADSVKGRFTISRDISKNTLYLQMNSLRAEDTAVYYCAKEGTGANSSLADYRGQGTLVTVSSGGGSGGGSEVQLLESGGGLVQPGGSLRLSCAASGFIFSSYAMSWVRQAPGKGQEWVSGVSGTGVNTYYADSVKGRFTISRDNSKNTLYLQMNSLRAEDTAVYYCASGKGWDSGSWYEDYRGQGTLVTVSSGTGGGGSGGGGSGGGGSEFDIQMTQSPSSLSASVGDRVTITCKASDHINNWLAWYQQKPGQAPKLLIYGATTLETGVPSRFSGSGSGTDYTLTISSLQPEDFATYYCQQSWNTPWTFGQGTKLEIKRLEGQPKANPTVTLFPPSSEELQANKATLVCLISDFYPGAVTVAWKADGSPVKAGVETTKPSKQSNNKYAASSYLSLTPEQWKSHRSYSCQVTHEGSTVEKTVAPTECSGRADCGITSASYHQGVLSATILYEILLGKATLYAVLVSALVLMAMVKRKDSRGRAKRSGSGATNFSLLKQAGDVEENPGPTSMDWIWRILFLVGAATGAHSFEQVQLQQPGAELVKPGASVKMSCKASGYAFSSYWINWMKQKPGQGLEWIGQIYPGDGDTNYNGKFKGRATLTADTSSSTAYMQLSSLTSEDSAVYFCARSITTVVGCAMDYWGQGTSVTVSSTRASTKGPSVFPLAPSSKSTSGGTAALGCLVKDYFPEPVTVSWNSGALTSGVHTFPAVLQSSGLYSLSSVVTVPSSSLGTQTYICNVNHKPSNTKVDKRVEPKSCIPEDTFFPSSDVPCDVKLVEKSFETDTNLNFQNLSVIGFRILLLKVAGFNLLMTLRLWSS

SEQ ID NO: 16035 - protein, 896 aa, Artificial Sequence
  Synthetic Polypeptide
MALPVTALLLPLALLLHAARPEVQLLESGGGLVQPGGSLRLSCAASGFTFSSYAMSWVRQAPGKGLEWVSSISGSGDYIYYADSVKGRFTISRDISKNTLYLQMNSLRAEDTAVYYCAKEGTGANSSLADYRGQGTLVTVSSGGGSGGGSEVQLLESGGGLVQPGGSLRLSCAASGFIFSSYAMSWVRQAPGKGQEWVSGVSGTGVNTYYADSVKGRFTISRDNSKNTLYLQMNSLRAEDTAVYYCASGKGWDSGSWYEDYRGQGTLVTVSSGTGGGGSGGGGSGGGGSEFDIQMTQSPSSLSASVGDRVTITCKASDHINNWLAWYQQKPGQAPKLLIYGATTLETGVPSRFSGSGSGTDYTLTISSLQPEDFATYYCQQSWNTPWTFGQGTKLEIKRLEGQPKANPTVTLFPPSSEELQANKATLVCLISDFYPGAVTVAWKADGSPVKAGVETTKPSKQSNNKYAASSYLSLTPEQWKSHRSYSCQVTHEGSTVEKTVAPTECSGRADCGFTSESYQQGVLSATILYEILLGKATLYAVLVSALVLMAMVKRKDSRGRAKRSGSGATNFSLLKQAGDVEENPGPTSMDWIWRILFLVGAATGAHSFEQVQLQQPGAELVKPGASVKMSCKASGYAFSSYWINWMKQKPGQGLEWIGQIYPGDGDTNYNGKFKGRATLTADTSSSTAYMQLSSLTSEDSAVYFCARSITTVVGCAMDYWGQGTSVTVSSTRASTKGPSVFPLAPSSKSTSGGTAALGCLVKDYFPEPVTVSWNSGALTSGVHTFPAVLQSSGLYSLSSVVTVPSSSLGTQTYICNVNHKPSNTKVDKRVEPKSCIPEDTFFPSPESSCDVKLVEKSFETDTNLNFQNLSVIGFRILLLKVAGFNLLMTLRLWSS

SEQ ID NO: 16036 - protein, 722 aa, Artificial Sequence
  Synthetic Polypeptide
MALPVTALLLPLALLLHAARPEVQLLESGGGLVQPGGSLRLSCAASGFTFSSYAMSWVRQAPGKGLEWVSSISGSGDYIYYADSVKGRFTISRDISKNTLYLQMNSLRAEDTAVYYCAKEGTGANSSLADYRGQGTLVTVSSGGGSGGGSEVQLLESGGGLVQPGGSLRLSCAASGFIFSSYAMSWVRQAPGKGQEWVSGVSGTGVNTYYADSVKGRFTISRDNSKNTLYLQMNSLRAEDTAVYYCASGKGWDSGSWYEDYRGQGTLVTVSSGTGGGGSGGGGSGGGGSEFDIQMTQSPSSLSASVGDRVTITCKASDHINNWLAWYQQKPGQAPKLLIYGATTLETGVPSRFSGSGSGTDYTLTISSLQPEDFATYYCQQSWNTPWTFGQGTKLEIKRGGGGSGGGGSGGGGSQVQLQQPGAELVKPGASVKMSCKASGYAFSSYWINWMKQKPGQGLEWIGQIYPGDGDTNYNGKFKGRATLTADTSSSTAYMQLSSLTSEDSAVYFCARSITTVVGCAMDYWGQGTSVTVSSTRDGNEEMGGITQTPYKVSISGTTVILTCPQYPGSEILWQHNDKNIGGDEDDKNIGSDEDHLSLKEFSELEQSGYYVCYPRGSKPEDANFYLYLRARVCENCMEMDVMSVATIVIVDICITGGLLLLVYYWSKNRKAKAKPVTRGAGAGGRQRGQNKERPPPVPNPDYEPIRKGQRDLYSGLNQRRI

SEQ ID NO: 16037 - protein, 687 aa, Artificial Sequence
  Synthetic Polypeptide
MALPVTALLLPLALLLHAARPEVQLLESGGGLVQPGGSLRLSCAASGFTFSSYAMSWVRQAPGKGLEWVSSISGSGDYIYYADSVKGRFTISRDISKNTLYLQMNSLRAEDTAVYYCAKEGTGANSSLADYRGQGTLVTVSSGGGSGGGSEVQLLESGGGLVQPGGSLRLSCAASGFIFSSYAMSWVRQAPGKGQEWVSGVSGTGVNTYYADSVKGRFTISRDNSKNTLYLQMNSLRAEDTAVYYCASGKGWDSGSWYEDYRGQGTLVTVSSGTGGGGSGGGGSGGGGSEFDIQMTQSPSSLSASVGDRVTITCKASDHINNWLAWYQQKPGQAPKLLIYGATTLETGVPSRFSGSGSGTDYTLTISSLQPEDFATYYCQQSWNTPWTFGQGTKLEIKRGGGGSGGGGSGGGGSQVQLQQPGAELVKPGASVKMSCKASGYAFSSYWINWMKQKPGQGLEWIGQIYPGDGDTNYNGKFKGRATLTADTSSSTAYMQLSSLTSEDSAVYFCARSITTVVGCAMDYWGQGTSVTVSSTRFKIPIEELEDRVFVNCNTSITWVEGTVGTLLSDITRLDLGKRILDPRGIYRCNGTDIYKDKESTVQVHYRMCQSCVELDPATVAGIIVTDVIATLLLALGVFCFAGHETGRLSGAADTQALLRNDQVYQPLRDRDDAQYSHLGGNWARNK

SEQ ID NO: 16038 - protein, 697 aa, Artificial Sequence
  Synthetic Polypeptide
MALPVTALLLPLALLLHAARPEVQLLESGGGLVQPGGSLRLSCAASGFTFSSYAMSWVRQAPGKGLEWVSSISGSGDYIYYADSVKGRFTISRDISKNTLYLQMNSLRAEDTAVYYCAKEGTGANSSLADYRGQGTLVTVSSGGGSGGGSEVQLLESGGGLVQPGGSLRLSCAASGFIFSSYAMSWVRQAPGKGQEWVSGVSGTGVNTYYADSVKGRFTISRDNSKNTLYLQMNSLRAEDTAVYYCASGKGWDSGSWYEDYRGQGTLVTVSSGTGGGGSGGGGSGGGGSEFDIQMTQSPSSLSASVGDRVTITCKASDHINNWLAWYQQKPGQAPKLLIYGATTLETGVPSRFSGSGSGTDYTLTISSLQPEDFATYYCQQSWNTPWTFGQGTKLEIKRGGGGSGGGGSGGGGSQVQLQQPGAELVKPGASVKMSCKASGYAFSSYWINWMKQKPGQGLEWIGQIYPGDGDTNYNGKFKGRATLTADTSSSTAYMQLSSLTSEDSAVYFCARSITTVVGCAMDYWGQGTSVTVSSTRQSIKGNHLVKVYDYQEDGSVLLTCDAEAKNITWFKDGKMIGFLTEDKKKWNLGSNAKDPRGMYQCKGSQNKSKPLQVYYRMCQNCIELNAATISGFLFAEIVSIFVLAVGVYFIAGQDGVRQSRASDKQTLLPNDQLYQPLKDREDDQYSHLQGNQLRRN

SEQ ID NO: 16039 - protein, 680 aa, Artificial Sequence
  Synthetic Polypeptide
MALPVTALLLPLALLLHAARPEVQLLESGGGLVQPGGSLRLSCAASGFTFSSYAMSWVRQAPGKGLEWVSSISGSGDYIYYADSVKGRFTISRDISKNTLYLQMNSLRAEDTAVYYCAKEGTGANSSLADYRGQGTLVTVSSGGGSGGGSEVQLLESGGGLVQPGGSLRLSCAASGFIFSSYAMSWVRQAPGKGQEWVSGVSGTGVNTYYADSVKGRFTISRDNSKNTLYLQMNSLRAEDTAVYYCASGKGWDSGSWYEDYRGQGTLVTVSSGTGGGGSGGGGSGGGGSEFDIQMTQSPSSLSASVGDRVTITCKASDHINNWLAWYQQKPGQAPKLLIYGATTLETGVPSRFSGSGSGTDYTLTISSLQPEDFATYYCQQSWNTPWTFGQGTKLEIKRGGGGSGGGGSGGGGSQVQLQQPGAELVKPGASVKMSCKASGYAFSSYWINWMKQKPGQGLEWIGQIYPGDGDTNYNGKFKGRATLTADTSSSTAYMQLSSLTSEDSAVYFCARSITTVVGCAMDYWGQGTSVTVSSTRQSFGLLDPKLCYLLDGILFIYGVILTALFLRVKFSRSADAPAYQQGQNQLYNELNLGRREEYDVLDKRRGRDPEMGGKPQRRKNPQEGLYNELQKDKMAEAYSEIGMKGERRRGKGHDGLYQGLSTATKDTYDALHMQALPPR

SEQ ID NO: 16040 - protein, 913 aa, Artificial Sequence
  Synthetic Polypeptide
MALPVTALLLPLALLLHAARPEVQLLESGGGLVQPGGSLRLSCAASGFTFSSYAMSWVRQAPGKGLEWVSSISGSGDYIYYADSVKGRFTISRDISKNTLYLQMNSLRAEDTAVYYCAKEGTGANSSLADYRGQGTLVTVSSGGGSGGGSEVQLLESGGGLVQPGGSLRLSCAASGFIFSSYAMSWVRQAPGKGQEWVSGVSGTGVNTYYADSVKGRFTISRDNSKNTLYLQMNSLRAEDTAVYYCASGKGWDSGSWYEDYRGQGTLVTVSSGTGGGGSGGGGSGGGGSEFDIQMTQSPSSLSASVGDRVTITCKASDHINNWLAWYQQKPGQAPKLLIYGATTLETGVPSRFSGSGSGTDYTLTISSLQPEDFATYYCQQSWNTPWTFGQGTKLEIKRGGGGSGGGGSGGGGSQVQLQQPGAELVKPGASVKMSCKASGYAFSSYWINWMKQKPGQGLEWIGQIYPGDGDTNYNGKFKGRATLTADTSSSTAYMQLSSLTSEDSAVYFCARSITTVVGCAMDYWGQGTSVTVSSTRGSGIQNPDPAVYQLRDSKSSDKSVCLFTDFDSQTNVSQSKDSDVYITDKTVLDMRSMDFKSNSAVAWSNKSDFACANAFNNSIIPEDTFFPSPESSCDVKLVEKSFETDTNLNFQNLSVIGFRILLLKVAGFNLLMTLRLWSSRAKRSGSGVKQTLNFDLLKLAGDVESNPGPSRGHMTEYKPTVRLATRDDVPRAVRTLAAAFADYPATRHTVDPDRHIERVTELQELFLTRVGLDIGKVWVADDGAAVAVWTTPESVEAGAVFAEIGPRMAELSGSRLAAQQQMEGLLAPHRPKEPAWFLATVGVSPDHQGKGLGSAVVLPGVEAAERAGVPAFLETSAPRNLPFYERLGFTVTADVEVPEGPRTWCMTRKPGA

SEQ ID NO: 16041 - protein, 945 aa, Artificial Sequence
  Synthetic Polypeptide
MALPVTALLLPLALLLHAARPEVQLLESGGGLVQPGGSLRLSCAASGFTFSSYAMSWVRQAPGKGLEWVSSISGSGDYIYYADSVKGRFTISRDISKNTLYLQMNSLRAEDTAVYYCAKEGTGANSSLADYRGQGTLVTVSSGGGSGGGSEVQLLESGGGLVQPGGSLRLSCAASGFIFSSYAMSWVRQAPGKGQEWVSGVSGTGVNTYYADSVKGRFTISRDNSKNTLYLQMNSLRAEDTAVYYCASGKGWDSGSWYEDYRGQGTLVTVSSGTGGGGSGGGGSGGGGSEFDIQMTQSPSSLSASVGDRVTITCKASDHINNWLAWYQQKPGQAPKLLIYGATTLETGVPSRFSGSGSGTDYTLTISSLQPEDFATYYCQQSWNTPWTFGQGTKLEIKRGGGGSGGGGSGGGGSQVQLQQPGAELVKPGASVKMSCKASGYAFSSYWINWMKQKPGQGLEWIGQIYPGDGDTNYNGKFKGRATLTADTSSSTAYMQLSSLTSEDSAVYFCARSITTVVGCAMDYWGQGTSVTVSSLEDLKNVFPPEVAVFEPSEAEISHTQKATLVCLATGFYPDHVELSWWVNGKEVHSGVSTDPQPLKEQPALNDSRYCLSSRLRVSATFWQNPRNHFRCQVQFYGLSENDEWTQDRAKPVTQIVSAEAWGRADCGFTSESYQQGVLSATILYEILLGKATLYAVLVSALVLMAMVKRKDSRGRAKRSGSGATNFSLLKQAGDVEENPGPTRGHMTEYKPTVRLATRDDVPRAVRTLAAAFADYPATRHTVDPDRHIERVTELQELFLTRVGLDIGKVWVADDGAAVAVWTTPESVEAGAVFAEIGPRMAELSGSRLAAQQQMEGLLAPHRPKEPAWFLATVGVSPDHQGKGLGSAVVLPGVEAAERAGVPAFLETSAPRNLPFYERLGFTVTADVEVPEGPRTWCMTRKPGA

SEQ ID NO: 16042 - protein, 995 aa, Artificial Sequence
  Synthetic Polypeptide
MALPVTALLLPLALLLHAARPEVQLLESGGGLVQPGGSLRLSCAASGFTFSSYAMSWVRQAPGKGLEWVSSISGSGDYIYYADSVKGRFTISRDISKNTLYLQMNSLRAEDTAVYYCAKEGTGANSSLADYRGQGTLVTVSSGGGSGGGSEVQLLESGGGLVQPGGSLRLSCAASGFIFSSYAMSWVRQAPGKGQEWVSGVSGTGVNTYYADSVKGRFTISRDNSKNTLYLQMNSLRAEDTAVYYCASGKGWDSGSWYEDYRGQGTLVTVSSGTGGGGSGGGGSGGGGSEFDIQMTQSPSSLSASVGDRVTITCKASDHINNWLAWYQQKPGQAPKLLIYGATTLETGVPSRFSGSGSGTDYTLTISSLQPEDFATYYCQQSWNTPWTFGQGTKLEIKRGGGGSGGGGSGGGGSQVQLQQPGAELVKPGASVKMSCKASGYAFSSYWINWMKQKPGQGLEWIGQIYPGDGDTNYNGKFKGRATLTADTSSSTAYMQLSSLTSEDSAVYFCARSITTVVGCAMDYWGQGTSVTVSSTREQKLISEEDLGSGTPFPSLAPPIMLLVDGKQQMVVVCLVLDVAPPGLDSPIWFSAGNGSALDAFTYGPSPATDGTWTNLAHLSLPSEELASWEPLVCHTGPGAEGHSRSTQPMHLSGEASTARTCPQEPLRGTPGGALWLGVLRLLLFKLLLFDLLLTCSCLCDPAGPLPSPATTTRLRALGSHRLHPATETGGREATSSPRPQPRDRRWGDTPPGRKPGSPVRAKRSGSGVKQTLNFDLLKLAGDVESNPGPSRSRGHMTEYKPTVRLATRDDVPRAVRTLAAAFADYPATRHTVDPDRHIERVTELQELFLTRVGLDIGKVWVADDGAAVAVWTTPESVEAGAVFAEIGPRMAELSGSRLAAQQQMEGLLAPHRPKEPAWFLATVGVSPDHQGKGLGSAVVLPGVEAAERAGVPAFLETSAPRNLPFYERLGFTVTADVEVPEGPRTWCMTRKPGA

SEQ ID NO: 16043 - protein, 809 aa, Artificial Sequence
  Synthetic Polypeptide
MALPVTALLLPLALLLHAARPEVQLLESGGGLVQPGGSLRLSCAASGFTFSSYAMSWVRQAPGKGLEWVSSISGSGDYIYYADSVKGRFTISRDISKNTLYLQMNSLRAEDTAVYYCAKEGTGANSSLADYRGQGTLVTVSSGGGSGGGSEVQLLESGGGLVQPGGSLRLSCAASGFIFSSYAMSWVRQAPGKGQEWVSGVSGTGVNTYYADSVKGRFTISRDNSKNTLYLQMNSLRAEDTAVYYCASGKGWDSGSWYEDYRGQGTLVTVSSGTGGGGSGGGGSGGGGSEFDIQMTQSPSSLSASVGDRVTITCKASDHINNWLAWYQQKPGQAPKLLIYGATTLETGVPSRFSGSGSGTDYTLTISSLQPEDFATYYCQQSWNTPWTFGQGTKLEIKRLEDLKNVFPPEVAVFEPSEAEISHTQKATLVCLATGFYPDHVELSWWVNGKEVHSGVSTDPQPLKEQPALNDSRYCLSSRLRVSATFWQNPRNHFRCQVQFYGLSENDEWTQDRAKPVTQIVSAEAWGRADCGFTSESYQQGVLSATILYEILLGKATLYAVLVSALVLMAMVKRKDSRGRAKRSGSGATNFSLLKQAGDVEENPGPTRGHMTEYKPTVRLATRDDVPRAVRTLAAAFADYPATRHTVDPDRHIERVTELQELFLTRVGLDIGKVWVADDGAAVAVWTTPESVEAGAVFAEIGPRMAELSGSRLAAQQQMEGLLAPHRPKEPAWFLATVGVSPDHQGKGLGSAVVLPGVEAAERAGVPAFLETSAPRNLPFYERLGFTVTADVEVPEGPRTWCMTRKPGA

SEQ ID NO: 16044 - protein, 579 aa, Artificial Sequence
  Synthetic Polypeptide
MALPVTALLLPLALLLHAARPEVQLLESGGGLVQPGGSLRLSCAASGFTFSSYAMSWVRQAPGKGLEWVSSISGSGDYIYYADSVKGRFTISRDISKNTLYLQMNSLRAEDTAVYYCAKEGTGANSSLADYRGQGTLVTVSSGGGSGGGSEVQLLESGGGLVQPGGSLRLSCAASGFIFSSYAMSWVRQAPGKGQEWVSGVSGTGVNTYYADSVKGRFTISRDNSKNTLYLQMNSLRAEDTAVYYCASGKGWDSGSWYEDYRGQGTLVTVSSGTGGGGSGGGGSGGGGSEFDIQMTQSPSSLSASVGDRVTITCKASDHINNWLAWYQQKPGQAPKLLIYGATTLETGVPSRFSGSGSGTDYTLTISSLQPEDFATYYCQQSWNTPWTFGQGTKLEIKRLEDLKNVFPPEVAVFEPSEAEISHTQKATLVCLATGFYPDHVELSWWVNGKEVHSGVSTDPQPLKEQPALNDSRYCLSSRLRVSATFWQNPRNHFRCQVQFYGLSENDEWTQDRAKPVTQIVSAEAWGRADCGFTSESYQQGVLSATILYEILLGKATLYAVLVSALVLMAMVKRKDSRG

SEQ ID NO: 16045 - protein, 827 aa, Artificial Sequence
  Synthetic Polypeptide
MALPVTALLLPLALLLHAARPEVQLLESGGGLVQPGGSLRLSCAASGFTFSSYAMSWVRQAPGKGLEWVSSISGSGDYIYYADSVKGRFTISRDISKNTLYLQMNSLRAEDTAVYYCAKEGTGANSSLADYRGQGTLVTVSSGGGSGGGSEVQLLESGGGLVQPGGSLRLSCAASGFIFSSYAMSWVRQAPGKGQEWVSGVSGTGVNTYYADSVKGRFTISRDNSKNTLYLQMNSLRAEDTAVYYCASGKGWDSGSWYEDYRGQGTLVTVSSGTGGGGSGGGGSGGGGSEFDIQMTQSPSSLSASVGDRVTITCKASDHINNWLAWYQQKPGQAPKLLIYGATTLETGVPSRFSGSGSGTDYTLTISSLQPEDFATYYCQQSWNTPWTFGQGTKLEIKRLEGKPIPNPLLGLDSTGSGEDLKNVFPPEVAVFEPSEAEISHTQKATLVCLATGFYPDHVELSWWVNGKEVHSGVCTDPQPLKEQPALNDSRYCLSSRLRVSATFWQNPRNHFRCQVQFYGLSENDEWTQDRAKPVTQIVSAEAWGRADCGFTSESYQQGVLSATILYEILLGKATLYAVLVSALVLMAMVKRKDSRGRAKRSGSGATNFSLLKQAGDVEENPGPTRGHMTEYKPTVRLATRDDVPRAVRTLAAAFADYPATRHTVDPDRHIERVTELQELFLTRVGLDIGKVWVADDGAAVAVWTTPESVEAGAVFAEIGPRMAELSGSRLAAQQQMEGLLAPHRPKEPAWFLATVGVSPDHQGKGLGSAVVLPGVEAAERAGVPAFLETSAPRNLPFYERLGFTVTADVEVPEGPRTWCMTRKPGA

SEQ ID NO: 16046 - protein, 597 aa, Artificial Sequence
  Synthetic Polypeptide
MALPVTALLLPLALLLHAARPEVQLLESGGGLVQPGGSLRLSCAASGFTFSSYAMSWVRQAPGKGLEWVSSISGSGDYIYYADSVKGRFTISRDISKNTLYLQMNSLRAEDTAVYYCAKEGTGANSSLADYRGQGTLVTVSSGGGSGGGSEVQLLESGGGLVQPGGSLRLSCAASGFIFSSYAMSWVRQAPGKGQEWVSGVSGTGVNTYYADSVKGRFTISRDNSKNTLYLQMNSLRAEDTAVYYCASGKGWDSGSWYEDYRGQGTLVTVSSGTGGGGSGGGGSGGGGSEFDIQMTQSPSSLSASVGDRVTITCKASDHINNWLAWYQQKPGQAPKLLIYGATTLETGVPSRFSGSGSGTDYTLTISSLQPEDFATYYCQQSWNTPWTFGQGTKLEIKRLEGKPIPNPLLGLDSTGSGEDLKNVFPPEVAVFEPSEAEISHTQKATLVCLATGFYPDHVELSWWVNGKEVHSGVCTDPQPLKEQPALNDSRYCLSSRLRVSATFWQNPRNHFRCQVQFYGLSENDEWTQDRAKPVTQIVSAEAWGRADCGFTSESYQQGVLSATILYEILLGKATLYAVLVSALVLMAMVKRKDSRG

SEQ ID NO: 16047 - protein, 913 aa, Artificial Sequence
  Synthetic Polypeptide
MALPVTALLLPLALLLHAARPEVQLLESGGGLVQPGGSLRLSCAASGFTFSSYAMSWVRQAPGKGLEWVSSISGSGDYIYYADSVKGRFTISRDISKNTLYLQMNSLRAEDTAVYYCAKEGTGANSSLADYRGQGTLVTVSSGGGSGGGSEVQLLESGGGLVQPGGSLRLSCAASGFIFSSYAMSWVRQAPGKGQEWVSGVSGTGVNTYYADSVKGRFTISRDNSKNTLYLQMNSLRAEDTAVYYCASGKGWDSGSWYEDYRGQGTLVTVSSGTGGGGSGGGGSGGGGSEFDIQMTQSPSSLSASVGDRVTITCKASDHINNWLAWYQQKPGQAPKLLIYGATTLETGVPSRFSGSGSGTDYTLTISSLQPEDFATYYCQQSWNTPWTFGQGTKLEIKRGGGGSGGGGSGGGGSQVQLQQPGAELVKPGASVKMSCKASGYAFSSYWINWMKQKPGQGLEWIGQIYPGDGDTNYNGKFKGRATLTADTSSSTAYMQLSSLTSEDSAVYFCARSITTVVGCAMDYWGQGTSVTVSSTRGSGIQNPDPAVYQLRDSKSSDKSVCLFTDFDSQTNVSQSKDSDVYITDKTVLDMRSMDFKSNSAVAWSNKSDFACANAFNNSIIPEDTFFPSSDVPCDVKLVEKSFETDTNLNFQNLSVIGFRILLLKVAGFNLLMTLRLWSSRAKRSGSGVKQTLNFDLLKLAGDVESNPGPSRGHMTEYKPTVRLATRDDVPRAVRTLAAAFADYPATRHTVDPDRHIERVTELQELFLTRVGLDIGKVWVADDGAAVAVWTTPESVEAGAVFAEIGPRMAELSGSRLAAQQQMEGLLAPHRPKEPAWFLATVGVSPDHQGKGLGSAVVLPGVEAAERAGVPAFLETSAPRNLPFYERLGFTVTADVEVPEGPRTWCMTRKPGA

SEQ ID NO: 16048 - protein, 945 aa, Artificial Sequence
  Synthetic Polypeptide
MALPVTALLLPLALLLHAARPEVQLLESGGGLVQPGGSLRLSCAASGFTFSSYAMSWVRQAPGKGLEWVSSISGSGDYIYYADSVKGRFTISRDISKNTLYLQMNSLRAEDTAVYYCAKEGTGANSSLADYRGQGTLVTVSSGGGSGGGSEVQLLESGGGLVQPGGSLRLSCAASGFIFSSYAMSWVRQAPGKGQEWVSGVSGTGVNTYYADSVKGRFTISRDNSKNTLYLQMNSLRAEDTAVYYCASGKGWDSGSWYEDYRGQGTLVTVSSGTGGGGSGGGGSGGGGSEFDIQMTQSPSSLSASVGDRVTITCKASDHINNWLAWYQQKPGQAPKLLIYGATTLETGVPSRFSGSGSGTDYTLTISSLQPEDFATYYCQQSWNTPWTFGQGTKLEIKRGGGGSGGGGSGGGGSQVQLQQPGAELVKPGASVKMSCKASGYAFSSYWINWMKQKPGQGLEWIGQIYPGDGDTNYNGKFKGRATLTADTSSSTAYMQLSSLTSEDSAVYFCARSITTVVGCAMDYWGQGTSVTVSSLEDLKNVFPPEVAVFEPSKAEIAHTQKATLVCLATGFYPDHVELSWWVNGKEVHSGVSTDPQPLKEQPALNDSRYCLSSRLRVSATFWQNPRNHFRCQVQFYGLSENDEWTQDRAKPVTQIVSAEAWGRADCGITSASYHQGVLSATILYEILLGKATLYAVLVSALVLMAMVKRKDSRGRAKRSGSGATNFSLLKQAGDVEENPGPTRGHMTEYKPTVRLATRDDVPRAVRTLAAAFADYPATRHTVDPDRHIERVTELQELFLTRVGLDIGKVWVADDGAAVAVWTTPESVEAGAVFAEIGPRMAELSGSRLAAQQQMEGLLAPHRPKEPAWFLATVGVSPDHQGKGLGSAVVLPGVEAAERAGVPAFLETSAPRNLPFYERLGFTVTADVEVPEGPRTWCMTRKPGA

SEQ ID NO: 16049 - protein, 1263 aa, Artificial Sequence
  Synthetic Polypeptide
MALPVTALLLPLALLLHAARPEVQLLESGGGLVQPGGSLRLSCAASGFTFSSYAMSWVRQAPGKGLEWVSSISGSGDYIYYADSVKGRFTISRDISKNTLYLQMNSLRAEDTAVYYCAKEGTGANSSLADYRGQGTLVTVSSGGGSGGGSEVQLLESGGGLVQPGGSLRLSCAASGFIFSSYAMSWVRQAPGKGQEWVSGVSGTGVNTYYADSVKGRFTISRDNSKNTLYLQMNSLRAEDTAVYYCASGKGWDSGSWYEDYRGQGTLVTVSSGTGGGGSGGGGSGGGGSEFDIQMTQSPSSLSASVGDRVTITCKASDHINNWLAWYQQKPGQAPKLLIYGATTLETGVPSRFSGSGSGTDYTLTISSLQPEDFATYYCQQSWNTPWTFGQGTKLEIKRLEIQNPDPAVYQLRDSKSSDKSVCLFTDFDSQTNVSQSKDSDVYITDKCVLDMRSMDFKSNSAVAWSNKSDFACANAFNNSIIPEDTFFPSSDVPCDVKLVEKSFETDTNLNFQNLSVIGFRILLLKVAGFNLLMTLRLWSSRAKRSGSGVKQTLNFDLLKLAGDVESNPGPTSMDWIWRILFLVGAATGAHSGPQVQLQESGGGLAQAGGSLRLSCAASGRTFSMGWFRQAPGKEREFVAAITYSGGSPYYASSVRGRFTISRDNAKNTVYLQMNSLKPEDTAVYYCAANPTYGSDWNAENWGQGTQVTVSSGSGGGGSGGGGSGGGGSFEQVQLQQPGAELVKPGASVKMSCKASGYAFSSYWINWMKQKPGQGLEWIGQIYPGDGDTNYNGKFKGRATLTADTSSSTAYMQLSSLTSEDSAVYFCARSITTVVGCAMDYWGQGTSVTVSSTREDLKNVFPPEVAVFEPSKAEIAHTQKATLVCLATGFYPDHVELSWWVNGKEVHSGVCTDPQPLKEQPALNDSRYCLSSRLRVSATFWQNPRNHFRCQVQFYGLSENDEWTQDRAKPVTQIVSAEAWGRADCGITSASYHQGVLSATILYEILLGKATLYAVLVSALVLMAMVKRKDSRGRAKRSGSGATNFSLLKQAGDVEENPGPSRGHMTEYKPTVRLATRDDVPRAVRTLAAAFADYPATRHTVDPDRHIERVTELQELFLTRVGLDIGKVWVADDGAAVAVWTTPESVEAGAVFAEIGPRMAELSGSRLAAQQQMEGLLAPHRPKEPAWFLATVGVSPDHQGKGLGSAVVLPGVEAAERAGVPAFLETSAPRNLPFYERLGFTVTADVEVPEGPRTWCMTRKPGA

SEQ ID NO: 16050 - protein, 1262 aa, Artificial Sequence
  Synthetic Polypeptide
MALPVTALLLPLALLLHAARPEVQLLESGGGLVQPGGSLRLSCAASGFTFSSYAMSWVRQAPGKGLEWVSSISGSGDYIYYADSVKGRFTISRDISKNTLYLQMNSLRAEDTAVYYCAKEGTGANSSLADYRGQGTLVTVSSGGGSGGGSEVQLLESGGGLVQPGGSLRLSCAASGFIFSSYAMSWVRQAPGKGQEWVSGVSGTGVNTYYADSVKGRFTISRDNSKNTLYLQMNSLRAEDTAVYYCASGKGWDSGSWYEDYRGQGTLVTVSSGTGGGGSGGGGSGGGGSEFDIQMTQSPSSLSASVGDRVTITCKASDHINNWLAWYQQKPGQAPKLLIYGATTLETGVPSRFSGSGSGTDYTLTISSLQPEDFATYYCQQSWNTPWTFGQGTKLEIKRLEDLKNVFPPEVAVFEPSKAEIAHTQKATLVCLATGFYPDHVELSWWVNGKEVHSGVCTDPQPLKEQPALNDSRYCLSSRLRVSATFWQNPRNHFRCQVQFYGLSENDEWTQDRAKPVTQIVSAEAWGRADCGITSASYHQGVLSATILYEILLGKATLYAVLVSALVLMAMVKRKDSRGRAKRSGSGATNFSLLKQAGDVEENPGPTSMDWIWRILFLVGAATGAHSGPQVQLQESGGGLAQAGGSLRLSCAASGRTFSMGWFRQAPGKEREFVAAITYSGGSPYYASSVRGRFTISRDNAKNTVYLQMNSLKPEDTAVYYCAANPTYGSDWNAENWGQGTQVTVSSGSGGGGSGGGGSGGGGSFEQVQLQQPGAELVKPGASVKMSCKASGYAFSSYWINWMKQKPGQGLEWIGQIYPGDGDTNYNGKFKGRATLTADTSSSTAYMQLSSLTSEDSAVYFCARSITTVVGCAMDYWGQGTSVTVSSTRIQNPDPAVYQLRDSKSSDKSVCLFTDFDSQTNVSQSKDSDVYITDKCVLDMRSMDFKSNSAVAWSNKSDFACANAFNNSIIPEDTFFPSSDVPCDVKLVEKSFETDTNLNFQNLSVIGFRILLLKVAGFNLLMTLRLWSSRAKRSGSGVKQTLNFDLLKLAGDVESNPGPSRGHMTEYKPTVRLATRDDVPRAVRTLAAAFADYPATRHTVDPDRHIERVTELQELFLTRVGLDIGKVWVADDGAAVAVWTTPESVEAGAVFAEIGPRMAELSGSRLAAQQQMEGLLAPHRPKEPAWFLATVGVSPDHQGKGLGSAVVLPGVEAAERAGVPAFLETSAPRNLPFYERLGFTVTADVEVPEGPRTWCMTRKPGA

SEQ ID NO: 16051 - protein, 1262 aa, Artificial Sequence
  Synthetic Polypeptide
MALPVTALLLPLALLLHAARPEVQLLESGGGLVQPGGSLRLSCAASGFTFSSYAMSWVRQAPGKGLEWVSSISGSGDYIYYADSVKGRFTISRDISKNTLYLQMNSLRAEDTAVYYCAKEGTGANSSLADYRGQGTLVTVSSGGGSGGGSEVQLLESGGGLVQPGGSLRLSCAASGFIFSSYAMSWVRQAPGKGQEWVSGVSGTGVNTYYADSVKGRFTISRDNSKNTLYLQMNSLRAEDTAVYYCASGKGWDSGSWYEDYRGQGTLVTVSSGTGGGGSGGGGSGGGGSEFDIQMTQSPSSLSASVGDRVTITCKASDHINNWLAWYQQKPGQAPKLLIYGATTLETGVPSRFSGSGSGTDYTLTISSLQPEDFATYYCQQSWNTPWTFGQGTKLEIKRLEDLKNVFPPEVAVFEPSEAEISHTQKATLVCLATGFYPDHVELSWWVNGKEVHSGVCTDPQPLKEQPALNDSRYCLSSRLRVSATFWQNPRNHFRCQVQFYGLSENDEWTQDRAKPVTQIVSAEAWGRADCGFTSESYQQGVLSATILYEILLGKATLYAVLVSALVLMAMVKRKDSRGRAKRSGSGATNFSLLKQAGDVEENPGPTSMDWIWRILFLVGAATGAHSGPQVQLQESGGGLAQAGGSLRLSCAASGRTFSMGWFRQAPGKEREFVAAITYSGGSPYYASSVRGRFTISRDNAKNTVYLQMNSLKPEDTAVYYCAANPTYGSDWNAENWGQGTQVTVSSGSGGGGSGGGGSGGGGSFEQVQLQQPGAELVKPGASVKMSCKASGYAFSSYWINWMKQKPGQGLEWIGQIYPGDGDTNYNGKFKGRATLTADTSSSTAYMQLSSLTSEDSAVYFCARSITTVVGCAMDYWGQGTSVTVSSTRIQNPDPAVYQLRDSKSSDKSVCLFTDFDSQTNVSQSKDSDVYITDKCVLDMRSMDFKSNSAVAWSNKSDFACANAFNNSIIPEDTFFPSPESSCDVKLVEKSFETDTNLNFQNLSVIGFRILLLKVAGFNLLMTLRLWSSRAKRSGSGVKQTLNFDLLKLAGDVESNPGPSRGHMTEYKPTVRLATRDDVPRAVRTLAAAFADYPATRHTVDPDRHIERVTELQELFLTRVGLDIGKVWVADDGAAVAVWTTPESVEAGAVFAEIGPRMAELSGSRLAAQQQMEGLLAPHRPKEPAWFLATVGVSPDHQGKGLGSAVVLPGVEAAERAGVPAFLETSAPRNLPFYERLGFTVTADVEVPEGPRTWCMTRKPGA

SEQ ID NO: 16052 - protein, 1029 aa, Artificial Sequence
  Synthetic Polypeptide
MALPVTALLLPLALLLHAARPEVQLLESGGGLVQPGGSLRLSCAASGFTFSSYAMSWVRQAPGKGLEWVSSISGSGDYIYYADSVKGRFTISRDISKNTLYLQMNSLRAEDTAVYYCAKEGTGANSSLADYRGQGTLVTVSSGGGSGGGSEVQLLESGGGLVQPGGSLRLSCAASGFIFSSYAMSWVRQAPGKGQEWVSGVSGTGVNTYYADSVKGRFTISRDNSKNTLYLQMNSLRAEDTAVYYCASGKGWDSGSWYEDYRGQGTLVTVSSGTGGGGSGGGGSGGGGSEFDIQMTQSPSSLSASVGDRVTITCKASDHINNWLAWYQQKPGQAPKLLIYGATTLETGVPSRFSGSGSGTDYTLTISSLQPEDFATYYCQQSWNTPWTFGQGTKLEIKRLEDLKNVFPPEVAVFEPSEAEISHTQKATLVCLATGFYPDHVELSWWVNGKEVHSGVCTDPQPLKEQPALNDSRYCLSSRLRVSATFWQNPRNHFRCQVQFYGLSENDEWTQDRAKPVTQIVSAEAWGRADCGFTSESYQQGVLSATILYEILLGKATLYAVLVSALVLMAMVKRKDSRGRAKRSGSGATNFSLLKQAGDVEENPGPTSMDWIWRILFLVGAATGAHSGPQVQLQESGGGLAQAGGSLRLSCAASGRTFSMGWFRQAPGKEREFVAAITYSGGSPYYASSVRGRFTISRDNAKNTVYLQMNSLKPEDTAVYYCAANPTYGSDWNAENWGQGTQVTVSSGSGGGGSGGGGSGGGGSFEQVQLQQPGAELVKPGASVKMSCKASGYAFSSYWINWMKQKPGQGLEWIGQIYPGDGDTNYNGKFKGRATLTADTSSSTAYMQLSSLTSEDSAVYFCARSITTVVGCAMDYWGQGTSVTVSSTRIQNPDPAVYQLRDSKSSDKSVCLFTDFDSQTNVSQSKDSDVYITDKCVLDMRSMDFKSNSAVAWSNKSDFACANAFNNSIIPEDTFFPSPESSCDVKLVEKSFETDTNLNFQNLSVIGFRILLLKVAGFNLLMTLRLWSS

SEQ ID NO: 16053 - protein, 1254 aa, Artificial Sequence
  Synthetic Polypeptide
MALPVTALLLPLALLLHAARPEVQLLESGGGLVQPGGSLRLSCAASGFTFSSYAMSWVRQAPGKGLEWVSSISGSGDYIYYADSVKGRFTISRDISKNTLYLQMNSLRAEDTAVYYCAKEGTGANSSLADYRGQGTLVTVSSGGGSGGGSEVQLLESGGGLVQPGGSLRLSCAASGFIFSSYAMSWVRQAPGKGQEWVSGVSGTGVNTYYADSVKGRFTISRDNSKNTLYLQMNSLRAEDTAVYYCASGKGWDSGSWYEDYRGQGTLVTVSSGTGGGGSGGGGSGGGGSEFDIQMTQSPSSLSASVGDRVTITCKASDHINNWLAWYQQKPGQAPKLLIYGATTLETGVPSRFSGSGSGTDYTLTISSLQPEDFATYYCQQSWNTPWTFGQGTKLEIKRLEDLKNVFPPEVAVFEPSEAEISHTQKATLVCLATGFYPDHVELSWWVNGKEVHSGVCTDPQPLKEQPALNDSRYCLSSRLRVSATFWQNPRNHFRCQVQFYGLSENDEWTQDRAKPVTQIVSAEAWGRADCGFTSESYQQGVLSATILYEILLGKATLYAVLVSALVLMAMVKRKDSRGRAKRSGSGATNFSLLKQAGDVEENPGPTSMDWIWRILFLVGAATGAHSGPQVQLQESGGGLAQAGGSLRLSCAASGRTFSMGWFRQAPGKEREFVAAITYSGGSPYYASSVRGRFTISRDNAKNTVYLQMNSLKPEDTAVYYCAANPTYGSDWNAENWGQGTQVTVSSGSGGGGSGGGGSGGGGSFEQVQLQQPGAELVKPGASVKMSCKASGYAFSSYWINWMKQKPGQGLEWIGQIYPGDGDTNYNGKFKGRATLTADTSSSTAYMQLSSLTSEDSAVYFCARSITTVVGCAMDYWGQGTSVTVSSTRIQNPDPAVYQLRDSKSSDKSVCLFTDFDSQTNVSQSKDSDVYITDKCVLDMRSMDFKSNSAVAWSNKSDFACANAFNNSIIPEDTFFPSPESSCDVKLVEKSFETDTNLNFQNLSVIGFRILLLKVAGFNLLMTLRLWSSRAKRSGSGVKQTLNFDLLKLAGDVESNPGPSRGGIHTMATYEVLCEVARKLGTDDREVVLFLLNVFIPQPTLAQLIGALRALKEEGRLTFPLLAECLFRAGRRDLLRDLLHLDPRFLERHLAGTMSYFSPYQLTVLHVDGELCARDIRSLIFLSKDTIGSRSTPQTFLHWVYCMENLDLLGPTDVDALMSMLRSLSRVDLQRQVQTLMGLHLSGPSHSQHYRHTP

SEQ ID NO: 16054 - protein, 1033 aa, Artificial Sequence
  Synthetic Polypeptide
MALPVTALLLPLALLLHAARPEVQLLESGGGLVQPGGSLRLSCAASGFTFSSYAMSWVRQAPGKGLEWVSSISGSGDYIYYADSVKGRFTISRDISKNTLYLQMNSLRAEDTAVYYCAKEGTGANSSLADYRGQGTLVTVSSGGGSGGGSEVQLLESGGGLVQPGGSLRLSCAASGFIFSSYAMSWVRQAPGKGQEWVSGVSGTGVNTYYADSVKGRFTISRDNSKNTLYLQMNSLRAEDTAVYYCASGKGWDSGSWYEDYRGQGTLVTVSSGTGGGGSGGGGSGGGGSEFDIQMTQSPSSLSASVGDRVTITCKASDHINNWLAWYQQKPGQAPKLLIYGATTLETGVPSRFSGSGSGTDYTLTISSLQPEDFATYYCQQSWNTPWTFGQGTKLEIKRLEIQNPDPAVYQLRDSKSSDKSVCLFTDFDSQTNVSQSKDSDVYITDKCVLDMRSMDFKSNSAVAWSNKSDFACANAFNNSIIPEDTFFPSPESSCDVKLVEKSFETDTNLNFQNLSVIGFRILLLKVAGFNLLMTLRLWSSRAKRSGSGVKQTLNFDLLKLAGDVESNPGPTSMDWIWRILFLVGAATGAHSGPQVQLQESGGGLAQAGGSLRLSCAASGRTFSMGWFRQAPGKEREFVAAITYSGGSPYYASSVRGRFTISRDNAKNTVYLQMNSLKPEDTAVYYCAANPTYGSDWNAENWGQGTQVTVSSGSGGGGSGGGGSGGGGSFEQVQLQQPGAELVKPGASVKMSCKASGYAFSSYWINWMKQKPGQGLEWIGQIYPGDGDTNYNGKFKGRATLTADTSSSTAYMQLSSLTSEDSAVYFCARSITTVVGCAMDYWGQGTSVTVSSTREDLKNVFPPEVAVFEPSEAEISHTQKATLVCLATGFYPDHVELSWWVNGKEVHSGVCTDPQPLKEQPALNDSRYCLSSRLRVSATFWQNPRNHFRCQVQFYGLSENDEWTQDRAKPVTQIVSAEAWGRADCGFTSESYQQGVLSATILYEILLGKATLYAVLVSALVLMAMVKRKDSRG

SEQ ID NO: 16055 - protein, 1255 aa, Artificial Sequence
  Synthetic Polypeptide
MALPVTALLLPLALLLHAARPEVQLLESGGGLVQPGGSLRLSCAASGFTFSSYAMSWVRQAPGKGLEWVSSISGSGDYIYYADSVKGRFTISRDISKNTLYLQMNSLRAEDTAVYYCAKEGTGANSSLADYRGQGTLVTVSSGGGSGGGSEVQLLESGGGLVQPGGSLRLSCAASGFIFSSYAMSWVRQAPGKGQEWVSGVSGTGVNTYYADSVKGRFTISRDNSKNTLYLQMNSLRAEDTAVYYCASGKGWDSGSWYEDYRGQGTLVTVSSGTGGGGSGGGGSGGGGSEFDIQMTQSPSSLSASVGDRVTITCKASDHINNWLAWYQQKPGQAPKLLIYGATTLETGVPSRFSGSGSGTDYTLTISSLQPEDFATYYCQQSWNTPWTFGQGTKLEIKRLEIQNPDPAVYQLRDSKSSDKSVCLFTDFDSQTNVSQSKDSDVYITDKCVLDMRSMDFKSNSAVAWSNKSDFACANAFNNSIIPEDTFFPSPESSCDVKLVEKSFETDTNLNFQNLSVIGFRILLLKVAGFNLLMTLRLWSSRAKRSGSGVKQTLNFDLLKLAGDVESNPGPTSMDWIWRILFLVGAATGAHSGPQVQLQESGGGLAQAGGSLRLSCAASGRTFSMGWFRQAPGKEREFVAAITYSGGSPYYASSVRGRFTISRDNAKNTVYLQMNSLKPEDTAVYYCAANPTYGSDWNAENWGQGTQVTVSSGSGGGGSGGGGSGGGGSFEQVQLQQPGAELVKPGASVKMSCKASGYAFSSYWINWMKQKPGQGLEWIGQIYPGDGDTNYNGKFKGRATLTADTSSSTAYMQLSSLTSEDSAVYFCARSITTVVGCAMDYWGQGTSVTVSSTREDLKNVFPPEVAVFEPSEAEISHTQKATLVCLATGFYPDHVELSWWVNGKEVHSGVCTDPQPLKEQPALNDSRYCLSSRLRVSATFWQNPRNHFRCQVQFYGLSENDEWTQDRAKPVTQIVSAEAWGRADCGFTSESYQQGVLSATILYEILLGKATLYAVLVSALVLMAMVKRKDSRGRAKRSGSGATNFSLLKQAGDVEENPGPSRGGIHTMATYEVLCEVARKLGTDDREVVLFLLNVFIPQPTLAQLIGALRALKEEGRLTFPLLAECLFRAGRRDLLRDLLHLDPRFLERHLAGTMSYFSPYQLTVLHVDGELCARDIRSLIFLSKDTIGSRSTPQTFLHWVYCMENLDLLGPTDVDALMSMLRSLSRVDLQRQVQTLMGLHLSGPSHSQHYRHTP

SEQ ID NO: 16056 - protein, 1262 aa, Artificial Sequence
  Synthetic Polypeptide
MALPVTALLLPLALLLHAARPEVQLLESGGGLVQPGGSLRLSCAASGFTFSSYAMSWVRQAPGKGLEWVSSISGSGDYIYYADSVKGRFTISRDISKNTLYLQMNSLRAEDTAVYYCAKEGTGANSSLADYRGQGTLVTVSSGGGSGGGSEVQLLESGGGLVQPGGSLRLSCAASGFIFSSYAMSWVRQAPGKGQEWVSGVSGTGVNTYYADSVKGRFTISRDNSKNTLYLQMNSLRAEDTAVYYCASGKGWDSGSWYEDYRGQGTLVTVSSGTGGGGSGGGGSGGGGSEFDIQMTQSPSSLSASVGDRVTITCKASDHINNWLAWYQQKPGQAPKLLIYGATTLETGVPSRFSGSGSGTDYTLTISSLQPEDFATYYCQQSWNTPWTFGQGTKLEIKRLEDLKNVFPPEVAVFEPSEAEISHTQKATLVCLATGFYPDHVELSWWVNGKEVHSGVSTDPQPLKEQPALNDSRYCLSSRLRVSATFWQNPRNHFRCQVQFYGLSENDEWTQDRAKPVTQIVSAEAWGRADCGFTSESYQQGVLSATILYEILLGKATLYAVLVSALVLMAMVKRKDSRGRAKRSGSGATNFSLLKQAGDVEENPGPTSMDWIWRILFLVGAATGAHSGPQVQLQESGGGLAQAGGSLRLSCAASGRTFSMGWFRQAPGKEREFVAAITYSGGSPYYASSVRGRFTISRDNAKNTVYLQMNSLKPEDTAVYYCAANPTYGSDWNAENWGQGTQVTVSSGSGGGGSGGGGSGGGGSFEQVQLQQPGAELVKPGASVKMSCKASGYAFSSYWINWMKQKPGQGLEWIGQIYPGDGDTNYNGKFKGRATLTADTSSSTAYMQLSSLTSEDSAVYFCARSITTVVGCAMDYWGQGTSVTVSSTRIQNPDPAVYQLRDSKSSDKSVCLFTDFDSQTNVSQSKDSDVYITDKTVLDMRSMDFKSNSAVAWSNKSDFACANAFNNSIIPEDTFFPSPESSCDVKLVEKSFETDTNLNFQNLSVIGFRILLLKVAGFNLLMTLRLWSSRAKRSGSGVKQTLNFDLLKLAGDVESNPGPSRGHMTEYKPTVRLATRDDVPRAVRTLAAAFADYPATRHTVDPDRHIERVTELQELFLTRVGLDIGKVWVADDGAAVAVWTTPESVEAGAVFAEIGPRMAELSGSRLAAQQQMEGLLAPHRPKEPAWFLATVGVSPDHQGKGLGSAVVLPGVEAAERAGVPAFLETSAPRNLPFYERLGFTVTADVEVPEGPRTWCMTRKPGA

SEQ ID NO: 16057 - protein, 1344 aa, Artificial Sequence
  Synthetic Polypeptide
MALPVTALLLPLALLLHAARPEVQLLESGGGLVQPGGSLRLSCAASGFTFSSYAMSWVRQAPGKGLEWVSSISGSGDYIYYADSVKGRFTISRDISKNTLYLQMNSLRAEDTAVYYCAKEGTGANSSLADYRGQGTLVTVSSGGGSGGGSEVQLLESGGGLVQPGGSLRLSCAASGFIFSSYAMSWVRQAPGKGQEWVSGVSGTGVNTYYADSVKGRFTISRDNSKNTLYLQMNSLRAEDTAVYYCASGKGWDSGSWYEDYRGQGTLVTVSSGTGGGGSGGGGSGGGGSEFDIQMTQSPSSLSASVGDRVTITCKASDHINNWLAWYQQKPGQAPKLLIYGATTLETGVPSRFSGSGSGTDYTLTISSLQPEDFATYYCQQSWNTPWTFGQGTKLEIKRLEDLKNVFPPEVAVFEPSEAEISHTQKATLVCLATGFYPDHVELSWWVNGKEVHSGVSTDPQPLKEQPALNDSRYCLSSRLRVSATFWQNPRNHFRCQVQFYGLSENDEWTQDRAKPVTQIVSAEAWGRADCGFTSESYQQGVLSATILYEILLGKATLYAVLVSALVLMAMVKRKDSRGRAKRSGSGATNFSLLKQAGDVEENPGPTSMDWIWRILFLVGAATGAHSGPQVQLQESGGGLAQAGGSLRLSCAASGRTFSMGWFRQAPGKEREFVAAITYSGGSPYYASSVRGRFTISRDNAKNTVYLQMNSLKPEDTAVYYCAANPTYGSDWNAENWGQGTQVTVSSGSGGGGSGGGGSGGGGSFEQVQLQQPGAELVKPGASVKMSCKASGYAFSSYWINWMKQKPGQGLEWIGQIYPGDGDTNYNGKFKGRATLTADTSSSTAYMQLSSLTSEDSAVYFCARSITTVVGCAMDYWGQGTSVTVSSTREQKLISEEDGSGTPFPSLAPPIMLLVDGKQQMVVVCLVLDVAPPGLDSPIWFSAGNGSALDAFTYGPSPATDGTWTNLAHLSLPSEELASWEPLVCHTGPGAEGHSRSTQPMHLSGEASTARTCPQEPLRGTPGGALWLGVLRLLLFKLLLFDLLLTCSCLCDPAGPLPSPATTTRLRALGSHRLHPATETGGREATSSPRPQPRDRRWGDTPPGRKPGSPVRAKRSGSGVKQTLNFDLLKLAGDVESNPGPSRGHMTEYKPTVRLATRDDVPRAVRTLAAAFADYPATRHTVDPDRHIERVTELQELFLTRVGLDIGKVWVADDGAAVAVWTTPESVEAGAVFAEIGPRMAELSGSRLAAQQQMEGLLAPHRPKEPAWFLATVGVSPDHQGKGLGSAVVLPGVEAAERAGVPAFLETSAPRNLPFYERLGFTVTADVEVPEGPRTWCMTRKPGA

SEQ ID NO: 16058 - protein, 1299 aa, Artificial Sequence
  Synthetic Polypeptide
MALPVTALLLPLALLLHAARPEVQLLESGGGLVQPGGSLRLSCAASGFTFSSYAMSWVRQAPGKGLEWVSSISGSGDYIYYADSVKGRFTISRDISKNTLYLQMNSLRAEDTAVYYCAKEGTGANSSLADYRGQGTLVTVSSGGGSGGGSEVQLLESGGGLVQPGGSLRLSCAASGFIFSSYAMSWVRQAPGKGQEWVSGVSGTGVNTYYADSVKGRFTISRDNSKNTLYLQMNSLRAEDTAVYYCASGKGWDSGSWYEDYRGQGTLVTVSSGTGGGGSGGGGSGGGGSEFDIQMTQSPSSLSASVGDRVTITCKASDHINNWLAWYQQKPGQAPKLLIYGATTLETGVPSRFSGSGSGTDYTLTISSLQPEDFATYYCQQSWNTPWTFGQGTKLEIKRLEGKPIPNPLLGLDSTGSGDKQLDADVSPKPTIFLPSIAETKLQKAGTYLCLLEKFFPDVIKIHWQEKKSNTILGSQEGNTMKTNDTYMKFSWLTVPEKSLDKEHRCIVRHENNKNGVDQEIIFPPIKTDVITMDPKDNCSKDANDTLLLQLTNTSAYYMYLLLLLKSVVYFAIITCCLLRRTAFCCNGEKSRAKRSGSGATNFSLLKQAGDVEENPGPTSMDWIWRILFLVGAATGAHSGPQVQLQESGGGLAQAGGSLRLSCAASGRTFSMGWFRQAPGKEREFVAAITYSGGSPYYASSVRGRFTISRDNAKNTVYLQMNSLKPEDTAVYYCAANPTYGSDWNAENWGQGTQVTVSSGSGGGGSGGGGSGGGGSFEQVQLQQPGAELVKPGASVKMSCKASGYAFSSYWINWMKQKPGQGLEWIGQIYPGDGDTNYNGKFKGRATLTADTSSSTAYMQLSSLTSEDSAVYFCARSITTVVGCAMDYWGQGTSVTVSSTREQKLISEEDGSGSQPHTKPSVFVMKNGTNVACLVKEFYPKDIRINLVSSKKITEFDPAIVISPSGKYNAVKLGKYEDSNSVTCSVQHDNKTVHSTDFEVKTDSTDHVKPKETENTKQPSKSCHKPKAIVHTEKVNMMSLTVLGLRMLFAKTVAVNFLLTAKLFFLRAKRSGSGVKQTLNFDLLKLAGDVESNPGPSRGHMTEYKPTVRLATRDDVPRAVRTLAAAFADYPATRHTVDPDRHIERVTELQELFLTRVGLDIGKVWVADDGAAVAVWTTPESVEAGAVFAEIGPRMAELSGSRLAAQQQMEGLLAPHRPKEPAWFLATVGVSPDHQGKGLGSAVVLPGVEAAERAGVPAFLETSAPRNLPFYERLGFTVTADVEVPEGPRTWCMTRKPGA

SEQ ID NO: 16059 - protein, 1037 aa, Artificial Sequence
  Synthetic Polypeptide
MALPVTALLLPLALLLHAARPEVQLLESGGGLVQPGGSLRLSCAASGFTFSSYAMSWVRQAPGKGLEWVSSISGSGDYIYYADSVKGRFTISRDISKNTLYLQMNSLRAEDTAVYYCAKEGTGANSSLADYRGQGTLVTVSSGGGSGGGSEVQLLESGGGLVQPGGSLRLSCAASGFIFSSYAMSWVRQAPGKGQEWVSGVSGTGVNTYYADSVKGRFTISRDNSKNTLYLQMNSLRAEDTAVYYCASGKGWDSGSWYEDYRGQGTLVTVSSGTGGGGSGGGGSGGGGSEFDIQMTQSPSSLSASVGDRVTITCKASDHINNWLAWYQQKPGQAPKLLIYGATTLETGVPSRFSGSGSGTDYTLTISSLQPEDFATYYCQQSWNTPWTFGQGTKLEIKRLESQPHTKPSVFVMKNGTNVACLVKEFYPKDIRINLVSSKKITEFDPAIVISPSGKYNAVKLGKYEDSNSVTCSVQHDNKTVHSTDFEVKTDSTDHVKPKETENTKQPSKSCHKPKAIVHTEKVNMMSLTVLGLRMLFAKTVAVNFLLTAKLFFLRAKRSGSGATNFSLLKQAGDVEENPGPTSMDWIWRILFLVGAATGAHSGPQVQLQESGGGLAQAGGSLRLSCAASGRTFSMGWFRQAPGKEREFVAAITYSGGSPYYASSVRGRFTISRDNAKNTVYLQMNSLKPEDTAVYYCAANPTYGSDWNAENWGQGTQVTVSSGSGGGGSGGGGSGGGGSFEQVQLQQPGAELVKPGASVKMSCKASGYAFSSYWINWMKQKPGQGLEWIGQIYPGDGDTNYNGKFKGRATLTADTSSSTAYMQLSSLTSEDSAVYFCARSITTVVGCAMDYWGQGTSVTVSSTRDKQLDADVSPKPTIFLPSIAETKLQKAGTYLCLLEKFFPDVIKIHWQEKKSNTILGSQEGNTMKTNDTYMKFSWLTVPEKSLDKEHRCIVRHENNKNGVDQEIIFPPIKTDVITMDPKDNCSKDANDTLLLQLTNTSAYYMYLLLLLKSVVYFAIITCCLLRRTAFCCNGEKS

SEQ ID NO: 16060 - protein, 1439 aa, Artificial Sequence
  Synthetic Polypeptide
MALPVTALLLPLALLLHAARPEVQLLESGGGLVQPGGSLRLSCAASGFTFSSYAMSWVRQAPGKGLEWVSSISGSGDYIYYADSVKGRFTISRDISKNTLYLQMNSLRAEDTAVYYCAKEGTGANSSLADYRGQGTLVTVSSGGGSGGGSEVQLLESGGGLVQPGGSLRLSCAASGFIFSSYAMSWVRQAPGKGQEWVSGVSGTGVNTYYADSVKGRFTISRDNSKNTLYLQMNSLRAEDTAVYYCASGKGWDSGSWYEDYRGQGTLVTVSSGTGGGGSGGGGSGGGGSEFDIQMTQSPSSLSASVGDRVTITCKASDHINNWLAWYQQKPGQAPKLLIYGATTLETGVPSRFSGSGSGTDYTLTISSLQPEDFATYYCQQSWNTPWTFGQGTKLEIKRGQPKANPTVTLFPPSSEELQANKATLVCLISDFYPGAVTVAWKADGSPVKAGVETTKPSKQSNNKYAASSYLSLTPEQWKSHRSYSCQVTHEGSTVEKTVAPTECSGSQSFGLLDPKLCYLLDGILFIYGVILTALFLRVKFSRSADAPAYQQGQNQLYNELNLGRREEYDVLDKRRGRDPEMGGKPQRRKNPQEGLYNELQKDKMAEAYSEIGMKGERRRGKGHDGLYQGLSTATKDTYDALHMQALPPRRAKRSGSGATNFSLLKQAGDVEENPGPTSMDWIWRILFLVGAATGAHSGPQVQLQESGGGLAQAGGSLRLSCAASGRTFSMGWFRQAPGKEREFVAAITYSGGSPYYASSVRGRFTISRDNAKNTVYLQMNSLKPEDTAVYYCAANPTYGSDWNAENWGQGTQVTVSSGSGGGGSGGGGSGGGGSFEQVQLQQPGAELVKPGASVKMSCKASGYAFSSYWINWMKQKPGQGLEWIGQIYPGDGDTNYNGKFKGRATLTADTSSSTAYMQLSSLTSEDSAVYFCARSITTVVGCAMDYWGQGTSVTVSSASTKGPSVFPLAPSSKSTSGGTAALGCLVKDYFPEPVTVSWNSGALTSGVHTFPAVLQSSGLYSLSSVVTVPSSSLGTQTYICNVNHKPSNTKVDKRVEPKSCGTQSFGLLDPKLCYLLDGILFIYGVILTALFLRVKFSRSADAPAYQQGQNQLYNELNLGRREEYDVLDKRRGRDPEMGGKPQRRKNPQEGLYNELQKDKMAEAYSEIGMKGERRRGKGHDGLYQGLSTATKDTYDALHMQALPPRRAKRSGSGVKQTLNFDLLKLAGDVESNPGPSRGHMTEYKPTVRLATRDDVPRAVRTLAAAFADYPATRHTVDPDRHIERVTELQELFLTRVGLDIGKVWVADDGAAVAVWTTPESVEAGAVFAEIGPRMAELSGSRLAAQQQMEGLLAPHRPKEPAWFLATVGVSPDHQGKGLGSAVVLPGVEAAERAGVPAFLETSAPRNLPFYERLGFTVTADVEVPEGPRTWCMTRKPGA

SEQ ID NO: 16061 - protein, 1225 aa, Artificial Sequence
  Synthetic Polypeptide
MALPVTALLLPLALLLHAARPEVQLLESGGGLVQPGGSLRLSCAASGFTFSSYAMSWVRQAPGKGLEWVSSISGSGDYIYYADSVKGRFTISRDISKNTLYLQMNSLRAEDTAVYYCAKEGTGANSSLADYRGQGTLVTVSSGGGSGGGSEVQLLESGGGLVQPGGSLRLSCAASGFIFSSYAMSWVRQAPGKGQEWVSGVSGTGVNTYYADSVKGRFTISRDNSKNTLYLQMNSLRAEDTAVYYCASGKGWDSGSWYEDYRGQGTLVTVSSGTGGGGSGGGGSGGGGSEFDIQMTQSPSSLSASVGDRVTITCKASDHINNWLAWYQQKPGQAPKLLIYGATTLETGVPSRFSGSGSGTDYTLTISSLQPEDFATYYCQQSWNTPWTFGQGTKLEIKRLEDLKNVFPPEVAVFEPSEAEISHTQKATLVCLATGFYPDHVELSWWVNGKEVHSGVSTDPQPLKEQPALNDSRYCLSSRLRVSATFWQNPRNHFRCQVQFYGLSENDEWTQDRAKPVTQIVSAEAWGRADCGSQSFGLLDPKLCYLLDGILFIYGVILTALFLRVKFSRSADAPAYQQGQNQLYNELNLGRREEYDVLDKRRGRDPEMGGKPQRRKNPQEGLYNELQKDKMAEAYSEIGMKGERRRGKGHDGLYQGLSTATKDTYDALHMQALPPRRAKRSGSGATNFSLLKQAGDVEENPGPTSMDWIWRILFLVGAATGAHSGPQVQLQESGGGLAQAGGSLRLSCAASGRTFSMGWFRQAPGKEREFVAAITYSGGSPYYASSVRGRFTISRDNAKNTVYLQMNSLKPEDTAVYYCAANPTYGSDWNAENWGQGTQVTVSSGSGGGGSGGGGSGGGGSFEQVQLQQPGAELVKPGASVKMSCKASGYAFSSYWINWMKQKPGQGLEWIGQIYPGDGDTNYNGKFKGRATLTADTSSSTAYMQLSSLTSEDSAVYFCARSITTVVGCAMDYWGQGTSVTVSSTRIQNPDPAVYQLRDSKSSDKSVCLFTDFDSQTNVSQSKDSDVYITDKTVLDMRSMDFKSNSAVAWSNKSDFACANAFNNSIIPEDTFFPSPESSCGTQSFGLLDPKLCYLLDGILFIYGVILTALFLRVKFSRSADAPAYQQGQNQLYNELNLGRREEYDVLDKRRGRDPEMGGKPQRRKNPQEGLYNELQKDKMAEAYSEIGMKGERRRGKGHDGLYQGLSTATKDTYDALHMQALPPR

SEQ ID NO: 16062 - protein, 1225 aa, Artificial Sequence
  Synthetic Polypeptide
MALPVTALLLPLALLLHAARPEVQLLESGGGLVQPGGSLRLSCAASGFTFSSYAMSWVRQAPGKGLEWVSSISGSGDYIYYADSVKGRFTISRDISKNTLYLQMNSLRAEDTAVYYCAKEGTGANSSLADYRGQGTLVTVSSGGGSGGGSEVQLLESGGGLVQPGGSLRLSCAASGFIFSSYAMSWVRQAPGKGQEWVSGVSGTGVNTYYADSVKGRFTISRDNSKNTLYLQMNSLRAEDTAVYYCASGKGWDSGSWYEDYRGQGTLVTVSSGTGGGGSGGGGSGGGGSEFDIQMTQSPSSLSASVGDRVTITCKASDHINNWLAWYQQKPGQAPKLLIYGATTLETGVPSRFSGSGSGTDYTLTISSLQPEDFATYYCQQSWNTPWTFGQGTKLEIKRLEDLKNVFPPEVAVFEPSKAEIAHTQKATLVCLATGFYPDHVELSWWVNGKEVHSGVCTDPQPLKEQPALNDSRYCLSSRLRVSATFWQNPRNHFRCQVQFYGLSENDEWTQDRAKPVTQIVSAEAWGRADCGSQSFGLLDPKLCYLLDGILFIYGVILTALFLRVKFSRSADAPAYQQGQNQLYNELNLGRREEYDVLDKRRGRDPEMGGKPQRRKNPQEGLYNELQKDKMAEAYSEIGMKGERRRGKGHDGLYQGLSTATKDTYDALHMQALPPRRAKRSGSGATNFSLLKQAGDVEENPGPTSMDWIWRILFLVGAATGAHSGPQVQLQESGGGLAQAGGSLRLSCAASGRTFSMGWFRQAPGKEREFVAAITYSGGSPYYASSVRGRFTISRDNAKNTVYLQMNSLKPEDTAVYYCAANPTYGSDWNAENWGQGTQVTVSSGSGGGGSGGGGSGGGGSFEQVQLQQPGAELVKPGASVKMSCKASGYAFSSYWINWMKQKPGQGLEWIGQIYPGDGDTNYNGKFKGRATLTADTSSSTAYMQLSSLTSEDSAVYFCARSITTVVGCAMDYWGQGTSVTVSSTRIQNPDPAVYQLRDSKSSDKSVCLFTDFDSQTNVSQSKDSDVYITDKCVLDMRSMDFKSNSAVAWSNKSDFACANAFNNSIIPEDTFFPSSDVPCGTQSFGLLDPKLCYLLDGILFIYGVILTALFLRVKFSRSADAPAYQQGQNQLYNELNLGRREEYDVLDKRRGRDPEMGGKPQRRKNPQEGLYNELQKDKMAEAYSEIGMKGERRRGKGHDGLYQGLSTATKDTYDALHMQALPPR

SEQ ID NO: 16063 - protein, 1296 aa, Artificial Sequence
  Synthetic Polypeptide
MALPVTALLLPLALLLHAARPEVQLLESGGGLVQPGGSLRLSCAASGFTFSSYAMSWVRQAPGKGLEWVSSISGSGDYIYYADSVKGRFTISRDISKNTLYLQMNSLRAEDTAVYYCAKEGTGANSSLADYRGQGTLVTVSSGGGSGGGSEVQLLESGGGLVQPGGSLRLSCAASGFIFSSYAMSWVRQAPGKGQEWVSGVSGTGVNTYYADSVKGRFTISRDNSKNTLYLQMNSLRAEDTAVYYCASGKGWDSGSWYEDYRGQGTLVTVSSGTGGGGSGGGGSGGGGSEFDIQMTQSPSSLSASVGDRVTITCKASDHINNWLAWYQQKPGQAPKLLIYGATTLETGVPSRFSGSGSGTDYTLTISSLQPEDFATYYCQQSWNTPWTFGQGTKLEIKRLEGKPIPNPLLGLDSTGSGEDLKNVFPPEVAVFEPSEAEISHTQKATLVCLATGFYPDHVELSWWVNGKEVHSGVSTDPQPLKEQPALNDSRYCLSSRLRVSATFWQNPRNHFRCQVQFYGLSENDEWTQDRAKPVTQIVSAEAWGRADCGSQSFGLLDPKLCYLLDGILFIYGVILTALFLRVKFSRSADAPAYQQGQNQLYNELNLGRREEYDVLDKRRGRDPEMGGKPQRRKNPQEGLYNELQKDKMAEAYSEIGMKGERRRGKGHDGLYQGLSTATKDTYDALHMQALPPRRAKRSGSGATNFSLLKQAGDVEENPGPTSMDWIWRILFLVGAATGAHSGPQVQLQESGGGLAQAGGSLRLSCAASGRTFSMGWFRQAPGKEREFVAAITYSGGSPYYASSVRGRFTISRDNAKNTVYLQMNSLKPEDTAVYYCAANPTYGSDWNAENWGQGTQVTVSSGSGGGGSGGGGSGGGGSFEQVQLQQPGAELVKPGASVKMSCKASGYAFSSYWINWMKQKPGQGLEWIGQIYPGDGDTNYNGKFKGRATLTADTSSSTAYMQLSSLTSEDSAVYFCARSITTVVGCAMDYWGQGTSVTVSSTREQKLISEEDGSGIQNPDPAVYQLRDSKSSDKSVCLFTDFDSQTNVSQSKDSDVYITDKTVLDMRSMDFKSNSAVAWSNKSDFACANAFNNSIIPEDTFFPSPESSCGTQSFGLLDPKLCYLLDGILFIYGVILTALFLRSKRSRLLHSDYMNMTPRRPGPTRKHYQPYAPPRDFAAYRSRVKFSRSADAPAYQQGQNQLYNELNLGRREEYDVLDKRRGRDPEMGGKPQRRKNPQEGLYNELQKDKMAEAYSEIGMKGERRRGKGHDGLYQGLSTATKDTYDALHMQALPPR

SEQ ID NO: 16064 - protein, 1337 aa, Artificial Sequence
  Synthetic Polypeptide
MALPVTALLLPLALLLHAARPEVQLLESGGGLVQPGGSLRLSCAASGFTFSSYAMSWVRQAPGKGLEWVSSISGSGDYIYYADSVKGRFTISRDISKNTLYLQMNSLRAEDTAVYYCAKEGTGANSSLADYRGQGTLVTVSSGGGSGGGSEVQLLESGGGLVQPGGSLRLSCAASGFIFSSYAMSWVRQAPGKGQEWVSGVSGTGVNTYYADSVKGRFTISRDNSKNTLYLQMNSLRAEDTAVYYCASGKGWDSGSWYEDYRGQGTLVTVSSGTGGGGSGGGGSGGGGSEFDIQMTQSPSSLSASVGDRVTITCKASDHINNWLAWYQQKPGQAPKLLIYGATTLETGVPSRFSGSGSGTDYTLTISSLQPEDFATYYCQQSWNTPWTFGQGTKLEIKRLEGKPIPNPLLGLDSTGSGEDLKNVFPPEVAVFEPSEAEISHTQKATLVCLATGFYPDHVELSWWVNGKEVHSGVSTDPQPLKEQPALNDSRYCLSSRLRVSATFWQNPRNHFRCQVQFYGLSENDEWTQDRAKPVTQIVSAEAWGRADCGSQSFGLLDPKLCYLLDGILFIYGVILTALFLRSKRSRLLHSDYMNMTPRRPGPTRKHYQPYAPPRDFAAYRSRVKFSRSADAPAYQQGQNQLYNELNLGRREEYDVLDKRRGRDPEMGGKPQRRKNPQEGLYNELQKDKMAEAYSEIGMKGERRRGKGHDGLYQGLSTATKDTYDALHMQALPPRRAKRSGSGATNFSLLKQAGDVEENPGPTSMDWIWRILFLVGAATGAHSGPQVQLQESGGGLAQAGGSLRLSCAASGRTFSMGWFRQAPGKEREFVAAITYSGGSPYYASSVRGRFTISRDNAKNTVYLQMNSLKPEDTAVYYCAANPTYGSDWNAENWGQGTQVTVSSGSGGGGSGGGGSGGGGSFEQVQLQQPGAELVKPGASVKMSCKASGYAFSSYWINWMKQKPGQGLEWIGQIYPGDGDTNYNGKFKGRATLTADTSSSTAYMQLSSLTSEDSAVYFCARSITTVVGCAMDYWGQGTSVTVSSTREQKLISEEDGSGIQNPDPAVYQLRDSKSSDKSVCLFTDFDSQTNVSQSKDSDVYITDKTVLDMRSMDFKSNSAVAWSNKSDFACANAFNNSIIPEDTFFPSPESSCGTQSFGLLDPKLCYLLDGILFIYGVILTALFLRSKRSRLLHSDYMNMTPRRPGPTRKHYQPYAPPRDFAAYRSRVKFSRSADAPAYQQGQNQLYNELNLGRREEYDVLDKRRGRDPEMGGKPQRRKNPQEGLYNELQKDKMAEAYSEIGMKGERRRGKGHDGLYQGLSTATKDTYDALHMQALPPR

SEQ ID NO: 16065 - protein, 1298 aa, Artificial Sequence
  Synthetic Polypeptide
MALPVTALLLPLALLLHAARPEVQLLESGGGLVQPGGSLRLSCAASGFTFSSYAMSWVRQAPGKGLEWVSSISGSGDYIYYADSVKGRFTISRDISKNTLYLQMNSLRAEDTAVYYCAKEGTGANSSLADYRGQGTLVTVSSGGGSGGGSEVQLLESGGGLVQPGGSLRLSCAASGFIFSSYAMSWVRQAPGKGQEWVSGVSGTGVNTYYADSVKGRFTISRDNSKNTLYLQMNSLRAEDTAVYYCASGKGWDSGSWYEDYRGQGTLVTVSSGTGGGGSGGGGSGGGGSEFDIQMTQSPSSLSASVGDRVTITCKASDHINNWLAWYQQKPGQAPKLLIYGATTLETGVPSRFSGSGSGTDYTLTISSLQPEDFATYYCQQSWNTPWTFGQGTKLEIKRLEGKPIPNPLLGLDSTGSGEDLKNVFPPEVAVFEPSEAEISHTQKATLVCLATGFYPDHVELSWWVNGKEVHSGVSTDPQPLKEQPALNDSRYCLSSRLRVSATFWQNPRNHFRCQVQFYGLSENDEWTQDRAKPVTQIVSAEAWGRADCGSQSFGLLDPKLCYLLDGILFIYGVILTALFLRVKFSRSADAPAYQQGQNQLYNELNLGRREEYDVLDKRRGRDPEMGGKPQRRKNPQEGLYNELQKDKMAEAYSEIGMKGERRRGKGHDGLYQGLSTATKDTYDALHMQALPPRRAKRSGSGATNFSLLKQAGDVEENPGPTSMDWIWRILFLVGAATGAHSGPQVQLQESGGGLAQAGGSLRLSCAASGRTFSMGWFRQAPGKEREFVAAITYSGGSPYYASSVRGRFTISRDNAKNTVYLQMNSLKPEDTAVYYCAANPTYGSDWNAENWGQGTQVTVSSGSGGGGSGGGGSGGGGSFEQVQLQQPGAELVKPGASVKMSCKASGYAFSSYWINWMKQKPGQGLEWIGQIYPGDGDTNYNGKFKGRATLTADTSSSTAYMQLSSLTSEDSAVYFCARSITTVVGCAMDYWGQGTSVTVSSTREQKLISEEDLGSGIQNPDPAVYQLRDSKSSDKSVCLFTDFDSQTNVSQSKDSDVYITDKTVLDMRSMDFKSNSAVAWSNKSDFACANAFNNSIIPEDTFFPSPESSCGTQSFGLLDPKLCYLLDGILFIYGVILTALFLKRGRKKLLYIFKQPFMRPVQTTQEEDGCSCRFPEEEEGGCELRVKFSRSADAPAYQQGQNQLYNELNLGRREEYDVLDKRRGRDPEMGGKPQRRKNPQEGLYNELQKDKMAEAYSEIGMKGERRRGKGHDGLYQGLSTATKDTYDALHMQALPPR

SEQ ID NO: 16066 - protein, 1340 aa, Artificial Sequence
  Synthetic Polypeptide
MALPVTALLLPLALLLHAARPEVQLLESGGGLVQPGGSLRLSCAASGFTFSSYAMSWVRQAPGKGLEWVSSISGSGDYIYYADSVKGRFTISRDISKNTLYLQMNSLRAEDTAVYYCAKEGTGANSSLADYRGQGTLVTVSSGGGSGGGSEVQLLESGGGLVQPGGSLRLSCAASGFIFSSYAMSWVRQAPGKGQEWVSGVSGTGVNTYYADSVKGRFTISRDNSKNTLYLQMNSLRAEDTAVYYCASGKGWDSGSWYEDYRGQGTLVTVSSGTGGGGSGGGGSGGGGSEFDIQMTQSPSSLSASVGDRVTITCKASDHINNWLAWYQQKPGQAPKLLIYGATTLETGVPSRFSGSGSGTDYTLTISSLQPEDFATYYCQQSWNTPWTFGQGTKLEIKRLEGKPIPNPLLGLDSTGSGEDLKNVFPPEVAVFEPSEAEISHTQKATLVCLATGFYPDHVELSWWVNGKEVHSGVSTDPQPLKEQPALNDSRYCLSSRLRVSATFWQNPRNHFRCQVQFYGLSENDEWTQDRAKPVTQIVSAEAWGRADCGSQSFGLLDPKLCYLLDGILFIYGVILTALFLKRGRKKLLYIFKQPFMRPVQTTQEEDGCSCRFPEEEEGGCELRVKFSRSADAPAYQQGQNQLYNELNLGRREEYDVLDKRRGRDPEMGGKPQRRKNPQEGLYNELQKDKMAEAYSEIGMKGERRRGKGHDGLYQGLSTATKDTYDALHMQALPPRRAKRSGSGATNFSLLKQAGDVEENPGPTSMDWIWRILFLVGAATGAHSGPQVQLQESGGGLAQAGGSLRLSCAASGRTFSMGWFRQAPGKEREFVAAITYSGGSPYYASSVRGRFTISRDNAKNTVYLQMNSLKPEDTAVYYCAANPTYGSDWNAENWGQGTQVTVSSGSGGGGSGGGGSGGGGSFEQVQLQQPGAELVKPGASVKMSCKASGYAFSSYWINWMKQKPGQGLEWIGQIYPGDGDTNYNGKFKGRATLTADTSSSTAYMQLSSLTSEDSAVYFCARSITTVVGCAMDYWGQGTSVTVSSTREQKLISEEDLGSGIQNPDPAVYQLRDSKSSDKSVCLFTDFDSQTNVSQSKDSDVYITDKTVLDMRSMDFKSNSAVAWSNKSDFACANAFNNSIIPEDTFFPSPESSCGTQSFGLLDPKLCYLLDGILFIYGVILTALFLKRGRKKLLYIFKQPFMRPVQTTQEEDGCSCRFPEEEEGGCELRVKFSRSADAPAYQQGQNQLYNELNLGRREEYDVLDKRRGRDPEMGGKPQRRKNPQEGLYNELQKDKMAEAYSEIGMKGERRRGKGHDGLYQGLSTATKDTYDALHMQALPPR

SEQ ID NO: 16067 - protein, 1230 aa, Artificial Sequence
  Synthetic Polypeptide
MALPVTALLLPLALLLHAARPEVQLLESGGGLVQPGGSLRLSCAASGFTFSSYAMSWVRQAPGKGLEWVSSISGSGDYIYYADSVKGRFTISRDISKNTLYLQMNSLRAEDTAVYYCAKEGTGANSSLADYRGQGTLVTVSSGGGSGGGSEVQLLESGGGLVQPGGSLRLSCAASGFIFSSYAMSWVRQAPGKGQEWVSGVSGTGVNTYYADSVKGRFTISRDNSKNTLYLQMNSLRAEDTAVYYCASGKGWDSGSWYEDYRGQGTLVTVSSGTGGGGSGGGGSGGGGSEFDIQMTQSPSSLSASVGDRVTITCKASDHINNWLAWYQQKPGQAPKLLIYGATTLETGVPSRFSGSGSGTDYTLTISSLQPEDFATYYCQQSWNTPWTFGQGTKLEIKRLEQSFGLLDPKLCYLLDGILFIYGVILTALFLRVKFSRSADAPAYQQGQNQLYNELNLGRREEYDVLDKRRGRDPEMGGKPQRRKNPQEGLYNELQKDKMAEAYSEIGMKGERRRGKGHDGLYQGLSTATKDTYDALHMQALPPRRAKRSGSGATNFSLLKQAGDVEENPGPTSMDWIWRILFLVGAATGAHSGPQVQLQESGGGLAQAGGSLRLSCAASGRTFSMGWFRQAPGKEREFVAAITYSGGSPYYASSVRGRFTISRDNAKNTVYLQMNSLKPEDTAVYYCAANPTYGSDWNAENWGQGTQVTVSSGSGGGGSGGGGSGGGGSFEQVQLQQPGAELVKPGASVKMSCKASGYAFSSYWINWMKQKPGQGLEWIGQIYPGDGDTNYNGKFKGRATLTADTSSSTAYMQLSSLTSEDSAVYFCARSITTVVGCAMDYWGQGTSVTVSSTRQSFGLLDPKLCYLLDGILFIYGVILTALFLRVKFSRSADAPAYQQGQNQLYNELNLGRREEYDVLDKRRGRDPEMGGKPQRRKNPQEGLYNELQKDKMAEAYSEIGMKGERRRGKGHDGLYQGLSTATKDTYDALHMQALPPRRAKRSGSGVKQTLNFDLLKLAGDVESNPGPSRGHMTEYKPTVRLATRDDVPRAVRTLAAAFADYPATRHTVDPDRHIERVTELQELFLTRVGLDIGKVWVADDGAAVAVWTTPESVEAGAVFAEIGPRMAELSGSRLAAQQQMEGLLAPHRPKEPAWFLATVGVSPDHQGKGLGSAVVLPGVEAAERAGVPAFLETSAPRNLPFYERLGFTVTADVEVPEGPRTWCMTRKPGA

SEQ ID NO: 16068 - protein, 1055 aa, Artificial Sequence
  Synthetic Polypeptide
MALPVTALLLPLALLLHAARPEVQLLESGGGLVQPGGSLRLSCAASGFTFSSYAMSWVRQAPGKGLEWVSSISGSGDYIYYADSVKGRFTISRDISKNTLYLQMNSLRAEDTAVYYCAKEGTGANSSLADYRGQGTLVTVSSGGGSGGGSEVQLLESGGGLVQPGGSLRLSCAASGFIFSSYAMSWVRQAPGKGQEWVSGVSGTGVNTYYADSVKGRFTISRDNSKNTLYLQMNSLRAEDTAVYYCASGKGWDSGSWYEDYRGQGTLVTVSSGTGGGGSGGGGSGGGGSEFDIQMTQSPSSLSASVGDRVTITCKASDHINNWLAWYQQKPGQAPKLLIYGATTLETGVPSRFSGSGSGTDYTLTISSLQPEDFATYYCQQSWNTPWTFGQGTKLEIKRLEGQPKANPTVTLFPPSSEELQANKATLVCLISDFYPGAVTVAWKADGSPVKAGVETTKPSKQSNNKYAASSYLSLTPEQWKSHRSYSCQVTHEGSTVEKTVAPTECSPIKTDVITMDPKDNCSKDANDTLLLQLTNTSAYYMYLLLLLKSVVYFAIITCCLLRRTAFCCNGEKSRAKRSGSGATNFSLLKQAGDVEENPGPTSMDWIWRILFLVGAATGAHSGPQVQLQESGGGLAQAGGSLRLSCAASGRTFSMGWFRQAPGKEREFVAAITYSGGSPYYASSVRGRFTISRDNAKNTVYLQMNSLKPEDTAVYYCAANPTYGSDWNAENWGQGTQVTVSSGSGGGGSGGGGSGGGGSFEQVQLQQPGAELVKPGASVKMSCKASGYAFSSYWINWMKQKPGQGLEWIGQIYPGDGDTNYNGKFKGRATLTADTSSSTAYMQLSSLTSEDSAVYFCARSITTVVGCAMDYWGQGTSVTVSSTRASTKGPSVFPLAPSSKSTSGGTAALGCLVKDYFPEPVTVSWNSGALTSGVHTFPAVLQSSGLYSLSSVVTVPSSSLGTQTYICNVNHKPSNTKVDKRVEPKSCEVKTDSTDHVKPKETENTKQPSKSCHKPKAIVHTEKVNMMSLTVLGLRMLFAKTVAVNFLLTAKLFFL

SEQ ID NO: 16069 - protein, 1033 aa, Artificial Sequence
  Synthetic Polypeptide
MALPVTALLLPLALLLHAARPEVQLLESGGGLVQPGGSLRLSCAASGFTFSSYAMSWVRQAPGKGLEWVSSISGSGDYIYYADSVKGRFTISRDISKNTLYLQMNSLRAEDTAVYYCAKEGTGANSSLADYRGQGTLVTVSSGGGSGGGSEVQLLESGGGLVQPGGSLRLSCAASGFIFSSYAMSWVRQAPGKGQEWVSGVSGTGVNTYYADSVKGRFTISRDNSKNTLYLQMNSLRAEDTAVYYCASGKGWDSGSWYEDYRGQGTLVTVSSGTGGGGSGGGGSGGGGSEFDIQMTQSPSSLSASVGDRVTITCKASDHINNWLAWYQQKPGQAPKLLIYGATTLETGVPSRFSGSGSGTDYTLTISSLQPEDFATYYCQQSWNTPWTFGQGTKLEIKRLEGQPKANPTVTLFPPSSEELQANKATLVCLISDFYPGAVTVAWKADGSPVKAGVETTKPSKQSNNKYAASSYLSLTPEQWKSHRSYSCQVTHEGSTVEKTVAPTECSGRADCGITSASYHQGVLSATILYEILLGKATLYAVLVSALVLMAMVKRKDSRGRAKRSGSGATNFSLLKQAGDVEENPGPTSMDWIWRILFLVGAATGAHSGPQVQLQESGGGLAQAGGSLRLSCAASGRTFSMGWFRQAPGKEREFVAAITYSGGSPYYASSVRGRFTISRDNAKNTVYLQMNSLKPEDTAVYYCAANPTYGSDWNAENWGQGTQVTVSSGSGGGGSGGGGSGGGGSFEQVQLQQPGAELVKPGASVKMSCKASGYAFSSYWINWMKQKPGQGLEWIGQIYPGDGDTNYNGKFKGRATLTADTSSSTAYMQLSSLTSEDSAVYFCARSITTVVGCAMDYWGQGTSVTVSSTRASTKGPSVFPLAPSSKSTSGGTAALGCLVKDYFPEPVTVSWNSGALTSGVHTFPAVLQSSGLYSLSSVVTVPSSSLGTQTYICNVNHKPSNTKVDKRVEPKSCIPEDTFFPSSDVPCDVKLVEKSFETDTNLNFQNLSVIGFRILLLKVAGFNLLMTLRLWSS

SEQ ID NO: 16070 - protein, 1033 aa, Artificial Sequence
  Synthetic Polypeptide
MALPVTALLLPLALLLHAARPEVQLLESGGGLVQPGGSLRLSCAASGFTFSSYAMSWVRQAPGKGLEWVSSISGSGDYIYYADSVKGRFTISRDISKNTLYLQMNSLRAEDTAVYYCAKEGTGANSSLADYRGQGTLVTVSSGGGSGGGSEVQLLESGGGLVQPGGSLRLSCAASGFIFSSYAMSWVRQAPGKGQEWVSGVSGTGVNTYYADSVKGRFTISRDNSKNTLYLQMNSLRAEDTAVYYCASGKGWDSGSWYEDYRGQGTLVTVSSGTGGGGSGGGGSGGGGSEFDIQMTQSPSSLSASVGDRVTITCKASDHINNWLAWYQQKPGQAPKLLIYGATTLETGVPSRFSGSGSGTDYTLTISSLQPEDFATYYCQQSWNTPWTFGQGTKLEIKRLEGQPKANPTVTLFPPSSEELQANKATLVCLISDFYPGAVTVAWKADGSPVKAGVETTKPSKQSNNKYAASSYLSLTPEQWKSHRSYSCQVTHEGSTVEKTVAPTECSGRADCGFTSESYQQGVLSATILYEILLGKATLYAVLVSALVLMAMVKRKDSRGRAKRSGSGATNFSLLKQAGDVEENPGPTSMDWIWRILFLVGAATGAHSGPQVQLQESGGGLAQAGGSLRLSCAASGRTFSMGWFRQAPGKEREFVAAITYSGGSPYYASSVRGRFTISRDNAKNTVYLQMNSLKPEDTAVYYCAANPTYGSDWNAENWGQGTQVTVSSGSGGGGSGGGGSGGGGSFEQVQLQQPGAELVKPGASVKMSCKASGYAFSSYWINWMKQKPGQGLEWIGQIYPGDGDTNYNGKFKGRATLTADTSSSTAYMQLSSLTSEDSAVYFCARSITTVVGCAMDYWGQGTSVTVSSTRASTKGPSVFPLAPSSKSTSGGTAALGCLVKDYFPEPVTVSWNSGALTSGVHTFPAVLQSSGLYSLSSVVTVPSSSLGTQTYICNVNHKPSNTKVDKRVEPKSCIPEDTFFPSPESSCDVKLVEKSFETDTNLNFQNLSVIGFRILLLKVAGFNLLMTLRLWSS

SEQ ID NO: 16071 - protein, 999 aa, Artificial Sequence
  Synthetic Polypeptide
MALPVTALLLPLALLLHAARPEVQLLESGGGLVQPGGSLRLSCAASGFTFSSYAMSWVRQAPGKGLEWVSSISGSGDYIYYADSVKGRFTISRDISKNTLYLQMNSLRAEDTAVYYCAKEGTGANSSLADYRGQGTLVTVSSGGGSGGGSEVQLLESGGGLVQPGGSLRLSCAASGFIFSSYAMSWVRQAPGKGQEWVSGVSGTGVNTYYADSVKGRFTISRDNSKNTLYLQMNSLRAEDTAVYYCASGKGWDSGSWYEDYRGQGTLVTVSSLEGQPKANPTVTLFPPSSEELQANKATLVCLISDFYPGAVTVAWKADGSPVKAGVETTKPSKQSNNKYAASSYLSLTPEQWKSHRSYSCQVTHEGSTVEKTVAPTECSGRADCGFTSESYQQGVLSATILYEILLGKATLYAVLVSALVLMAMVKRKDSRGRAKRSGSGATNFSLLKQAGDVEENPGPTSMDWIWRILFLVGAATGAHSGPQVQLQESGGGLAQAGGSLRLSCAASGRTFSMGWFRQAPGKEREFVAAITYSGGSPYYASSVRGRFTISRDNAKNTVYLQMNSLKPEDTAVYYCAANPTYGSDWNAENWGQGTQVTVSSTRASTKGPSVFPLAPSSKSTSGGTAALGCLVKDYFPEPVTVSWNSGALTSGVHTFPAVLQSSGLYSLSSVVTVPSSSLGTQTYICNVNHKPSNTKVDKRVEPKSCIPEDTFFPSPESSCDVKLVEKSFETDTNLNFQNLSVIGFRILLLKVAGFNLLMTLRLWSSRAKRSGSGVKQTLNFDLLKLAGDVESNPGPSRGHMTEYKPTVRLATRDDVPRAVRTLAAAFADYPATRHTVDPDRHIERVTELQELFLTRVGLDIGKVWVADDGAAVAVWTTPESVEAGAVFAEIGPRMAELSGSRLAAQQQMEGLLAPHRPKEPAWFLATVGVSPDHQGKGLGSAVVLPGVEAAERAGVPAFLETSAPRNLPFYERLGFTVTADVEVPEGPRTWCMTRKPGA

SEQ ID NO: 16072 - protein, 766 aa, Artificial Sequence
  Synthetic Polypeptide
MALPVTALLLPLALLLHAARPEVQLLESGGGLVQPGGSLRLSCAASGFTFSSYAMSWVRQAPGKGLEWVSSISGSGDYIYYADSVKGRFTISRDISKNTLYLQMNSLRAEDTAVYYCAKEGTGANSSLADYRGQGTLVTVSSGGGSGGGSEVQLLESGGGLVQPGGSLRLSCAASGFIFSSYAMSWVRQAPGKGQEWVSGVSGTGVNTYYADSVKGRFTISRDNSKNTLYLQMNSLRAEDTAVYYCASGKGWDSGSWYEDYRGQGTLVTVSSLEGQPKANPTVTLFPPSSEELQANKATLVCLISDFYPGAVTVAWKADGSPVKAGVETTKPSKQSNNKYAASSYLSLTPEQWKSHRSYSCQVTHEGSTVEKTVAPTECSGRADCGFTSESYQQGVLSATILYEILLGKATLYAVLVSALVLMAMVKRKDSRGRAKRSGSGATNFSLLKQAGDVEENPGPTSMDWIWRILFLVGAATGAHSGPQVQLQESGGGLAQAGGSLRLSCAASGRTFSMGWFRQAPGKEREFVAAITYSGGSPYYASSVRGRFTISRDNAKNTVYLQMNSLKPEDTAVYYCAANPTYGSDWNAENWGQGTQVTVSSTRASTKGPSVFPLAPSSKSTSGGTAALGCLVKDYFPEPVTVSWNSGALTSGVHTFPAVLQSSGLYSLSSVVTVPSSSLGTQTYICNVNHKPSNTKVDKRVEPKSCIPEDTFFPSPESSCDVKLVEKSFETDTNLNFQNLSVIGFRILLLKVAGFNLLMTLRLWSS

SEQ ID NO: 16073 - protein, 794 aa, Artificial Sequence
  Synthetic Polypeptide
MALPVTALLLPLALLLHAARPEVQLLESGGGLVQPGGSLRLSCAASGFTFSSYAMSWVRQAPGKGLEWVSSISGSGDYIYYADSVKGRFTISRDISKNTLYLQMNSLRAEDTAVYYCAKEGTGANSSLADYRGQGTLVTVSSGGGSGGGSEVQLLESGGGLVQPGGSLRLSCAASGFIFSSYAMSWVRQAPGKGQEWVSGVSGTGVNTYYADSVKGRFTISRDNSKNTLYLQMNSLRAEDTAVYYCASGKGWDSGSWYEDYRGQGTLVTVSSLEGSGRADCGFTSESYQQGVLSATILYEILLGKATLYAVLVSALVLMAMVKRKDSRGRAKRSGSGATNFSLLKQAGDVEENPGPTSMDWIWRILFLVGAATGAHSGPQVQLQESGGGLAQAGGSLRLSCAASGRTFSMGWFRQAPGKEREFVAAITYSGGSPYYASSVRGRFTISRDNAKNTVYLQMNSLKPEDTAVYYCAANPTYGSDWNAENWGQGTQVTVSSTRGSIPEDTFFPSPESSCDVKLVEKSFETDTNLNFQNLSVIGFRILLLKVAGFNLLMTLRLWSSRAKRSGSGVKQTLNFDLLKLAGDVESNPGPSRGHMTEYKPTVRLATRDDVPRAVRTLAAAFADYPATRHTVDPDRHIERVTELQELFLTRVGLDIGKVWVADDGAAVAVWTTPESVEAGAVFAEIGPRMAELSGSRLAAQQQMEGLLAPHRPKEPAWFLATVGVSPDHQGKGLGSAVVLPGVEAAERAGVPAFLETSAPRNLPFYERLGFTVTADVEVPEGPRTWCMTRKPGA

SEQ ID NO: 16074 - protein, 561 aa, Artificial Sequence
  Synthetic Polypeptide
MALPVTALLLPLALLLHAARPEVQLLESGGGLVQPGGSLRLSCAASGFTFSSYAMSWVRQAPGKGLEWVSSISGSGDYIYYADSVKGRFTISRDISKNTLYLQMNSLRAEDTAVYYCAKEGTGANSSLADYRGQGTLVTVSSGGGSGGGSEVQLLESGGGLVQPGGSLRLSCAASGFIFSSYAMSWVRQAPGKGQEWVSGVSGTGVNTYYADSVKGRFTISRDNSKNTLYLQMNSLRAEDTAVYYCASGKGWDSGSWYEDYRGQGTLVTVSSLEGSGRADCGFTSESYQQGVLSATILYEILLGKATLYAVLVSALVLMAMVKRKDSRGRAKRSGSGATNFSLLKQAGDVEENPGPTSMDWIWRILFLVGAATGAHSGPQVQLQESGGGLAQAGGSLRLSCAASGRTFSMGWFRQAPGKEREFVAAITYSGGSPYYASSVRGRFTISRDNAKNTVYLQMNSLKPEDTAVYYCAANPTYGSDWNAENWGQGTQVTVSSTRGSIPEDTFFPSPESSCDVKLVEKSFETDTNLNFQNLSVIGFRILLLKVAGFNLLMTLRLWSS

SEQ ID NO: 16075 - protein, 803 aa, Artificial Sequence
  Synthetic Polypeptide
MALPVTALLLPLALLLHAARPEVQLLESGGGLVQPGGSLRLSCAASGFTFSSYAMSWVRQAPGKGLEWVSSISGSGDYIYYADSVKGRFTISRDISKNTLYLQMNSLRAEDTAVYYCAKEGTGANSSLADYRGQGTLVTVSSGGGSGGGSEVQLLESGGGLVQPGGSLRLSCAASGFIFSSYAMSWVRQAPGKGQEWVSGVSGTGVNTYYADSVKGRFTISRDNSKNTLYLQMNSLRAEDTAVYYCASGKGWDSGSWYEDYRGQGTLVTVSSLEDKTHTCPPCPAGRADCGFTSESYQQGVLSATILYEILLGKATLYAVLVSALVLMAMVKRKDSRGRAKRSGSGATNFSLLKQAGDVEENPGPTSMDWIWRILFLVGAATGAHSGPQVQLQESGGGLAQAGGSLRLSCAASGRTFSMGWFRQAPGKEREFVAAITYSGGSPYYASSVRGRFTISRDNAKNTVYLQMNSLKPEDTAVYYCAANPTYGSDWNAENWGQGTQVTVSSTRGSIPEDTFFPSPESSCDVKLVEKSFETDTNLNFQNLSVIGFRILLLKVAGFNLLMTLRLWSSRAKRSGSGVKQTLNFDLLKLAGDVESNPGPSRGHMTEYKPTVRLATRDDVPRAVRTLAAAFADYPATRHTVDPDRHIERVTELQELFLTRVGLDIGKVWVADDGAAVAVWTTPESVEAGAVFAEIGPRMAELSGSRLAAQQQMEGLLAPHRPKEPAWFLATVGVSPDHQGKGLGSAVVLPGVEAAERAGVPAFLETSAPRNLPFYERLGFTVTADVEVPEGPRTWCMTRKPGA

SEQ ID NO: 16076 - protein, 803 aa, Artificial Sequence
  Synthetic Polypeptide
MALPVTALLLPLALLLHAARPEVQLLESGGGLVQPGGSLRLSCAASGFTFSSYAMSWVRQAPGKGLEWVSSISGSGDYIYYADSVKGRFTISRDISKNTLYLQMNSLRAEDTAVYYCAKEGTGANSSLADYRGQGTLVTVSSGGGSGGGSEVQLLESGGGLVQPGGSLRLSCAASGFIFSSYAMSWVRQAPGKGQEWVSGVSGTGVNTYYADSVKGRFTISRDNSKNTLYLQMNSLRAEDTAVYYCASGKGWDSGSWYEDYRGQGTLVTVSSLEGSGRADCGFTSESYQQGVLSATILYEILLGKATLYAVLVSALVLMAMVKRKDSRGRAKRSGSGATNFSLLKQAGDVEENPGPTSMDWIWRILFLVGAATGAHSGPQVQLQESGGGLAQAGGSLRLSCAASGRTFSMGWFRQAPGKEREFVAAITYSGGSPYYASSVRGRFTISRDNAKNTVYLQMNSLKPEDTAVYYCAANPTYGSDWNAENWGQGTQVTVSSTRDKTHTCPPCPAIPEDTFFPSPESSCDVKLVEKSFETDTNLNFQNLSVIGFRILLLKVAGFNLLMTLRLWSSRAKRSGSGVKQTLNFDLLKLAGDVESNPGPSRGHMTEYKPTVRLATRDDVPRAVRTLAAAFADYPATRHTVDPDRHIERVTELQELFLTRVGLDIGKVWVADDGAAVAVWTTPESVEAGAVFAEIGPRMAELSGSRLAAQQQMEGLLAPHRPKEPAWFLATVGVSPDHQGKGLGSAVVLPGVEAAERAGVPAFLETSAPRNLPFYERLGFTVTADVEVPEGPRTWCMTRKPGA

SEQ ID NO: 16077 - protein, 812 aa, Artificial Sequence
  Synthetic Polypeptide
MALPVTALLLPLALLLHAARPEVQLLESGGGLVQPGGSLRLSCAASGFTFSSYAMSWVRQAPGKGLEWVSSISGSGDYIYYADSVKGRFTISRDISKNTLYLQMNSLRAEDTAVYYCAKEGTGANSSLADYRGQGTLVTVSSGGGSGGGSEVQLLESGGGLVQPGGSLRLSCAASGFIFSSYAMSWVRQAPGKGQEWVSGVSGTGVNTYYADSVKGRFTISRDNSKNTLYLQMNSLRAEDTAVYYCASGKGWDSGSWYEDYRGQGTLVTVSSLEDKTHTCPPCPAGRADCGFTSESYQQGVLSATILYEILLGKATLYAVLVSALVLMAMVKRKDSRGRAKRSGSGATNFSLLKQAGDVEENPGPTSMDWIWRILFLVGAATGAHSGPQVQLQESGGGLAQAGGSLRLSCAASGRTFSMGWFRQAPGKEREFVAAITYSGGSPYYASSVRGRFTISRDNAKNTVYLQMNSLKPEDTAVYYCAANPTYGSDWNAENWGQGTQVTVSSTRDKTHTCPPCPAIPEDTFFPSPESSCDVKLVEKSFETDTNLNFQNLSVIGFRILLLKVAGFNLLMTLRLWSSRAKRSGSGVKQTLNFDLLKLAGDVESNPGPSRGHMTEYKPTVRLATRDDVPRAVRTLAAAFADYPATRHTVDPDRHIERVTELQELFLTRVGLDIGKVWVADDGAAVAVWTTPESVEAGAVFAEIGPRMAELSGSRLAAQQQMEGLLAPHRPKEPAWFLATVGVSPDHQGKGLGSAVVLPGVEAAERAGVPAFLETSAPRNLPFYERLGFTVTADVEVPEGPRTWCMTRKPGA

SEQ ID NO: 16078 - protein, 579 aa, Artificial Sequence
  Synthetic Polypeptide
MALPVTALLLPLALLLHAARPEVQLLESGGGLVQPGGSLRLSCAASGFTFSSYAMSWVRQAPGKGLEWVSSISGSGDYIYYADSVKGRFTISRDISKNTLYLQMNSLRAEDTAVYYCAKEGTGANSSLADYRGQGTLVTVSSGGGSGGGSEVQLLESGGGLVQPGGSLRLSCAASGFIFSSYAMSWVRQAPGKGQEWVSGVSGTGVNTYYADSVKGRFTISRDNSKNTLYLQMNSLRAEDTAVYYCASGKGWDSGSWYEDYRGQGTLVTVSSLEDKTHTCPPCPAGRADCGFTSESYQQGVLSATILYEILLGKATLYAVLVSALVLMAMVKRKDSRGRAKRSGSGATNFSLLKQAGDVEENPGPTSMDWIWRILFLVGAATGAHSGPQVQLQESGGGLAQAGGSLRLSCAASGRTFSMGWFRQAPGKEREFVAAITYSGGSPYYASSVRGRFTISRDNAKNTVYLQMNSLKPEDTAVYYCAANPTYGSDWNAENWGQGTQVTVSSTRDKTHTCPPCPAIPEDTFFPSPESSCDVKLVEKSFETDTNLNFQNLSVIGFRILLLKVAGFNLLMTLRLWSS

SEQ ID NO: 16079 - protein, 570 aa, Artificial Sequence
  Synthetic Polypeptide
MALPVTALLLPLALLLHAARPEVQLLESGGGLVQPGGSLRLSCAASGFTFSSYAMSWVRQAPGKGLEWVSSISGSGDYIYYADSVKGRFTISRDISKNTLYLQMNSLRAEDTAVYYCAKEGTGANSSLADYRGQGTLVTVSSGGGSGGGSEVQLLESGGGLVQPGGSLRLSCAASGFIFSSYAMSWVRQAPGKGQEWVSGVSGTGVNTYYADSVKGRFTISRDNSKNTLYLQMNSLRAEDTAVYYCASGKGWDSGSWYEDYRGQGTLVTVSSLEGSGRADCGFTSESYQQGVLSATILYEILLGKATLYAVLVSALVLMAMVKRKDSRGRAKRSGSGATNFSLLKQAGDVEENPGPTSMDWIWRILFLVGAATGAHSGPQVQLQESGGGLAQAGGSLRLSCAASGRTFSMGWFRQAPGKEREFVAAITYSGGSPYYASSVRGRFTISRDNAKNTVYLQMNSLKPEDTAVYYCAANPTYGSDWNAENWGQGTQVTVSSTRDKTHTCPPCPAIPEDTFFPSPESSCDVKLVEKSFETDTNLNFQNLSVIGFRILLLKVAGFNLLMTLRLWSS

SEQ ID NO: 16080 - protein, 1021 aa, Artificial Sequence
  Synthetic Polypeptide
MALPVTALLLPLALLLHAARPEVQLLESGGGLVQPGGSLRLSCAASGFTFSSYAMSWVRQAPGKGLEWVSSISGSGDYIYYADSVKGRFTISRDISKNTLYLQMNSLRAEDTAVYYCAKEGTGANSSLADYRGQGTLVTVSSGGGSGGGSEVQLLESGGGLVQPGGSLRLSCAASGFIFSSYAMSWVRQAPGKGQEWVSGVSGTGVNTYYADSVKGRFTISRDNSKNTLYLQMNSLRAEDTAVYYCASGKGWDSGSWYEDYRGQGTLVTVSSLEGQPKANPTVTLFPPSSEELQANKATLVCLISDFYPGAVTVAWKADGSPVKAGVETTKPSKQSNNKYAASSYLSLTPEQWKSHRSYSCQVTHEGSTVEKTVAPTECSPIKTDVITMDPKDNCSKDANDTLLLQLTNTSAYYMYLLLLLKSVVYFAIITCCLLRRTAFCCNGEKSRAKRSGSGATNFSLLKQAGDVEENPGPTSMDWIWRILFLVGAATGAHSGPQVQLQESGGGLAQAGGSLRLSCAASGRTFSMGWFRQAPGKEREFVAAITYSGGSPYYASSVRGRFTISRDNAKNTVYLQMNSLKPEDTAVYYCAANPTYGSDWNAENWGQGTQVTVSSTRASTKGPSVFPLAPSSKSTSGGTAALGCLVKDYFPEPVTVSWNSGALTSGVHTFPAVLQSSGLYSLSSVVTVPSSSLGTQTYICNVNHKPSNTKVDKRVEPKSCEVKTDSTDHVKPKETENTKQPSKSCHKPKAIVHTEKVNMMSLTVLGLRMLFAKTVAVNFLLTAKLFFLRAKRSGSGVKQTLNFDLLKLAGDVESNPGPSRGHMTEYKPTVRLATRDDVPRAVRTLAAAFADYPATRHTVDPDRHIERVTELQELFLTRVGLDIGKVWVADDGAAVAVWTTPESVEAGAVFAEIGPRMAELSGSRLAAQQQMEGLLAPHRPKEPAWFLATVGVSPDHQGKGLGSAVVLPGVEAAERAGVPAFLETSAPRNLPFYERLGFTVTADVEVPEGPRTWCMTRKPGA

SEQ ID NO: 16081 - protein, 788 aa, Artificial Sequence
  Synthetic Polypeptide
MALPVTALLLPLALLLHAARPEVQLLESGGGLVQPGGSLRLSCAASGFTFSSYAMSWVRQAPGKGLEWVSSISGSGDYIYYADSVKGRFTISRDISKNTLYLQMNSLRAEDTAVYYCAKEGTGANSSLADYRGQGTLVTVSSGGGSGGGSEVQLLESGGGLVQPGGSLRLSCAASGFIFSSYAMSWVRQAPGKGQEWVSGVSGTGVNTYYADSVKGRFTISRDNSKNTLYLQMNSLRAEDTAVYYCASGKGWDSGSWYEDYRGQGTLVTVSSLEGQPKANPTVTLFPPSSEELQANKATLVCLISDFYPGAVTVAWKADGSPVKAGVETTKPSKQSNNKYAASSYLSLTPEQWKSHRSYSCQVTHEGSTVEKTVAPTECSPIKTDVITMDPKDNCSKDANDTLLLQLTNTSAYYMYLLLLLKSVVYFAIITCCLLRRTAFCCNGEKSRAKRSGSGATNFSLLKQAGDVEENPGPTSMDWIWRILFLVGAATGAHSGPQVQLQESGGGLAQAGGSLRLSCAASGRTFSMGWFRQAPGKEREFVAAITYSGGSPYYASSVRGRFTISRDNAKNTVYLQMNSLKPEDTAVYYCAANPTYGSDWNAENWGQGTQVTVSSTRASTKGPSVFPLAPSSKSTSGGTAALGCLVKDYFPEPVTVSWNSGALTSGVHTFPAVLQSSGLYSLSSVVTVPSSSLGTQTYICNVNHKPSNTKVDKRVEPKSCEVKTDSTDHVKPKETENTKQPSKSCHKPKAIVHTEKVNMMSLTVLGLRMLFAKTVAVNFLLTAKLFFL

SEQ ID NO: 16082 - protein, 816 aa, Artificial Sequence
  Synthetic Polypeptide
MALPVTALLLPLALLLHAARPEVQLLESGGGLVQPGGSLRLSCAASGFTFSSYAMSWVRQAPGKGLEWVSSISGSGDYIYYADSVKGRFTISRDISKNTLYLQMNSLRAEDTAVYYCAKEGTGANSSLADYRGQGTLVTVSSGGGSGGGSEVQLLESGGGLVQPGGSLRLSCAASGFIFSSYAMSWVRQAPGKGQEWVSGVSGTGVNTYYADSVKGRFTISRDNSKNTLYLQMNSLRAEDTAVYYCASGKGWDSGSWYEDYRGQGTLVTVSSLEGSPIKTDVITMDPKDNCSKDANDTLLLQLTNTSAYYMYLLLLLKSVVYFAIITCCLLRRTAFCCNGEKSRAKRSGSGATNFSLLKQAGDVEENPGPTSMDWIWRILFLVGAATGAHSGPQVQLQESGGGLAQAGGSLRLSCAASGRTFSMGWFRQAPGKEREFVAAITYSGGSPYYASSVRGRFTISRDNAKNTVYLQMNSLKPEDTAVYYCAANPTYGSDWNAENWGQGTQVTVSSTRGSEVKTDSTDHVKPKETENTKQPSKSCHKPKAIVHTEKVNMMSLTVLGLRMLFAKTVAVNFLLTAKLFFLRAKRSGSGVKQTLNFDLLKLAGDVESNPGPSRGHMTEYKPTVRLATRDDVPRAVRTLAAAFADYPATRHTVDPDRHIERVTELQELFLTRVGLDIGKVWVADDGAAVAVWTTPESVEAGAVFAEIGPRMAELSGSRLAAQQQMEGLLAPHRPKEPAWFLATVGVSPDHQGKGLGSAVVLPGVEAAERAGVPAFLETSAPRNLPFYERLGFTVTADVEVPEGPRTWCMTRKPGA

SEQ ID NO: 16083 - protein, 583 aa, Artificial Sequence
  Synthetic Polypeptide
MALPVTALLLPLALLLHAARPEVQLLESGGGLVQPGGSLRLSCAASGFTFSSYAMSWVRQAPGKGLEWVSSISGSGDYIYYADSVKGRFTISRDISKNTLYLQMNSLRAEDTAVYYCAKEGTGANSSLADYRGQGTLVTVSSGGGSGGGSEVQLLESGGGLVQPGGSLRLSCAASGFIFSSYAMSWVRQAPGKGQEWVSGVSGTGVNTYYADSVKGRFTISRDNSKNTLYLQMNSLRAEDTAVYYCASGKGWDSGSWYEDYRGQGTLVTVSSLEGSPIKTDVITMDPKDNCSKDANDTLLLQLTNTSAYYMYLLLLLKSVVYFAIITCCLLRRTAFCCNGEKSRAKRSGSGATNFSLLKQAGDVEENPGPTSMDWIWRILFLVGAATGAHSGPQVQLQESGGGLAQAGGSLRLSCAASGRTFSMGWFRQAPGKEREFVAAITYSGGSPYYASSVRGRFTISRDNAKNTVYLQMNSLKPEDTAVYYCAANPTYGSDWNAENWGQGTQVTVSSTRGSEVKTDSTDHVKPKETENTKQPSKSCHKPKAIVHTEKVNMMSLTVLGLRMLFAKTVAVNFLLTAKLFFL

SEQ ID NO: 16084 - protein, 825 aa, Artificial Sequence
  Synthetic Polypeptide
MALPVTALLLPLALLLHAARPEVQLLESGGGLVQPGGSLRLSCAASGFTFSSYAMSWVRQAPGKGLEWVSSISGSGDYIYYADSVKGRFTISRDISKNTLYLQMNSLRAEDTAVYYCAKEGTGANSSLADYRGQGTLVTVSSGGGSGGGSEVQLLESGGGLVQPGGSLRLSCAASGFIFSSYAMSWVRQAPGKGQEWVSGVSGTGVNTYYADSVKGRFTISRDNSKNTLYLQMNSLRAEDTAVYYCASGKGWDSGSWYEDYRGQGTLVTVSSLEDKTHTCPPCPAPIKTDVITMDPKDNCSKDANDTLLLQLTNTSAYYMYLLLLLKSVVYFAIITCCLLRRTAFCCNGEKSRAKRSGSGATNFSLLKQAGDVEENPGPTSMDWIWRILFLVGAATGAHSGPQVQLQESGGGLAQAGGSLRLSCAASGRTFSMGWFRQAPGKEREFVAAITYSGGSPYYASSVRGRFTISRDNAKNTVYLQMNSLKPEDTAVYYCAANPTYGSDWNAENWGQGTQVTVSSTRGSEVKTDSTDHVKPKETENTKQPSKSCHKPKAIVHTEKVNMMSLTVLGLRMLFAKTVAVNFLLTAKLFFLRAKRSGSGVKQTLNFDLLKLAGDVESNPGPSRGHMTEYKPTVRLATRDDVPRAVRTLAAAFADYPATRHTVDPDRHIERVTELQELFLTRVGLDIGKVWVADDGAAVAVWTTPESVEAGAVFAEIGPRMAELSGSRLAAQQQMEGLLAPHRPKEPAWFLATVGVSPDHQGKGLGSAVVLPGVEAAERAGVPAFLETSAPRNLPFYERLGFTVTADVEVPEGPRTWCMTRKPGA

SEQ ID NO: 16085 - protein, 825 aa, Artificial Sequence
  Synthetic Polypeptide
MALPVTALLLPLALLLHAARPEVQLLESGGGLVQPGGSLRLSCAASGFTFSSYAMSWVRQAPGKGLEWVSSISGSGDYIYYADSVKGRFTISRDISKNTLYLQMNSLRAEDTAVYYCAKEGTGANSSLADYRGQGTLVTVSSGGGSGGGSEVQLLESGGGLVQPGGSLRLSCAASGFIFSSYAMSWVRQAPGKGQEWVSGVSGTGVNTYYADSVKGRFTISRDNSKNTLYLQMNSLRAEDTAVYYCASGKGWDSGSWYEDYRGQGTLVTVSSLEGSPIKTDVITMDPKDNCSKDANDTLLLQLTNTSAYYMYLLLLLKSVVYFAIITCCLLRRTAFCCNGEKSRAKRSGSGATNFSLLKQAGDVEENPGPTSMDWIWRILFLVGAATGAHSGPQVQLQESGGGLAQAGGSLRLSCAASGRTFSMGWFRQAPGKEREFVAAITYSGGSPYYASSVRGRFTISRDNAKNTVYLQMNSLKPEDTAVYYCAANPTYGSDWNAENWGQGTQVTVSSTRDKTHTCPPCPAEVKTDSTDHVKPKETENTKQPSKSCHKPKAIVHTEKVNMMSLTVLGLRMLFAKTVAVNFLLTAKLFFLRAKRSGSGVKQTLNFDLLKLAGDVESNPGPSRGHMTEYKPTVRLATRDDVPRAVRTLAAAFADYPATRHTVDPDRHIERVTELQELFLTRVGLDIGKVWVADDGAAVAVWTTPESVEAGAVFAEIGPRMAELSGSRLAAQQQMEGLLAPHRPKEPAWFLATVGVSPDHQGKGLGSAVVLPGVEAAERAGVPAFLETSAPRNLPFYERLGFTVTADVEVPEGPRTWCMTRKPGA

SEQ ID NO: 16086 - protein, 834 aa, Artificial Sequence
  Synthetic Polypeptide
MALPVTALLLPLALLLHAARPEVQLLESGGGLVQPGGSLRLSCAASGFTFSSYAMSWVRQAPGKGLEWVSSISGSGDYIYYADSVKGRFTISRDISKNTLYLQMNSLRAEDTAVYYCAKEGTGANSSLADYRGQGTLVTVSSGGGSGGGSEVQLLESGGGLVQPGGSLRLSCAASGFIFSSYAMSWVRQAPGKGQEWVSGVSGTGVNTYYADSVKGRFTISRDNSKNTLYLQMNSLRAEDTAVYYCASGKGWDSGSWYEDYRGQGTLVTVSSLEDKTHTCPPCPAPIKTDVITMDPKDNCSKDANDTLLLQLTNTSAYYMYLLLLLKSVVYFAIITCCLLRRTAFCCNGEKSRAKRSGSGATNFSLLKQAGDVEENPGPTSMDWIWRILFLVGAATGAHSGPQVQLQESGGGLAQAGGSLRLSCAASGRTFSMGWFRQAPGKEREFVAAITYSGGSPYYASSVRGRFTISRDNAKNTVYLQMNSLKPEDTAVYYCAANPTYGSDWNAENWGQGTQVTVSSTRDKTHTCPPCPAEVKTDSTDHVKPKETENTKQPSKSCHKPKAIVHTEKVNMMSLTVLGLRMLFAKTVAVNFLLTAKLFFLRAKRSGSGVKQTLNFDLLKLAGDVESNPGPSRGHMTEYKPTVRLATRDDVPRAVRTLAAAFADYPATRHTVDPDRHIERVTELQELFLTRVGLDIGKVWVADDGAAVAVWTTPESVEAGAVFAEIGPRMAELSGSRLAAQQQMEGLLAPHRPKEPAWFLATVGVSPDHQGKGLGSAVVLPGVEAAERAGVPAFLETSAPRNLPFYERLGFTVTADVEVPEGPRTWCMTRKPGA

SEQ ID NO: 16087 - protein, 601 aa, Artificial Sequence
  Synthetic Polypeptide
MALPVTALLLPLALLLHAARPEVQLLESGGGLVQPGGSLRLSCAASGFTFSSYAMSWVRQAPGKGLEWVSSISGSGDYIYYADSVKGRFTISRDISKNTLYLQMNSLRAEDTAVYYCAKEGTGANSSLADYRGQGTLVTVSSGGGSGGGSEVQLLESGGGLVQPGGSLRLSCAASGFIFSSYAMSWVRQAPGKGQEWVSGVSGTGVNTYYADSVKGRFTISRDNSKNTLYLQMNSLRAEDTAVYYCASGKGWDSGSWYEDYRGQGTLVTVSSLEDKTHTCPPCPAPIKTDVITMDPKDNCSKDANDTLLLQLTNTSAYYMYLLLLLKSVVYFAIITCCLLRRTAFCCNGEKSRAKRSGSGATNFSLLKQAGDVEENPGPTSMDWIWRILFLVGAATGAHSGPQVQLQESGGGLAQAGGSLRLSCAASGRTFSMGWFRQAPGKEREFVAAITYSGGSPYYASSVRGRFTISRDNAKNTVYLQMNSLKPEDTAVYYCAANPTYGSDWNAENWGQGTQVTVSSTRDKTHTCPPCPAEVKTDSTDHVKPKETENTKQPSKSCHKPKAIVHTEKVNMMSLTVLGLRMLFAKTVAVNFLLTAKLFFL

SEQ ID NO: 16088 - protein, 592 aa, Artificial Sequence
  Synthetic Polypeptide
MALPVTALLLPLALLLHAARPEVQLLESGGGLVQPGGSLRLSCAASGFTFSSYAMSWVRQAPGKGLEWVSSISGSGDYIYYADSVKGRFTISRDISKNTLYLQMNSLRAEDTAVYYCAKEGTGANSSLADYRGQGTLVTVSSGGGSGGGSEVQLLESGGGLVQPGGSLRLSCAASGFIFSSYAMSWVRQAPGKGQEWVSGVSGTGVNTYYADSVKGRFTISRDNSKNTLYLQMNSLRAEDTAVYYCASGKGWDSGSWYEDYRGQGTLVTVSSLEGSPIKTDVITMDPKDNCSKDANDTLLLQLTNTSAYYMYLLLLLKSVVYFAIITCCLLRRTAFCCNGEKSRAKRSGSGATNFSLLKQAGDVEENPGPTSMDWIWRILFLVGAATGAHSGPQVQLQESGGGLAQAGGSLRLSCAASGRTFSMGWFRQAPGKEREFVAAITYSGGSPYYASSVRGRFTISRDNAKNTVYLQMNSLKPEDTAVYYCAANPTYGSDWNAENWGQGTQVTVSSTRDKTHTCPPCPAEVKTDSTDHVKPKETENTKQPSKSCHKPKAIVHTEKVNMMSLTVLGLRMLFAKTVAVNFLLTAKLFFL

SEQ ID NO: 16089 - protein, 808 aa, Artificial Sequence
  Synthetic Polypeptide
MALPVTALLLPLALLLHAARPEVQLLESGGGLVQPGGSLRLSCAASGFTFSSYAMSWVRQAPGKGLEWVSSISGSGDYIYYADSVKGRFTISRDISKNTLYLQMNSLRAEDTAVYYCAKEGTGANSSLADYRGQGTLVTVSSGGGSGGGSEVQLLESGGGLVQPGGSLRLSCAASGFIFSSYAMSWVRQAPGKGQEWVSGVSGTGVNTYYADSVKGRFTISRDNSKNTLYLQMNSLRAEDTAVYYCASGKGWDSGSWYEDYRGQGTLVTVSSLEGSMDPKDNCSKDANDTLLLQLTNTSAYYMYLLLLLKSVVYFAIITCCLLRRTAFCCNGEKSRAKRSGSGATNFSLLKQAGDVEENPGPTSMDWIWRILFLVGAATGAHSGPQVQLQESGGGLAQAGGSLRLSCAASGRTFSMGWFRQAPGKEREFVAAITYSGGSPYYASSVRGRFTISRDNAKNTVYLQMNSLKPEDTAVYYCAANPTYGSDWNAENWGQGTQVTVSSTRGSEVKTDSTDHVKPKETENTKQPSKSCHKPKAIVHTEKVNMMSLTVLGLRMLFAKTVAVNFLLTAKLFFLRAKRSGSGVKQTLNFDLLKLAGDVESNPGPSRGHMTEYKPTVRLATRDDVPRAVRTLAAAFADYPATRHTVDPDRHIERVTELQELFLTRVGLDIGKVWVADDGAAVAVWTTPESVEAGAVFAEIGPRMAELSGSRLAAQQQMEGLLAPHRPKEPAWFLATVGVSPDHQGKGLGSAVVLPGVEAAERAGVPAFLETSAPRNLPFYERLGFTVTADVEVPEGPRTWCMTRKPGA

SEQ ID NO: 16090 - protein, 809 aa, Artificial Sequence
  Synthetic Polypeptide
MALPVTALLLPLALLLHAARPEVQLLESGGGLVQPGGSLRLSCAASGFTFSSYAMSWVRQAPGKGLEWVSSISGSGDYIYYADSVKGRFTISRDISKNTLYLQMNSLRAEDTAVYYCAKEGTGANSSLADYRGQGTLVTVSSGGGSGGGSEVQLLESGGGLVQPGGSLRLSCAASGFIFSSYAMSWVRQAPGKGQEWVSGVSGTGVNTYYADSVKGRFTISRDNSKNTLYLQMNSLRAEDTAVYYCASGKGWDSGSWYEDYRGQGTLVTVSSLEGSPIKTDVITMDPKDNCSKDANDTLLLQLTNTSAYYMYLLLLLKSVVYFAIITCCLLRRTAFCCNGEKSRAKRSGSGATNFSLLKQAGDVEENPGPTSMDWIWRILFLVGAATGAHSGPQVQLQESGGGLAQAGGSLRLSCAASGRTFSMGWFRQAPGKEREFVAAITYSGGSPYYASSVRGRFTISRDNAKNTVYLQMNSLKPEDTAVYYCAANPTYGSDWNAENWGQGTQVTVSSTRGSDHVKPKETENTKQPSKSCHKPKAIVHTEKVNMMSLTVLGLRMLFAKTVAVNFLLTAKLFFLRAKRSGSGVKQTLNFDLLKLAGDVESNPGPSRGHMTEYKPTVRLATRDDVPRAVRTLAAAFADYPATRHTVDPDRHIERVTELQELFLTRVGLDIGKVWVADDGAAVAVWTTPESVEAGAVFAEIGPRMAELSGSRLAAQQQMEGLLAPHRPKEPAWFLATVGVSPDHQGKGLGSAVVLPGVEAAERAGVPAFLETSAPRNLPFYERLGFTVTADVEVPEGPRTWCMTRKPGA

SEQ ID NO: 16091 - protein, 801 aa, Artificial Sequence
  Synthetic Polypeptide
MALPVTALLLPLALLLHAARPEVQLLESGGGLVQPGGSLRLSCAASGFTFSSYAMSWVRQAPGKGLEWVSSISGSGDYIYYADSVKGRFTISRDISKNTLYLQMNSLRAEDTAVYYCAKEGTGANSSLADYRGQGTLVTVSSGGGSGGGSEVQLLESGGGLVQPGGSLRLSCAASGFIFSSYAMSWVRQAPGKGQEWVSGVSGTGVNTYYADSVKGRFTISRDNSKNTLYLQMNSLRAEDTAVYYCASGKGWDSGSWYEDYRGQGTLVTVSSLEGSMDPKDNCSKDANDTLLLQLTNTSAYYMYLLLLLKSVVYFAIITCCLLRRTAFCCNGEKSRAKRSGSGATNFSLLKQAGDVEENPGPTSMDWIWRILFLVGAATGAHSGPQVQLQESGGGLAQAGGSLRLSCAASGRTFSMGWFRQAPGKEREFVAAITYSGGSPYYASSVRGRFTISRDNAKNTVYLQMNSLKPEDTAVYYCAANPTYGSDWNAENWGQGTQVTVSSTRGSDHVKPKETENTKQPSKSCHKPKAIVHTEKVNMMSLTVLGLRMLFAKTVAVNFLLTAKLFFLRAKRSGSGVKQTLNFDLLKLAGDVESNPGPSRGHMTEYKPTVRLATRDDVPRAVRTLAAAFADYPATRHTVDPDRHIERVTELQELFLTRVGLDIGKVWVADDGAAVAVWTTPESVEAGAVFAEIGPRMAELSGSRLAAQQQMEGLLAPHRPKEPAWFLATVGVSPDHQGKGLGSAVVLPGVEAAERAGVPAFLETSAPRNLPFYERLGFTVTADVEVPEGPRTWCMTRKPGA

SEQ ID NO: 16092 - protein, 447 aa, Artificial Sequence
  Synthetic Polypeptide
MALPVTALLLPLALLLHAARPEVQLLESGGGLVQPGGSLRLSCAASGFTFSSYAMSWVRQAPGKGLEWVSSISGSGDYIYYADSVKGRFTISRDISKNTLYLQMNSLRAEDTAVYYCAKEGTGANSSLADYRGQGTLVTVSSGGGSGGGSEVQLLESGGGLVQPGGSLRLSCAASGFIFSSYAMSWVRQAPGKGQEWVSGVSGTGVNTYYADSVKGRFTISRDNSKNTLYLQMNSLRAEDTAVYYCASGKGWDSGSWYEDYRGQGTLVTVSSLEGQPKANPTVTLFPPSSEELQANKATLVCLISDFYPGAVTVAWKADGSPVKAGVETTKPSKQSNNKYAASSYLSLTPEQWKSHRSYSCQVTHEGSTVEKTVAPTECSPIKTDVITMDPKDNCSKDANDTLLLQLTNTSAYYMYLLLLLKSVVYFAIITCCLLRRTAFCCNGEKS

SEQ ID NO: 16093 - protein, 767 aa, Artificial Sequence; identical to SEQ ID NO: 15845
  Synthetic Polypeptide

SEQ ID NO: 16094 - protein, 1120 aa, Artificial Sequence; identical to SEQ ID NO: 15846
  Synthetic Polypeptide

SEQ ID NO: 16095 - protein, 1119 aa, Artificial Sequence; identical to SEQ ID NO: 15847
  Synthetic Polypeptide

SEQ ID NO: 16096 - protein, 1119 aa, Artificial Sequence; identical to SEQ ID NO: 15848
  Synthetic Polypeptide

SEQ ID NO: 16097 - protein, 886 aa, Artificial Sequence; identical to SEQ ID NO: 15849
  Synthetic Polypeptide

SEQ ID NO: 16098 - protein, 1111 aa, Artificial Sequence; identical to SEQ ID NO: 15850
  Synthetic Polypeptide

SEQ ID NO: 16099 - protein, 890 aa, Artificial Sequence; identical to SEQ ID NO: 15851
  Synthetic Polypeptide

SEQ ID NO: 16100 - protein, 1112 aa, Artificial Sequence; identical to SEQ ID NO: 15852
  Synthetic Polypeptide

SEQ ID NO: 16101 - protein, 1119 aa, Artificial Sequence; identical to SEQ ID NO: 15853
  Synthetic Polypeptide

SEQ ID NO: 16102 - protein, 1201 aa, Artificial Sequence; identical to SEQ ID NO: 15854
  Synthetic Polypeptide

SEQ ID NO: 16103 - protein, 1156 aa, Artificial Sequence; identical to SEQ ID NO: 15855
  Synthetic Polypeptide

SEQ ID NO: 16104 - protein, 894 aa, Artificial Sequence; identical to SEQ ID NO: 15856
  Synthetic Polypeptide

SEQ ID NO: 16105 - protein, 1296 aa, Artificial Sequence; identical to SEQ ID NO: 15857
  Synthetic Polypeptide

SEQ ID NO: 16106 - protein, 1082 aa, Artificial Sequence; identical to SEQ ID NO: 15858
  Synthetic Polypeptide

SEQ ID NO: 16107 - protein, 1082 aa, Artificial Sequence; identical to SEQ ID NO: 15859
  Synthetic Polypeptide

SEQ ID NO: 16108 - protein, 1153 aa, Artificial Sequence; identical to SEQ ID NO: 15860
  Synthetic Polypeptide

SEQ ID NO: 16109 - protein, 1194 aa, Artificial Sequence; identical to SEQ ID NO: 15861
  Synthetic Polypeptide

SEQ ID NO: 16110 - protein, 1155 aa, Artificial Sequence; identical to SEQ ID NO: 15862
  Synthetic Polypeptide

SEQ ID NO: 16111 - protein, 1197 aa, Artificial Sequence; identical to SEQ ID NO: 15863
  Synthetic Polypeptide

SEQ ID NO: 16112 - protein, 1087 aa, Artificial Sequence; identical to SEQ ID NO: 15864
  Synthetic Polypeptide

SEQ ID NO: 16113 - protein, 912 aa, Artificial Sequence; identical to SEQ ID NO: 15865
  Synthetic Polypeptide

SEQ ID NO: 16114 - protein, 890 aa, Artificial Sequence; identical to SEQ ID NO: 15866
  Synthetic Polypeptide

SEQ ID NO: 16115 - protein, 890 aa, Artificial Sequence; identical to SEQ ID NO: 15867
  Synthetic Polypeptide

SEQ ID NO: 16116 - protein, 720 aa, Artificial Sequence; identical to SEQ ID NO: 15868
  Synthetic Polypeptide

SEQ ID NO: 16117 - protein, 685 aa, Artificial Sequence; identical to SEQ ID NO: 15869
  Synthetic Polypeptide

SEQ ID NO: 16118 - protein, 695 aa, Artificial Sequence; identical to SEQ ID NO: 15870
  Synthetic Polypeptide

SEQ ID NO: 16119 - protein, 678 aa, Artificial Sequence; identical to SEQ ID NO: 15871
  Synthetic Polypeptide

SEQ ID NO: 16120 - protein, 714 aa, Artificial Sequence; identical to SEQ ID NO: 15872
  Synthetic Polypeptide

SEQ ID NO: 16121 - protein, 548 aa, Artificial Sequence; identical to SEQ ID NO: 15873
  Synthetic Polypeptide

SEQ ID NO: 16122 - protein, 726 aa, Artificial Sequence; identical to SEQ ID NO: 15874
  Synthetic Polypeptide

SEQ ID NO: 16123 - protein, 560 aa, Artificial Sequence; identical to SEQ ID NO: 15875
  Synthetic Polypeptide

SEQ ID NO: 16124 - protein, 1390 aa, Artificial Sequence
  Synthetic Polypeptide
MALPVTALLLPLALLLHAARPEVQLLESGGGLVQPGGSLRLSCAASGFTFSSYAMSWVRQAPGKGLEWVSSISGSGDYIYYADSVKGRFTISRDISKNTLYLQMNSLRAEDTAVYYCAKEGTGANSSLADYRGQGTLVTVSSGGGSGGGSEVQLLESGGGLVQPGGSLRLSCAASGFIFSSYAMSWVRQAPGKGQEWVSGVSGTGVNTYYADSVKGRFTISRDNSKNTLYLQMNSLRAEDTAVYYCASGKGWDSGSWYEDYRGQGTLVTVSSGTGGGGSGGGGSGGGGSEFDIQMTQSPSSLSASVGDRVTITCKASDHINNWLAWYQQKPGQAPKLLIYGATTLETGVPSRFSGSGSGTDYTLTISSLQPEDFATYYCQQSWNTPWTFGQGTKLEIKRLEIQNPDPAVYQLRDSKSSDKSVCLFTDFDSQTNVSQSKDSDVYITDKCVLDMRSMDFKSNSAVAWSNKSDFACANAFNNSIIPEDTFFPSSDVPCDVKLVEKSFETDTNLNFQNLSVIGFRILLLKVAGFNLLMTLRLWSSRAKRSGSGVKQTLNFDLLKLAGDVESNPGPTSMDWIWRILFLVGAATGAHSQLQLQESGPGLVKPSETLSLTCTVSGGSISSGDYYWGWIRQPPGKGLEWIGHIYYSGATYYNPSLKSRVTISVDTSRNQFSLKLSSVTAADTAVYYCTRDDSSNWRSRGQGTLVTVSSSGGGGSGGGGSQVQLQESGGGLAQAGGSLRLSCAASGRTFSMGWFRQAPGKEREFVAAITYSGGSPYYASSVRGRFTISRDNAKNTVYLQMNSLKPEDTAVYYCAANPTYGSDWNAENWGQGTQVTVSSGSGGGGSGGGGSGGGGSFEQVQLQQPGAELVKPGASVKMSCKASGYAFSSYWINWMKQKPGQGLEWIGQIYPGDGDTNYNGKFKGRATLTADTSSSTAYMQLSSLTSEDSAVYFCARSITTVVGCAMDYWGQGTSVTVSSTREDLKNVFPPEVAVFEPSKAEIAHTQKATLVCLATGFYPDHVELSWWVNGKEVHSGVCTDPQPLKEQPALNDSRYCLSSRLRVSATFWQNPRNHFRCQVQFYGLSENDEWTQDRAKPVTQIVSAEAWGRADCGITSASYHQGVLSATILYEILLGKATLYAVLVSALVLMAMVKRKDSRGRAKRSGSGATNFSLLKQAGDVEENPGPSRGHMTEYKPTVRLATRDDVPRAVRTLAAAFADYPATRHTVDPDRHIERVTELQELFLTRVGLDIGKVWVADDGAAVAVWTTPESVEAGAVFAEIGPRMAELSGSRLAAQQQMEGLLAPHRPKEPAWFLATVGVSPDHQGKGLGSAVVLPGVEAAERAGVPAFLETSAPRNLPFYERLGFTVTADVEVPEGPRTWCMTRKPGA

SEQ ID NO: 16125 - protein, 1389 aa, Artificial Sequence
  Synthetic Polypeptide
MALPVTALLLPLALLLHAARPEVQLLESGGGLVQPGGSLRLSCAASGFTFSSYAMSWVRQAPGKGLEWVSSISGSGDYIYYADSVKGRFTISRDISKNTLYLQMNSLRAEDTAVYYCAKEGTGANSSLADYRGQGTLVTVSSGGGSGGGSEVQLLESGGGLVQPGGSLRLSCAASGFIFSSYAMSWVRQAPGKGQEWVSGVSGTGVNTYYADSVKGRFTISRDNSKNTLYLQMNSLRAEDTAVYYCASGKGWDSGSWYEDYRGQGTLVTVSSGTGGGGSGGGGSGGGGSEFDIQMTQSPSSLSASVGDRVTITCKASDHINNWLAWYQQKPGQAPKLLIYGATTLETGVPSRFSGSGSGTDYTLTISSLQPEDFATYYCQQSWNTPWTFGQGTKLEIKRLEDLKNVFPPEVAVFEPSKAEIAHTQKATLVCLATGFYPDHVELSWWVNGKEVHSGVCTDPQPLKEQPALNDSRYCLSSRLRVSATFWQNPRNHFRCQVQFYGLSENDEWTQDRAKPVTQIVSAEAWGRADCGITSASYHQGVLSATILYEILLGKATLYAVLVSALVLMAMVKRKDSRGRAKRSGSGATNFSLLKQAGDVEENPGPTSMDWIWRILFLVGAATGAHSQLQLQESGPGLVKPSETLSLTCTVSGGSISSGDYYWGWIRQPPGKGLEWIGHIYYSGATYYNPSLKSRVTISVDTSRNQFSLKLSSVTAADTAVYYCTRDDSSNWRSRGQGTLVTVSSSGGGGSGGGGSQVQLQESGGGLAQAGGSLRLSCAASGRTFSMGWFRQAPGKEREFVAAITYSGGSPYYASSVRGRFTISRDNAKNTVYLQMNSLKPEDTAVYYCAANPTYGSDWNAENWGQGTQVTVSSGSGGGGSGGGGSGGGGSFEQVQLQQPGAELVKPGASVKMSCKASGYAFSSYWINWMKQKPGQGLEWIGQIYPGDGDTNYNGKFKGRATLTADTSSSTAYMQLSSLTSEDSAVYFCARSITTVVGCAMDYWGQGTSVTVSSTRIQNPDPAVYQLRDSKSSDKSVCLFTDFDSQTNVSQSKDSDVYITDKCVLDMRSMDFKSNSAVAWSNKSDFACANAFNNSIIPEDTFFPSSDVPCDVKLVEKSFETDTNLNFQNLSVIGFRILLLKVAGFNLLMTLRLWSSRAKRSGSGVKQTLNFDLLKLAGDVESNPGPSRGHMTEYKPTVRLATRDDVPRAVRTLAAAFADYPATRHTVDPDRHIERVTELQELFLTRVGLDIGKVWVADDGAAVAVWTTPESVEAGAVFAEIGPRMAELSGSRLAAQQQMEGLLAPHRPKEPAWFLATVGVSPDHQGKGLGSAVVLPGVEAAERAGVPAFLETSAPRNLPFYERLGFTVTADVEVPEGPRTWCMTRKPGA

SEQ ID NO: 16126 - protein, 1389 aa, Artificial Sequence
  Synthetic Polypeptide
MALPVTALLLPLALLLHAARPEVQLLESGGGLVQPGGSLRLSCAASGFTFSSYAMSWVRQAPGKGLEWVSSISGSGDYIYYADSVKGRFTISRDISKNTLYLQMNSLRAEDTAVYYCAKEGTGANSSLADYRGQGTLVTVSSGGGSGGGSEVQLLESGGGLVQPGGSLRLSCAASGFIFSSYAMSWVRQAPGKGQEWVSGVSGTGVNTYYADSVKGRFTISRDNSKNTLYLQMNSLRAEDTAVYYCASGKGWDSGSWYEDYRGQGTLVTVSSGTGGGGSGGGGSGGGGSEFDIQMTQSPSSLSASVGDRVTITCKASDHINNWLAWYQQKPGQAPKLLIYGATTLETGVPSRFSGSGSGTDYTLTISSLQPEDFATYYCQQSWNTPWTFGQGTKLEIKRLEDLKNVFPPEVAVFEPSEAEISHTQKATLVCLATGFYPDHVELSWWVNGKEVHSGVCTDPQPLKEQPALNDSRYCLSSRLRVSATFWQNPRNHFRCQVQFYGLSENDEWTQDRAKPVTQIVSAEAWGRADCGFTSESYQQGVLSATILYEILLGKATLYAVLVSALVLMAMVKRKDSRGRAKRSGSGATNFSLLKQAGDVEENPGPTSMDWIWRILFLVGAATGAHSQLQLQESGPGLVKPSETLSLTCTVSGGSISSGDYYWGWIRQPPGKGLEWIGHIYYSGATYYNPSLKSRVTISVDTSRNQFSLKLSSVTAADTAVYYCTRDDSSNWRSRGQGTLVTVSSSGGGGSGGGGSQVQLQESGGGLAQAGGSLRLSCAASGRTFSMGWFRQAPGKEREFVAAITYSGGSPYYASSVRGRFTISRDNAKNTVYLQMNSLKPEDTAVYYCAANPTYGSDWNAENWGQGTQVTVSSGSGGGGSGGGGSGGGGSFEQVQLQQPGAELVKPGASVKMSCKASGYAFSSYWINWMKQKPGQGLEWIGQIYPGDGDTNYNGKFKGRATLTADTSSSTAYMQLSSLTSEDSAVYFCARSITTVVGCAMDYWGQGTSVTVSSTRIQNPDPAVYQLRDSKSSDKSVCLFTDFDSQTNVSQSKDSDVYITDKCVLDMRSMDFKSNSAVAWSNKSDFACANAFNNSIIPEDTFFPSPESSCDVKLVEKSFETDTNLNFQNLSVIGFRILLLKVAGFNLLMTLRLWSSRAKRSGSGVKQTLNFDLLKLAGDVESNPGPSRGHMTEYKPTVRLATRDDVPRAVRTLAAAFADYPATRHTVDPDRHIERVTELQELFLTRVGLDIGKVWVADDGAAVAVWTTPESVEAGAVFAEIGPRMAELSGSRLAAQQQMEGLLAPHRPKEPAWFLATVGVSPDHQGKGLGSAVVLPGVEAAERAGVPAFLETSAPRNLPFYERLGFTVTADVEVPEGPRTWCMTRKPGA

SEQ ID NO: 16127 - protein, 1156 aa, Artificial Sequence
  Synthetic Polypeptide
MALPVTALLLPLALLLHAARPEVQLLESGGGLVQPGGSLRLSCAASGFTFSSYAMSWVRQAPGKGLEWVSSISGSGDYIYYADSVKGRFTISRDISKNTLYLQMNSLRAEDTAVYYCAKEGTGANSSLADYRGQGTLVTVSSGGGSGGGSEVQLLESGGGLVQPGGSLRLSCAASGFIFSSYAMSWVRQAPGKGQEWVSGVSGTGVNTYYADSVKGRFTISRDNSKNTLYLQMNSLRAEDTAVYYCASGKGWDSGSWYEDYRGQGTLVTVSSGTGGGGSGGGGSGGGGSEFDIQMTQSPSSLSASVGDRVTITCKASDHINNWLAWYQQKPGQAPKLLIYGATTLETGVPSRFSGSGSGTDYTLTISSLQPEDFATYYCQQSWNTPWTFGQGTKLEIKRLEDLKNVFPPEVAVFEPSEAEISHTQKATLVCLATGFYPDHVELSWWVNGKEVHSGVCTDPQPLKEQPALNDSRYCLSSRLRVSATFWQNPRNHFRCQVQFYGLSENDEWTQDRAKPVTQIVSAEAWGRADCGFTSESYQQGVLSATILYEILLGKATLYAVLVSALVLMAMVKRKDSRGRAKRSGSGATNFSLLKQAGDVEENPGPTSMDWIWRILFLVGAATGAHSQLQLQESGPGLVKPSETLSLTCTVSGGSISSGDYYWGWIRQPPGKGLEWIGHIYYSGATYYNPSLKSRVTISVDTSRNQFSLKLSSVTAADTAVYYCTRDDSSNWRSRGQGTLVTVSSSGGGGSGGGGSQVQLQESGGGLAQAGGSLRLSCAASGRTFSMGWFRQAPGKEREFVAAITYSGGSPYYASSVRGRFTISRDNAKNTVYLQMNSLKPEDTAVYYCAANPTYGSDWNAENWGQGTQVTVSSGSGGGGSGGGGSGGGGSFEQVQLQQPGAELVKPGASVKMSCKASGYAFSSYWINWMKQKPGQGLEWIGQIYPGDGDTNYNGKFKGRATLTADTSSSTAYMQLSSLTSEDSAVYFCARSITTVVGCAMDYWGQGTSVTVSSTRIQNPDPAVYQLRDSKSSDKSVCLFTDFDSQTNVSQSKDSDVYITDKCVLDMRSMDFKSNSAVAWSNKSDFACANAFNNSIIPEDTFFPSPESSCDVKLVEKSFETDTNLNFQNLSVIGFRILLLKVAGFNLLMTLRLWSS

SEQ ID NO: 16128 - protein, 1381 aa, Artificial Sequence
  Synthetic Polypeptide
MALPVTALLLPLALLLHAARPEVQLLESGGGLVQPGGSLRLSCAASGFTFSSYAMSWVRQAPGKGLEWVSSISGSGDYIYYADSVKGRFTISRDISKNTLYLQMNSLRAEDTAVYYCAKEGTGANSSLADYRGQGTLVTVSSGGGSGGGSEVQLLESGGGLVQPGGSLRLSCAASGFIFSSYAMSWVRQAPGKGQEWVSGVSGTGVNTYYADSVKGRFTISRDNSKNTLYLQMNSLRAEDTAVYYCASGKGWDSGSWYEDYRGQGTLVTVSSGTGGGGSGGGGSGGGGSEFDIQMTQSPSSLSASVGDRVTITCKASDHINNWLAWYQQKPGQAPKLLIYGATTLETGVPSRFSGSGSGTDYTLTISSLQPEDFATYYCQQSWNTPWTFGQGTKLEIKRLEDLKNVFPPEVAVFEPSEAEISHTQKATLVCLATGFYPDHVELSWWVNGKEVHSGVCTDPQPLKEQPALNDSRYCLSSRLRVSATFWQNPRNHFRCQVQFYGLSENDEWTQDRAKPVTQIVSAEAWGRADCGFTSESYQQGVLSATILYEILLGKATLYAVLVSALVLMAMVKRKDSRGRAKRSGSGATNFSLLKQAGDVEENPGPTSMDWIWRILFLVGAATGAHSQLQLQESGPGLVKPSETLSLTCTVSGGSISSGDYYWGWIRQPPGKGLEWIGHIYYSGATYYNPSLKSRVTISVDTSRNQFSLKLSSVTAADTAVYYCTRDDSSNWRSRGQGTLVTVSSSGGGGSGGGGSQVQLQESGGGLAQAGGSLRLSCAASGRTFSMGWFRQAPGKEREFVAAITYSGGSPYYASSVRGRFTISRDNAKNTVYLQMNSLKPEDTAVYYCAANPTYGSDWNAENWGQGTQVTVSSGSGGGGSGGGGSGGGGSFEQVQLQQPGAELVKPGASVKMSCKASGYAFSSYWINWMKQKPGQGLEWIGQIYPGDGDTNYNGKFKGRATLTADTSSSTAYMQLSSLTSEDSAVYFCARSITTVVGCAMDYWGQGTSVTVSSTRIQNPDPAVYQLRDSKSSDKSVCLFTDFDSQTNVSQSKDSDVYITDKCVLDMRSMDFKSNSAVAWSNKSDFACANAFNNSIIPEDTFFPSPESSCDVKLVEKSFETDTNLNFQNLSVIGFRILLLKVAGFNLLMTLRLWSSRAKRSGSGVKQTLNFDLLKLAGDVESNPGPSRGGIHTMATYEVLCEVARKLGTDDREVVLFLLNVFIPQPTLAQLIGALRALKEEGRLTFPLLAECLFRAGRRDLLRDLLHLDPRFLERHLAGTMSYFSPYQLTVLHVDGELCARDIRSLIFLSKDTIGSRSTPQTFLHWVYCMENLDLLGPTDVDALMSMLRSLSRVDLQRQVQTLMGLHLSGPSHSQHYRHTP

SEQ ID NO: 16129 - protein, 1160 aa, Artificial Sequence
  Synthetic Polypeptide
MALPVTALLLPLALLLHAARPEVQLLESGGGLVQPGGSLRLSCAASGFTFSSYAMSWVRQAPGKGLEWVSSISGSGDYIYYADSVKGRFTISRDISKNTLYLQMNSLRAEDTAVYYCAKEGTGANSSLADYRGQGTLVTVSSGGGSGGGSEVQLLESGGGLVQPGGSLRLSCAASGFIFSSYAMSWVRQAPGKGQEWVSGVSGTGVNTYYADSVKGRFTISRDNSKNTLYLQMNSLRAEDTAVYYCASGKGWDSGSWYEDYRGQGTLVTVSSGTGGGGSGGGGSGGGGSEFDIQMTQSPSSLSASVGDRVTITCKASDHINNWLAWYQQKPGQAPKLLIYGATTLETGVPSRFSGSGSGTDYTLTISSLQPEDFATYYCQQSWNTPWTFGQGTKLEIKRLEIQNPDPAVYQLRDSKSSDKSVCLFTDFDSQTNVSQSKDSDVYITDKCVLDMRSMDFKSNSAVAWSNKSDFACANAFNNSIIPEDTFFPSPESSCDVKLVEKSFETDTNLNFQNLSVIGFRILLLKVAGFNLLMTLRLWSSRAKRSGSGVKQTLNFDLLKLAGDVESNPGPTSMDWIWRILFLVGAATGAHSQLQLQESGPGLVKPSETLSLTCTVSGGSISSGDYYWGWIRQPPGKGLEWIGHIYYSGATYYNPSLKSRVTISVDTSRNQFSLKLSSVTAADTAVYYCTRDDSSNWRSRGQGTLVTVSSSGGGGSGGGGSQVQLQESGGGLAQAGGSLRLSCAASGRTFSMGWFRQAPGKEREFVAAITYSGGSPYYASSVRGRFTISRDNAKNTVYLQMNSLKPEDTAVYYCAANPTYGSDWNAENWGQGTQVTVSSGSGGGGSGGGGSGGGGSFEQVQLQQPGAELVKPGASVKMSCKASGYAFSSYWINWMKQKPGQGLEWIGQIYPGDGDTNYNGKFKGRATLTADTSSSTAYMQLSSLTSEDSAVYFCARSITTVVGCAMDYWGQGTSVTVSSTREDLKNVFPPEVAVFEPSEAEISHTQKATLVCLATGFYPDHVELSWWVNGKEVHSGVCTDPQPLKEQPALNDSRYCLSSRLRVSATFWQNPRNHFRCQVQFYGLSENDEWTQDRAKPVTQIVSAEAWGRADCGFTSESYQQGVLSATILYEILLGKATLYAVLVSALVLMAMVKRKDSRG

SEQ ID NO: 16130 - protein, 1382 aa, Artificial Sequence
  Synthetic Polypeptide
MALPVTALLLPLALLLHAARPEVQLLESGGGLVQPGGSLRLSCAASGFTFSSYAMSWVRQAPGKGLEWVSSISGSGDYIYYADSVKGRFTISRDISKNTLYLQMNSLRAEDTAVYYCAKEGTGANSSLADYRGQGTLVTVSSGGGSGGGSEVQLLESGGGLVQPGGSLRLSCAASGFIFSSYAMSWVRQAPGKGQEWVSGVSGTGVNTYYADSVKGRFTISRDNSKNTLYLQMNSLRAEDTAVYYCASGKGWDSGSWYEDYRGQGTLVTVSSGTGGGGSGGGGSGGGGSEFDIQMTQSPSSLSASVGDRVTITCKASDHINNWLAWYQQKPGQAPKLLIYGATTLETGVPSRFSGSGSGTDYTLTISSLQPEDFATYYCQQSWNTPWTFGQGTKLEIKRLEIQNPDPAVYQLRDSKSSDKSVCLFTDFDSQTNVSQSKDSDVYITDKCVLDMRSMDFKSNSAVAWSNKSDFACANAFNNSIIPEDTFFPSPESSCDVKLVEKSFETDTNLNFQNLSVIGFRILLLKVAGFNLLMTLRLWSSRAKRSGSGVKQTLNFDLLKLAGDVESNPGPTSMDWIWRILFLVGAATGAHSQLQLQESGPGLVKPSETLSLTCTVSGGSISSGDYYWGWIRQPPGKGLEWIGHIYYSGATYYNPSLKSRVTISVDTSRNQFSLKLSSVTAADTAVYYCTRDDSSNWRSRGQGTLVTVSSSGGGGSGGGGSQVQLQESGGGLAQAGGSLRLSCAASGRTFSMGWFRQAPGKEREFVAAITYSGGSPYYASSVRGRFTISRDNAKNTVYLQMNSLKPEDTAVYYCAANPTYGSDWNAENWGQGTQVTVSSGSGGGGSGGGGSGGGGSFEQVQLQQPGAELVKPGASVKMSCKASGYAFSSYWINWMKQKPGQGLEWIGQIYPGDGDTNYNGKFKGRATLTADTSSSTAYMQLSSLTSEDSAVYFCARSITTVVGCAMDYWGQGTSVTVSSTREDLKNVFPPEVAVFEPSEAEISHTQKATLVCLATGFYPDHVELSWWVNGKEVHSGVCTDPQPLKEQPALNDSRYCLSSRLRVSATFWQNPRNHFRCQVQFYGLSENDEWTQDRAKPVTQIVSAEAWGRADCGFTSESYQQGVLSATILYEILLGKATLYAVLVSALVLMAMVKRKDSRGRAKRSGSGATNFSLLKQAGDVEENPGPSRGGIHTMATYEVLCEVARKLGTDDREVVLFLLNVFIPQPTLAQLIGALRALKEEGRLTFPLLAECLFRAGRRDLLRDLLHLDPRFLERHLAGTMSYFSPYQLTVLHVDGELCARDIRSLIFLSKDTIGSRSTPQTFLHWVYCMENLDLLGPTDVDALMSMLRSLSRVDLQRQVQTLMGLHLSGPSHSQHYRHTP

SEQ ID NO: 16131 - protein, 1389 aa, Artificial Sequence
  Synthetic Polypeptide
MALPVTALLLPLALLLHAARPEVQLLESGGGLVQPGGSLRLSCAASGFTFSSYAMSWVRQAPGKGLEWVSSISGSGDYIYYADSVKGRFTISRDISKNTLYLQMNSLRAEDTAVYYCAKEGTGANSSLADYRGQGTLVTVSSGGGSGGGSEVQLLESGGGLVQPGGSLRLSCAASGFIFSSYAMSWVRQAPGKGQEWVSGVSGTGVNTYYADSVKGRFTISRDNSKNTLYLQMNSLRAEDTAVYYCASGKGWDSGSWYEDYRGQGTLVTVSSGTGGGGSGGGGSGGGGSEFDIQMTQSPSSLSASVGDRVTITCKASDHINNWLAWYQQKPGQAPKLLIYGATTLETGVPSRFSGSGSGTDYTLTISSLQPEDFATYYCQQSWNTPWTFGQGTKLEIKRLEDLKNVFPPEVAVFEPSEAEISHTQKATLVCLATGFYPDHVELSWWVNGKEVHSGVSTDPQPLKEQPALNDSRYCLSSRLRVSATFWQNPRNHFRCQVQFYGLSENDEWTQDRAKPVTQIVSAEAWGRADCGFTSESYQQGVLSATILYEILLGKATLYAVLVSALVLMAMVKRKDSRGRAKRSGSGATNFSLLKQAGDVEENPGPTSMDWIWRILFLVGAATGAHSQLQLQESGPGLVKPSETLSLTCTVSGGSISSGDYYWGWIRQPPGKGLEWIGHIYYSGATYYNPSLKSRVTISVDTSRNQFSLKLSSVTAADTAVYYCTRDDSSNWRSRGQGTLVTVSSSGGGGSGGGGSQVQLQESGGGLAQAGGSLRLSCAASGRTFSMGWFRQAPGKEREFVAAITYSGGSPYYASSVRGRFTISRDNAKNTVYLQMNSLKPEDTAVYYCAANPTYGSDWNAENWGQGTQVTVSSGSGGGGSGGGGSGGGGSFEQVQLQQPGAELVKPGASVKMSCKASGYAFSSYWINWMKQKPGQGLEWIGQIYPGDGDTNYNGKFKGRATLTADTSSSTAYMQLSSLTSEDSAVYFCARSITTVVGCAMDYWGQGTSVTVSSTRIQNPDPAVYQLRDSKSSDKSVCLFTDFDSQTNVSQSKDSDVYITDKTVLDMRSMDFKSNSAVAWSNKSDFACANAFNNSIIPEDTFFPSPESSCDVKLVEKSFETDTNLNFQNLSVIGFRILLLKVAGFNLLMTLRLWSSRAKRSGSGVKQTLNFDLLKLAGDVESNPGPSRGHMTEYKPTVRLATRDDVPRAVRTLAAAFADYPATRHTVDPDRHIERVTELQELFLTRVGLDIGKVWVADDGAAVAVWTTPESVEAGAVFAEIGPRMAELSGSRLAAQQQMEGLLAPHRPKEPAWFLATVGVSPDHQGKGLGSAVVLPGVEAAERAGVPAFLETSAPRNLPFYERLGFTVTADVEVPEGPRTWCMTRKPGA

SEQ ID NO: 16132 - protein, 1471 aa, Artificial Sequence
  Synthetic Polypeptide
MALPVTALLLPLALLLHAARPEVQLLESGGGLVQPGGSLRLSCAASGFTFSSYAMSWVRQAPGKGLEWVSSISGSGDYIYYADSVKGRFTISRDISKNTLYLQMNSLRAEDTAVYYCAKEGTGANSSLADYRGQGTLVTVSSGGGSGGGSEVQLLESGGGLVQPGGSLRLSCAASGFIFSSYAMSWVRQAPGKGQEWVSGVSGTGVNTYYADSVKGRFTISRDNSKNTLYLQMNSLRAEDTAVYYCASGKGWDSGSWYEDYRGQGTLVTVSSGTGGGGSGGGGSGGGGSEFDIQMTQSPSSLSASVGDRVTITCKASDHINNWLAWYQQKPGQAPKLLIYGATTLETGVPSRFSGSGSGTDYTLTISSLQPEDFATYYCQQSWNTPWTFGQGTKLEIKRLEDLKNVFPPEVAVFEPSEAEISHTQKATLVCLATGFYPDHVELSWWVNGKEVHSGVSTDPQPLKEQPALNDSRYCLSSRLRVSATFWQNPRNHFRCQVQFYGLSENDEWTQDRAKPVTQIVSAEAWGRADCGFTSESYQQGVLSATILYEILLGKATLYAVLVSALVLMAMVKRKDSRGRAKRSGSGATNFSLLKQAGDVEENPGPTSMDWIWRILFLVGAATGAHSQLQLQESGPGLVKPSETLSLTCTVSGGSISSGDYYWGWIRQPPGKGLEWIGHIYYSGATYYNPSLKSRVTISVDTSRNQFSLKLSSVTAADTAVYYCTRDDSSNWRSRGQGTLVTVSSSGGGGSGGGGSQVQLQESGGGLAQAGGSLRLSCAASGRTFSMGWFRQAPGKEREFVAAITYSGGSPYYASSVRGRFTISRDNAKNTVYLQMNSLKPEDTAVYYCAANPTYGSDWNAENWGQGTQVTVSSGSGGGGSGGGGSGGGGSFEQVQLQQPGAELVKPGASVKMSCKASGYAFSSYWINWMKQKPGQGLEWIGQIYPGDGDTNYNGKFKGRATLTADTSSSTAYMQLSSLTSEDSAVYFCARSITTVVGCAMDYWGQGTSVTVSSTREQKLISEEDGSGTPFPSLAPPIMLLVDGKQQMVVVCLVLDVAPPGLDSPIWFSAGNGSALDAFTYGPSPATDGTWTNLAHLSLPSEELASWEPLVCHTGPGAEGHSRSTQPMHLSGEASTARTCPQEPLRGTPGGALWLGVLRLLLFKLLLFDLLLTCSCLCDPAGPLPSPATTTRLRALGSHRLHPATETGGREATSSPRPQPRDRRWGDTPPGRKPGSPVRAKRSGSGVKQTLNFDLLKLAGDVESNPGPSRGHMTEYKPTVRLATRDDVPRAVRTLAAAFADYPATRHTVDPDRHIERVTELQELFLTRVGLDIGKVWVADDGAAVAVWTTPESVEAGAVFAEIGPRMAELSGSRLAAQQQMEGLLAPHRPKEPAWFLATVGVSPDHQGKGLGSAVVLPGVEAAERAGVPAFLETSAPRNLPFYERLGFTVTADVEVPEGPRTWCMTRKPGA

SEQ ID NO: 16133 - protein, 1426 aa, Artificial Sequence
  Synthetic Polypeptide
MALPVTALLLPLALLLHAARPEVQLLESGGGLVQPGGSLRLSCAASGFTFSSYAMSWVRQAPGKGLEWVSSISGSGDYIYYADSVKGRFTISRDISKNTLYLQMNSLRAEDTAVYYCAKEGTGANSSLADYRGQGTLVTVSSGGGSGGGSEVQLLESGGGLVQPGGSLRLSCAASGFIFSSYAMSWVRQAPGKGQEWVSGVSGTGVNTYYADSVKGRFTISRDNSKNTLYLQMNSLRAEDTAVYYCASGKGWDSGSWYEDYRGQGTLVTVSSGTGGGGSGGGGSGGGGSEFDIQMTQSPSSLSASVGDRVTITCKASDHINNWLAWYQQKPGQAPKLLIYGATTLETGVPSRFSGSGSGTDYTLTISSLQPEDFATYYCQQSWNTPWTFGQGTKLEIKRLEGKPIPNPLLGLDSTGSGDKQLDADVSPKPTIFLPSIAETKLQKAGTYLCLLEKFFPDVIKIHWQEKKSNTILGSQEGNTMKTNDTYMKFSWLTVPEKSLDKEHRCIVRHENNKNGVDQEIIFPPIKTDVITMDPKDNCSKDANDTLLLQLTNTSAYYMYLLLLLKSVVYFAIITCCLLRRTAFCCNGEKSRAKRSGSGATNFSLLKQAGDVEENPGPTSMDWIWRILFLVGAATGAHSQLQLQESGPGLVKPSETLSLTCTVSGGSISSGDYYWGWIRQPPGKGLEWIGHIYYSGATYYNPSLKSRVTISVDTSRNQFSLKLSSVTAADTAVYYCTRDDSSNWRSRGQGTLVTVSSSGGGGSGGGGSQVQLQESGGGLAQAGGSLRLSCAASGRTFSMGWFRQAPGKEREFVAAITYSGGSPYYASSVRGRFTISRDNAKNTVYLQMNSLKPEDTAVYYCAANPTYGSDWNAENWGQGTQVTVSSGSGGGGSGGGGSGGGGSFEQVQLQQPGAELVKPGASVKMSCKASGYAFSSYWINWMKQKPGQGLEWIGQIYPGDGDTNYNGKFKGRATLTADTSSSTAYMQLSSLTSEDSAVYFCARSITTVVGCAMDYWGQGTSVTVSSTREQKLISEEDGSGSQPHTKPSVFVMKNGTNVACLVKEFYPKDIRINLVSSKKITEFDPAIVISPSGKYNAVKLGKYEDSNSVTCSVQHDNKTVHSTDFEVKTDSTDHVKPKETENTKQPSKSCHKPKAIVHTEKVNMMSLTVLGLRMLFAKTVAVNFLLTAKLFFLRAKRSGSGVKQTLNFDLLKLAGDVESNPGPSRGHMTEYKPTVRLATRDDVPRAVRTLAAAFADYPATRHTVDPDRHIERVTELQELFLTRVGLDIGKVWVADDGAAVAVWTTPESVEAGAVFAEIGPRMAELSGSRLAAQQQMEGLLAPHRPKEPAWFLATVGVSPDHQGKGLGSAVVLPGVEAAERAGVPAFLETSAPRNLPFYERLGFTVTADVEVPEGPRTWCMTRKPGA

SEQ ID NO: 16134 - protein, 1164 aa, Artificial Sequence
  Synthetic Polypeptide
MALPVTALLLPLALLLHAARPEVQLLESGGGLVQPGGSLRLSCAASGFTFSSYAMSWVRQAPGKGLEWVSSISGSGDYIYYADSVKGRFTISRDISKNTLYLQMNSLRAEDTAVYYCAKEGTGANSSLADYRGQGTLVTVSSGGGSGGGSEVQLLESGGGLVQPGGSLRLSCAASGFIFSSYAMSWVRQAPGKGQEWVSGVSGTGVNTYYADSVKGRFTISRDNSKNTLYLQMNSLRAEDTAVYYCASGKGWDSGSWYEDYRGQGTLVTVSSGTGGGGSGGGGSGGGGSEFDIQMTQSPSSLSASVGDRVTITCKASDHINNWLAWYQQKPGQAPKLLIYGATTLETGVPSRFSGSGSGTDYTLTISSLQPEDFATYYCQQSWNTPWTFGQGTKLEIKRLESQPHTKPSVFVMKNGTNVACLVKEFYPKDIRINLVSSKKITEFDPAIVISPSGKYNAVKLGKYEDSNSVTCSVQHDNKTVHSTDFEVKTDSTDHVKPKETENTKQPSKSCHKPKAIVHTEKVNMMSLTVLGLRMLFAKTVAVNFLLTAKLFFLRAKRSGSGATNFSLLKQAGDVEENPGPTSMDWIWRILFLVGAATGAHSQLQLQESGPGLVKPSETLSLTCTVSGGSISSGDYYWGWIRQPPGKGLEWIGHIYYSGATYYNPSLKSRVTISVDTSRNQFSLKLSSVTAADTAVYYCTRDDSSNWRSRGQGTLVTVSSSGGGGSGGGGSQVQLQESGGGLAQAGGSLRLSCAASGRTFSMGWFRQAPGKEREFVAAITYSGGSPYYASSVRGRFTISRDNAKNTVYLQMNSLKPEDTAVYYCAANPTYGSDWNAENWGQGTQVTVSSGSGGGGSGGGGSGGGGSFEQVQLQQPGAELVKPGASVKMSCKASGYAFSSYWINWMKQKPGQGLEWIGQIYPGDGDTNYNGKFKGRATLTADTSSSTAYMQLSSLTSEDSAVYFCARSITTVVGCAMDYWGQGTSVTVSSTRDKQLDADVSPKPTIFLPSIAETKLQKAGTYLCLLEKFFPDVIKIHWQEKKSNTILGSQEGNTMKTNDTYMKFSWLTVPEKSLDKEHRCIVRHENNKNGVDQEIIFPPIKTDVITMDPKDNCSKDANDTLLLQLTNTSAYYMYLLLLLKSVVYFAIITCCLLRRTAFCCNGEKS

SEQ ID NO: 16135 - protein, 1566 aa, Artificial Sequence
  Synthetic Polypeptide
MALPVTALLLPLALLLHAARPEVQLLESGGGLVQPGGSLRLSCAASGFTFSSYAMSWVRQAPGKGLEWVSSISGSGDYIYYADSVKGRFTISRDISKNTLYLQMNSLRAEDTAVYYCAKEGTGANSSLADYRGQGTLVTVSSGGGSGGGSEVQLLESGGGLVQPGGSLRLSCAASGFIFSSYAMSWVRQAPGKGQEWVSGVSGTGVNTYYADSVKGRFTISRDNSKNTLYLQMNSLRAEDTAVYYCASGKGWDSGSWYEDYRGQGTLVTVSSGTGGGGSGGGGSGGGGSEFDIQMTQSPSSLSASVGDRVTITCKASDHINNWLAWYQQKPGQAPKLLIYGATTLETGVPSRFSGSGSGTDYTLTISSLQPEDFATYYCQQSWNTPWTFGQGTKLEIKRGQPKANPTVTLFPPSSEELQANKATLVCLISDFYPGAVTVAWKADGSPVKAGVETTKPSKQSNNKYAASSYLSLTPEQWKSHRSYSCQVTHEGSTVEKTVAPTECSGSQSFGLLDPKLCYLLDGILFIYGVILTALFLRVKFSRSADAPAYQQGQNQLYNELNLGRREEYDVLDKRRGRDPEMGGKPQRRKNPQEGLYNELQKDKMAEAYSEIGMKGERRRGKGHDGLYQGLSTATKDTYDALHMQALPPRRAKRSGSGATNFSLLKQAGDVEENPGPTSMDWIWRILFLVGAATGAHSQLQLQESGPGLVKPSETLSLTCTVSGGSISSGDYYWGWIRQPPGKGLEWIGHIYYSGATYYNPSLKSRVTISVDTSRNQFSLKLSSVTAADTAVYYCTRDDSSNWRSRGQGTLVTVSSSGGGGSGGGGSQVQLQESGGGLAQAGGSLRLSCAASGRTFSMGWFRQAPGKEREFVAAITYSGGSPYYASSVRGRFTISRDNAKNTVYLQMNSLKPEDTAVYYCAANPTYGSDWNAENWGQGTQVTVSSGSGGGGSGGGGSGGGGSFEQVQLQQPGAELVKPGASVKMSCKASGYAFSSYWINWMKQKPGQGLEWIGQIYPGDGDTNYNGKFKGRATLTADTSSSTAYMQLSSLTSEDSAVYFCARSITTVVGCAMDYWGQGTSVTVSSASTKGPSVFPLAPSSKSTSGGTAALGCLVKDYFPEPVTVSWNSGALTSGVHTFPAVLQSSGLYSLSSVVTVPSSSLGTQTYICNVNHKPSNTKVDKRVEPKSCGTQSFGLLDPKLCYLLDGILFIYGVILTALFLRVKFSRSADAPAYQQGQNQLYNELNLGRREEYDVLDKRRGRDPEMGGKPQRRKNPQEGLYNELQKDKMAEAYSEIGMKGERRRGKGHDGLYQGLSTATKDTYDALHMQALPPRRAKRSGSGVKQTLNFDLLKLAGDVESNPGPSRGHMTEYKPTVRLATRDDVPRAVRTLAAAFADYPATRHTVDPDRHIERVTELQELFLTRVGLDIGKVWVADDGAAVAVWTTPESVEAGAVFAEIGPRMAELSGSRLAAQQQMEGLLAPHRPKEPAWFLATVGVSPDHQGKGLGSAVVLPGVEAAERAGVPAFLETSAPRNLPFYERLGFTVTADVEVPEGPRTWCMTRKPGA

SEQ ID NO: 16136 - protein, 1352 aa, Artificial Sequence
  Synthetic Polypeptide
MALPVTALLLPLALLLHAARPEVQLLESGGGLVQPGGSLRLSCAASGFTFSSYAMSWVRQAPGKGLEWVSSISGSGDYIYYADSVKGRFTISRDISKNTLYLQMNSLRAEDTAVYYCAKEGTGANSSLADYRGQGTLVTVSSGGGSGGGSEVQLLESGGGLVQPGGSLRLSCAASGFIFSSYAMSWVRQAPGKGQEWVSGVSGTGVNTYYADSVKGRFTISRDNSKNTLYLQMNSLRAEDTAVYYCASGKGWDSGSWYEDYRGQGTLVTVSSGTGGGGSGGGGSGGGGSEFDIQMTQSPSSLSASVGDRVTITCKASDHINNWLAWYQQKPGQAPKLLIYGATTLETGVPSRFSGSGSGTDYTLTISSLQPEDFATYYCQQSWNTPWTFGQGTKLEIKRLEDLKNVFPPEVAVFEPSEAEISHTQKATLVCLATGFYPDHVELSWWVNGKEVHSGVSTDPQPLKEQPALNDSRYCLSSRLRVSATFWQNPRNHFRCQVQFYGLSENDEWTQDRAKPVTQIVSAEAWGRADCGSQSFGLLDPKLCYLLDGILFIYGVILTALFLRVKFSRSADAPAYQQGQNQLYNELNLGRREEYDVLDKRRGRDPEMGGKPQRRKNPQEGLYNELQKDKMAEAYSEIGMKGERRRGKGHDGLYQGLSTATKDTYDALHMQALPPRRAKRSGSGATNFSLLKQAGDVEENPGPTSMDWIWRILFLVGAATGAHSQLQLQESGPGLVKPSETLSLTCTVSGGSISSGDYYWGWIRQPPGKGLEWIGHIYYSGATYYNPSLKSRVTISVDTSRNQFSLKLSSVTAADTAVYYCTRDDSSNWRSRGQGTLVTVSSSGGGGSGGGGSQVQLQESGGGLAQAGGSLRLSCAASGRTFSMGWFRQAPGKEREFVAAITYSGGSPYYASSVRGRFTISRDNAKNTVYLQMNSLKPEDTAVYYCAANPTYGSDWNAENWGQGTQVTVSSGSGGGGSGGGGSGGGGSFEQVQLQQPGAELVKPGASVKMSCKASGYAFSSYWINWMKQKPGQGLEWIGQIYPGDGDTNYNGKFKGRATLTADTSSSTAYMQLSSLTSEDSAVYFCARSITTVVGCAMDYWGQGTSVTVSSTRIQNPDPAVYQLRDSKSSDKSVCLFTDFDSQTNVSQSKDSDVYITDKTVLDMRSMDFKSNSAVAWSNKSDFACANAFNNSIIPEDTFFPSPESSCGTQSFGLLDPKLCYLLDGILFIYGVILTALFLRVKFSRSADAPAYQQGQNQLYNELNLGRREEYDVLDKRRGRDPEMGGKPQRRKNPQEGLYNELQKDKMAEAYSEIGMKGERRRGKGHDGLYQGLSTATKDTYDALHMQALPPR

SEQ ID NO: 16137 - protein, 1352 aa, Artificial Sequence
  Synthetic Polypeptide
MALPVTALLLPLALLLHAARPEVQLLESGGGLVQPGGSLRLSCAASGFTFSSYAMSWVRQAPGKGLEWVSSISGSGDYIYYADSVKGRFTISRDISKNTLYLQMNSLRAEDTAVYYCAKEGTGANSSLADYRGQGTLVTVSSGGGSGGGSEVQLLESGGGLVQPGGSLRLSCAASGFIFSSYAMSWVRQAPGKGQEWVSGVSGTGVNTYYADSVKGRFTISRDNSKNTLYLQMNSLRAEDTAVYYCASGKGWDSGSWYEDYRGQGTLVTVSSGTGGGGSGGGGSGGGGSEFDIQMTQSPSSLSASVGDRVTITCKASDHINNWLAWYQQKPGQAPKLLIYGATTLETGVPSRFSGSGSGTDYTLTISSLQPEDFATYYCQQSWNTPWTFGQGTKLEIKRLEDLKNVFPPEVAVFEPSKAEIAHTQKATLVCLATGFYPDHVELSWWVNGKEVHSGVCTDPQPLKEQPALNDSRYCLSSRLRVSATFWQNPRNHFRCQVQFYGLSENDEWTQDRAKPVTQIVSAEAWGRADCGSQSFGLLDPKLCYLLDGILFIYGVILTALFLRVKFSRSADAPAYQQGQNQLYNELNLGRREEYDVLDKRRGRDPEMGGKPQRRKNPQEGLYNELQKDKMAEAYSEIGMKGERRRGKGHDGLYQGLSTATKDTYDALHMQALPPRRAKRSGSGATNFSLLKQAGDVEENPGPTSMDWIWRILFLVGAATGAHSQLQLQESGPGLVKPSETLSLTCTVSGGSISSGDYYWGWIRQPPGKGLEWIGHIYYSGATYYNPSLKSRVTISVDTSRNQFSLKLSSVTAADTAVYYCTRDDSSNWRSRGQGTLVTVSSSGGGGSGGGGSQVQLQESGGGLAQAGGSLRLSCAASGRTFSMGWFRQAPGKEREFVAAITYSGGSPYYASSVRGRFTISRDNAKNTVYLQMNSLKPEDTAVYYCAANPTYGSDWNAENWGQGTQVTVSSGSGGGGSGGGGSGGGGSFEQVQLQQPGAELVKPGASVKMSCKASGYAFSSYWINWMKQKPGQGLEWIGQIYPGDGDTNYNGKFKGRATLTADTSSSTAYMQLSSLTSEDSAVYFCARSITTVVGCAMDYWGQGTSVTVSSTRIQNPDPAVYQLRDSKSSDKSVCLFTDFDSQTNVSQSKDSDVYITDKCVLDMRSMDFKSNSAVAWSNKSDFACANAFNNSIIPEDTFFPSSDVPCGTQSFGLLDPKLCYLLDGILFIYGVILTALFLRVKFSRSADAPAYQQGQNQLYNELNLGRREEYDVLDKRRGRDPEMGGKPQRRKNPQEGLYNELQKDKMAEAYSEIGMKGERRRGKGHDGLYQGLSTATKDTYDALHMQALPPR

SEQ ID NO: 16138 - protein, 1423 aa, Artificial Sequence
  Synthetic Polypeptide
MALPVTALLLPLALLLHAARPEVQLLESGGGLVQPGGSLRLSCAASGFTFSSYAMSWVRQAPGKGLEWVSSISGSGDYIYYADSVKGRFTISRDISKNTLYLQMNSLRAEDTAVYYCAKEGTGANSSLADYRGQGTLVTVSSGGGSGGGSEVQLLESGGGLVQPGGSLRLSCAASGFIFSSYAMSWVRQAPGKGQEWVSGVSGTGVNTYYADSVKGRFTISRDNSKNTLYLQMNSLRAEDTAVYYCASGKGWDSGSWYEDYRGQGTLVTVSSGTGGGGSGGGGSGGGGSEFDIQMTQSPSSLSASVGDRVTITCKASDHINNWLAWYQQKPGQAPKLLIYGATTLETGVPSRFSGSGSGTDYTLTISSLQPEDFATYYCQQSWNTPWTFGQGTKLEIKRLEGKPIPNPLLGLDSTGSGEDLKNVFPPEVAVFEPSEAEISHTQKATLVCLATGFYPDHVELSWWVNGKEVHSGVSTDPQPLKEQPALNDSRYCLSSRLRVSATFWQNPRNHFRCQVQFYGLSENDEWTQDRAKPVTQIVSAEAWGRADCGSQSFGLLDPKLCYLLDGILFIYGVILTALFLRVKFSRSADAPAYQQGQNQLYNELNLGRREEYDVLDKRRGRDPEMGGKPQRRKNPQEGLYNELQKDKMAEAYSEIGMKGERRRGKGHDGLYQGLSTATKDTYDALHMQALPPRRAKRSGSGATNFSLLKQAGDVEENPGPTSMDWIWRILFLVGAATGAHSQLQLQESGPGLVKPSETLSLTCTVSGGSISSGDYYWGWIRQPPGKGLEWIGHIYYSGATYYNPSLKSRVTISVDTSRNQFSLKLSSVTAADTAVYYCTRDDSSNWRSRGQGTLVTVSSSGGGGSGGGGSQVQLQESGGGLAQAGGSLRLSCAASGRTFSMGWFRQAPGKEREFVAAITYSGGSPYYASSVRGRFTISRDNAKNTVYLQMNSLKPEDTAVYYCAANPTYGSDWNAENWGQGTQVTVSSGSGGGGSGGGGSGGGGSFEQVQLQQPGAELVKPGASVKMSCKASGYAFSSYWINWMKQKPGQGLEWIGQIYPGDGDTNYNGKFKGRATLTADTSSSTAYMQLSSLTSEDSAVYFCARSITTVVGCAMDYWGQGTSVTVSSTREQKLISEEDGSGIQNPDPAVYQLRDSKSSDKSVCLFTDFDSQTNVSQSKDSDVYITDKTVLDMRSMDFKSNSAVAWSNKSDFACANAFNNSIIPEDTFFPSPESSCGTQSFGLLDPKLCYLLDGILFIYGVILTALFLRSKRSRLLHSDYMNMTPRRPGPTRKHYQPYAPPRDFAAYRSRVKFSRSADAPAYQQGQNQLYNELNLGRREEYDVLDKRRGRDPEMGGKPQRRKNPQEGLYNELQKDKMAEAYSEIGMKGERRRGKGHDGLYQGLSTATKDTYDALHMQALPPR

SEQ ID NO: 16139 - protein, 1464 aa, Artificial Sequence
  Synthetic Polypeptide
MALPVTALLLPLALLLHAARPEVQLLESGGGLVQPGGSLRLSCAASGFTFSSYAMSWVRQAPGKGLEWVSSISGSGDYIYYADSVKGRFTISRDISKNTLYLQMNSLRAEDTAVYYCAKEGTGANSSLADYRGQGTLVTVSSGGGSGGGSEVQLLESGGGLVQPGGSLRLSCAASGFIFSSYAMSWVRQAPGKGQEWVSGVSGTGVNTYYADSVKGRFTISRDNSKNTLYLQMNSLRAEDTAVYYCASGKGWDSGSWYEDYRGQGTLVTVSSGTGGGGSGGGGSGGGGSEFDIQMTQSPSSLSASVGDRVTITCKASDHINNWLAWYQQKPGQAPKLLIYGATTLETGVPSRFSGSGSGTDYTLTISSLQPEDFATYYCQQSWNTPWTFGQGTKLEIKRLEGKPIPNPLLGLDSTGSGEDLKNVFPPEVAVFEPSEAEISHTQKATLVCLATGFYPDHVELSWWVNGKEVHSGVSTDPQPLKEQPALNDSRYCLSSRLRVSATFWQNPRNHFRCQVQFYGLSENDEWTQDRAKPVTQIVSAEAWGRADCGSQSFGLLDPKLCYLLDGILFIYGVILTALFLRSKRSRLLHSDYMNMTPRRPGPTRKHYQPYAPPRDFAAYRSRVKFSRSADAPAYQQGQNQLYNELNLGRREEYDVLDKRRGRDPEMGGKPQRRKNPQEGLYNELQKDKMAEAYSEIGMKGERRRGKGHDGLYQGLSTATKDTYDALHMQALPPRRAKRSGSGATNFSLLKQAGDVEENPGPTSMDWIWRILFLVGAATGAHSQLQLQESGPGLVKPSETLSLTCTVSGGSISSGDYYWGWIRQPPGKGLEWIGHIYYSGATYYNPSLKSRVTISVDTSRNQFSLKLSSVTAADTAVYYCTRDDSSNWRSRGQGTLVTVSSSGGGGSGGGGSQVQLQESGGGLAQAGGSLRLSCAASGRTFSMGWFRQAPGKEREFVAAITYSGGSPYYASSVRGRFTISRDNAKNTVYLQMNSLKPEDTAVYYCAANPTYGSDWNAENWGQGTQVTVSSGSGGGGSGGGGSGGGGSFEQVQLQQPGAELVKPGASVKMSCKASGYAFSSYWINWMKQKPGQGLEWIGQIYPGDGDTNYNGKFKGRATLTADTSSSTAYMQLSSLTSEDSAVYFCARSITTVVGCAMDYWGQGTSVTVSSTREQKLISEEDGSGIQNPDPAVYQLRDSKSSDKSVCLFTDFDSQTNVSQSKDSDVYITDKTVLDMRSMDFKSNSAVAWSNKSDFACANAFNNSIIPEDTFFPSPESSCGTQSFGLLDPKLCYLLDGILFIYGVILTALFLRSKRSRLLHSDYMNMTPRRPGPTRKHYQPYAPPRDFAAYRSRVKFSRSADAPAYQQGQNQLYNELNLGRREEYDVLDKRRGRDPEMGGKPQRRKNPQEGLYNELQKDKMAEAYSEIGMKGERRRGKGHDGLYQGLSTATKDTYDALHMQALPPR

SEQ ID NO: 16140 - protein, 1425 aa, Artificial Sequence
  Synthetic Polypeptide
MALPVTALLLPLALLLHAARPEVQLLESGGGLVQPGGSLRLSCAASGFTFSSYAMSWVRQAPGKGLEWVSSISGSGDYIYYADSVKGRFTISRDISKNTLYLQMNSLRAEDTAVYYCAKEGTGANSSLADYRGQGTLVTVSSGGGSGGGSEVQLLESGGGLVQPGGSLRLSCAASGFIFSSYAMSWVRQAPGKGQEWVSGVSGTGVNTYYADSVKGRFTISRDNSKNTLYLQMNSLRAEDTAVYYCASGKGWDSGSWYEDYRGQGTLVTVSSGTGGGGSGGGGSGGGGSEFDIQMTQSPSSLSASVGDRVTITCKASDHINNWLAWYQQKPGQAPKLLIYGATTLETGVPSRFSGSGSGTDYTLTISSLQPEDFATYYCQQSWNTPWTFGQGTKLEIKRLEGKPIPNPLLGLDSTGSGEDLKNVFPPEVAVFEPSEAEISHTQKATLVCLATGFYPDHVELSWWVNGKEVHSGVSTDPQPLKEQPALNDSRYCLSSRLRVSATFWQNPRNHFRCQVQFYGLSENDEWTQDRAKPVTQIVSAEAWGRADCGSQSFGLLDPKLCYLLDGILFIYGVILTALFLRVKFSRSADAPAYQQGQNQLYNELNLGRREEYDVLDKRRGRDPEMGGKPQRRKNPQEGLYNELQKDKMAEAYSEIGMKGERRRGKGHDGLYQGLSTATKDTYDALHMQALPPRRAKRSGSGATNFSLLKQAGDVEENPGPTSMDWIWRILFLVGAATGAHSQLQLQESGPGLVKPSETLSLTCTVSGGSISSGDYYWGWIRQPPGKGLEWIGHIYYSGATYYNPSLKSRVTISVDTSRNQFSLKLSSVTAADTAVYYCTRDDSSNWRSRGQGTLVTVSSSGGGGSGGGGSQVQLQESGGGLAQAGGSLRLSCAASGRTFSMGWFRQAPGKEREFVAAITYSGGSPYYASSVRGRFTISRDNAKNTVYLQMNSLKPEDTAVYYCAANPTYGSDWNAENWGQGTQVTVSSGSGGGGSGGGGSGGGGSFEQVQLQQPGAELVKPGASVKMSCKASGYAFSSYWINWMKQKPGQGLEWIGQIYPGDGDTNYNGKFKGRATLTADTSSSTAYMQLSSLTSEDSAVYFCARSITTVVGCAMDYWGQGTSVTVSSTREQKLISEEDLGSGIQNPDPAVYQLRDSKSSDKSVCLFTDFDSQTNVSQSKDSDVYITDKTVLDMRSMDFKSNSAVAWSNKSDFACANAFNNSIIPEDTFFPSPESSCGTQSFGLLDPKLCYLLDGILFIYGVILTALFLKRGRKKLLYIFKQPFMRPVQTTQEEDGCSCRFPEEEEGGCELRVKFSRSADAPAYQQGQNQLYNELNLGRREEYDVLDKRRGRDPEMGGKPQRRKNPQEGLYNELQKDKMAEAYSEIGMKGERRRGKGHDGLYQGLSTATKDTYDALHMQALPPR

SEQ ID NO: 16141 - protein, 1467 aa, Artificial Sequence
  Synthetic Polypeptide
MALPVTALLLPLALLLHAARPEVQLLESGGGLVQPGGSLRLSCAASGFTFSSYAMSWVRQAPGKGLEWVSSISGSGDYIYYADSVKGRFTISRDISKNTLYLQMNSLRAEDTAVYYCAKEGTGANSSLADYRGQGTLVTVSSGGGSGGGSEVQLLESGGGLVQPGGSLRLSCAASGFIFSSYAMSWVRQAPGKGQEWVSGVSGTGVNTYYADSVKGRFTISRDNSKNTLYLQMNSLRAEDTAVYYCASGKGWDSGSWYEDYRGQGTLVTVSSGTGGGGSGGGGSGGGGSEFDIQMTQSPSSLSASVGDRVTITCKASDHINNWLAWYQQKPGQAPKLLIYGATTLETGVPSRFSGSGSGTDYTLTISSLQPEDFATYYCQQSWNTPWTFGQGTKLEIKRLEGKPIPNPLLGLDSTGSGEDLKNVFPPEVAVFEPSEAEISHTQKATLVCLATGFYPDHVELSWWVNGKEVHSGVSTDPQPLKEQPALNDSRYCLSSRLRVSATFWQNPRNHFRCQVQFYGLSENDEWTQDRAKPVTQIVSAEAWGRADCGSQSFGLLDPKLCYLLDGILFIYGVILTALFLKRGRKKLLYIFKQPFMRPVQTTQEEDGCSCRFPEEEEGGCELRVKFSRSADAPAYQQGQNQLYNELNLGRREEYDVLDKRRGRDPEMGGKPQRRKNPQEGLYNELQKDKMAEAYSEIGMKGERRRGKGHDGLYQGLSTATKDTYDALHMQALPPRRAKRSGSGATNFSLLKQAGDVEENPGPTSMDWIWRILFLVGAATGAHSQLQLQESGPGLVKPSETLSLTCTVSGGSISSGDYYWGWIRQPPGKGLEWIGHIYYSGATYYNPSLKSRVTISVDTSRNQFSLKLSSVTAADTAVYYCTRDDSSNWRSRGQGTLVTVSSSGGGGSGGGGSQVQLQESGGGLAQAGGSLRLSCAASGRTFSMGWFRQAPGKEREFVAAITYSGGSPYYASSVRGRFTISRDNAKNTVYLQMNSLKPEDTAVYYCAANPTYGSDWNAENWGQGTQVTVSSGSGGGGSGGGGSGGGGSFEQVQLQQPGAELVKPGASVKMSCKASGYAFSSYWINWMKQKPGQGLEWIGQIYPGDGDTNYNGKFKGRATLTADTSSSTAYMQLSSLTSEDSAVYFCARSITTVVGCAMDYWGQGTSVTVSSTREQKLISEEDLGSGIQNPDPAVYQLRDSKSSDKSVCLFTDFDSQTNVSQSKDSDVYITDKTVLDMRSMDFKSNSAVAWSNKSDFACANAFNNSIIPEDTFFPSPESSCGTQSFGLLDPKLCYLLDGILFIYGVILTALFLKRGRKKLLYIFKQPFMRPVQTTQEEDGCSCRFPEEEEGGCELRVKFSRSADAPAYQQGQNQLYNELNLGRREEYDVLDKRRGRDPEMGGKPQRRKNPQEGLYNELQKDKMAEAYSEIGMKGERRRGKGHDGLYQGLSTATKDTYDALHMQALPPR

SEQ ID NO: 16142 - protein, 1357 aa, Artificial Sequence
  Synthetic Polypeptide
MALPVTALLLPLALLLHAARPEVQLLESGGGLVQPGGSLRLSCAASGFTFSSYAMSWVRQAPGKGLEWVSSISGSGDYIYYADSVKGRFTISRDISKNTLYLQMNSLRAEDTAVYYCAKEGTGANSSLADYRGQGTLVTVSSGGGSGGGSEVQLLESGGGLVQPGGSLRLSCAASGFIFSSYAMSWVRQAPGKGQEWVSGVSGTGVNTYYADSVKGRFTISRDNSKNTLYLQMNSLRAEDTAVYYCASGKGWDSGSWYEDYRGQGTLVTVSSGTGGGGSGGGGSGGGGSEFDIQMTQSPSSLSASVGDRVTITCKASDHINNWLAWYQQKPGQAPKLLIYGATTLETGVPSRFSGSGSGTDYTLTISSLQPEDFATYYCQQSWNTPWTFGQGTKLEIKRLEQSFGLLDPKLCYLLDGILFIYGVILTALFLRVKFSRSADAPAYQQGQNQLYNELNLGRREEYDVLDKRRGRDPEMGGKPQRRKNPQEGLYNELQKDKMAEAYSEIGMKGERRRGKGHDGLYQGLSTATKDTYDALHMQALPPRRAKRSGSGATNFSLLKQAGDVEENPGPTSMDWIWRILFLVGAATGAHSQLQLQESGPGLVKPSETLSLTCTVSGGSISSGDYYWGWIRQPPGKGLEWIGHIYYSGATYYNPSLKSRVTISVDTSRNQFSLKLSSVTAADTAVYYCTRDDSSNWRSRGQGTLVTVSSSGGGGSGGGGSQVQLQESGGGLAQAGGSLRLSCAASGRTFSMGWFRQAPGKEREFVAAITYSGGSPYYASSVRGRFTISRDNAKNTVYLQMNSLKPEDTAVYYCAANPTYGSDWNAENWGQGTQVTVSSGSGGGGSGGGGSGGGGSFEQVQLQQPGAELVKPGASVKMSCKASGYAFSSYWINWMKQKPGQGLEWIGQIYPGDGDTNYNGKFKGRATLTADTSSSTAYMQLSSLTSEDSAVYFCARSITTVVGCAMDYWGQGTSVTVSSTRQSFGLLDPKLCYLLDGILFIYGVILTALFLRVKFSRSADAPAYQQGQNQLYNELNLGRREEYDVLDKRRGRDPEMGGKPQRRKNPQEGLYNELQKDKMAEAYSEIGMKGERRRGKGHDGLYQGLSTATKDTYDALHMQALPPRRAKRSGSGVKQTLNFDLLKLAGDVESNPGPSRGHMTEYKPTVRLATRDDVPRAVRTLAAAFADYPATRHTVDPDRHIERVTELQELFLTRVGLDIGKVWVADDGAAVAVWTTPESVEAGAVFAEIGPRMAELSGSRLAAQQQMEGLLAPHRPKEPAWFLATVGVSPDHQGKGLGSAVVLPGVEAAERAGVPAFLETSAPRNLPFYERLGFTVTADVEVPEGPRTWCMTRKPGA

SEQ ID NO: 16143 - protein, 1182 aa, Artificial Sequence
  Synthetic Polypeptide
MALPVTALLLPLALLLHAARPEVQLLESGGGLVQPGGSLRLSCAASGFTFSSYAMSWVRQAPGKGLEWVSSISGSGDYIYYADSVKGRFTISRDISKNTLYLQMNSLRAEDTAVYYCAKEGTGANSSLADYRGQGTLVTVSSGGGSGGGSEVQLLESGGGLVQPGGSLRLSCAASGFIFSSYAMSWVRQAPGKGQEWVSGVSGTGVNTYYADSVKGRFTISRDNSKNTLYLQMNSLRAEDTAVYYCASGKGWDSGSWYEDYRGQGTLVTVSSGTGGGGSGGGGSGGGGSEFDIQMTQSPSSLSASVGDRVTITCKASDHINNWLAWYQQKPGQAPKLLIYGATTLETGVPSRFSGSGSGTDYTLTISSLQPEDFATYYCQQSWNTPWTFGQGTKLEIKRLEGQPKANPTVTLFPPSSEELQANKATLVCLISDFYPGAVTVAWKADGSPVKAGVETTKPSKQSNNKYAASSYLSLTPEQWKSHRSYSCQVTHEGSTVEKTVAPTECSPIKTDVITMDPKDNCSKDANDTLLLQLTNTSAYYMYLLLLLKSVVYFAIITCCLLRRTAFCCNGEKSRAKRSGSGATNFSLLKQAGDVEENPGPTSMDWIWRILFLVGAATGAHSQLQLQESGPGLVKPSETLSLTCTVSGGSISSGDYYWGWIRQPPGKGLEWIGHIYYSGATYYNPSLKSRVTISVDTSRNQFSLKLSSVTAADTAVYYCTRDDSSNWRSRGQGTLVTVSSSGGGGSGGGGSQVQLQESGGGLAQAGGSLRLSCAASGRTFSMGWFRQAPGKEREFVAAITYSGGSPYYASSVRGRFTISRDNAKNTVYLQMNSLKPEDTAVYYCAANPTYGSDWNAENWGQGTQVTVSSGSGGGGSGGGGSGGGGSFEQVQLQQPGAELVKPGASVKMSCKASGYAFSSYWINWMKQKPGQGLEWIGQIYPGDGDTNYNGKFKGRATLTADTSSSTAYMQLSSLTSEDSAVYFCARSITTVVGCAMDYWGQGTSVTVSSTRASTKGPSVFPLAPSSKSTSGGTAALGCLVKDYFPEPVTVSWNSGALTSGVHTFPAVLQSSGLYSLSSVVTVPSSSLGTQTYICNVNHKPSNTKVDKRVEPKSCEVKTDSTDHVKPKETENTKQPSKSCHKPKAIVHTEKVNMMSLTVLGLRMLFAKTVAVNFLLTAKLFFL

SEQ ID NO: 16144 - protein, 1160 aa, Artificial Sequence
  Synthetic Polypeptide
MALPVTALLLPLALLLHAARPEVQLLESGGGLVQPGGSLRLSCAASGFTFSSYAMSWVRQAPGKGLEWVSSISGSGDYIYYADSVKGRFTISRDISKNTLYLQMNSLRAEDTAVYYCAKEGTGANSSLADYRGQGTLVTVSSGGGSGGGSEVQLLESGGGLVQPGGSLRLSCAASGFIFSSYAMSWVRQAPGKGQEWVSGVSGTGVNTYYADSVKGRFTISRDNSKNTLYLQMNSLRAEDTAVYYCASGKGWDSGSWYEDYRGQGTLVTVSSGTGGGGSGGGGSGGGGSEFDIQMTQSPSSLSASVGDRVTITCKASDHINNWLAWYQQKPGQAPKLLIYGATTLETGVPSRFSGSGSGTDYTLTISSLQPEDFATYYCQQSWNTPWTFGQGTKLEIKRLEGQPKANPTVTLFPPSSEELQANKATLVCLISDFYPGAVTVAWKADGSPVKAGVETTKPSKQSNNKYAASSYLSLTPEQWKSHRSYSCQVTHEGSTVEKTVAPTECSGRADCGITSASYHQGVLSATILYEILLGKATLYAVLVSALVLMAMVKRKDSRGRAKRSGSGATNFSLLKQAGDVEENPGPTSMDWIWRILFLVGAATGAHSQLQLQESGPGLVKPSETLSLTCTVSGGSISSGDYYWGWIRQPPGKGLEWIGHIYYSGATYYNPSLKSRVTISVDTSRNQFSLKLSSVTAADTAVYYCTRDDSSNWRSRGQGTLVTVSSSGGGGSGGGGSQVQLQESGGGLAQAGGSLRLSCAASGRTFSMGWFRQAPGKEREFVAAITYSGGSPYYASSVRGRFTISRDNAKNTVYLQMNSLKPEDTAVYYCAANPTYGSDWNAENWGQGTQVTVSSGSGGGGSGGGGSGGGGSFEQVQLQQPGAELVKPGASVKMSCKASGYAFSSYWINWMKQKPGQGLEWIGQIYPGDGDTNYNGKFKGRATLTADTSSSTAYMQLSSLTSEDSAVYFCARSITTVVGCAMDYWGQGTSVTVSSTRASTKGPSVFPLAPSSKSTSGGTAALGCLVKDYFPEPVTVSWNSGALTSGVHTFPAVLQSSGLYSLSSVVTVPSSSLGTQTYICNVNHKPSNTKVDKRVEPKSCIPEDTFFPSSDVPCDVKLVEKSFETDTNLNFQNLSVIGFRILLLKVAGFNLLMTLRLWSS

SEQ ID NO: 16145 - protein, 1160 aa, Artificial Sequence
  Synthetic Polypeptide
MALPVTALLLPLALLLHAARPEVQLLESGGGLVQPGGSLRLSCAASGFTFSSYAMSWVRQAPGKGLEWVSSISGSGDYIYYADSVKGRFTISRDISKNTLYLQMNSLRAEDTAVYYCAKEGTGANSSLADYRGQGTLVTVSSGGGSGGGSEVQLLESGGGLVQPGGSLRLSCAASGFIFSSYAMSWVRQAPGKGQEWVSGVSGTGVNTYYADSVKGRFTISRDNSKNTLYLQMNSLRAEDTAVYYCASGKGWDSGSWYEDYRGQGTLVTVSSGTGGGGSGGGGSGGGGSEFDIQMTQSPSSLSASVGDRVTITCKASDHINNWLAWYQQKPGQAPKLLIYGATTLETGVPSRFSGSGSGTDYTLTISSLQPEDFATYYCQQSWNTPWTFGQGTKLEIKRLEGQPKANPTVTLFPPSSEELQANKATLVCLISDFYPGAVTVAWKADGSPVKAGVETTKPSKQSNNKYAASSYLSLTPEQWKSHRSYSCQVTHEGSTVEKTVAPTECSGRADCGFTSESYQQGVLSATILYEILLGKATLYAVLVSALVLMAMVKRKDSRGRAKRSGSGATNFSLLKQAGDVEENPGPTSMDWIWRILFLVGAATGAHSQLQLQESGPGLVKPSETLSLTCTVSGGSISSGDYYWGWIRQPPGKGLEWIGHIYYSGATYYNPSLKSRVTISVDTSRNQFSLKLSSVTAADTAVYYCTRDDSSNWRSRGQGTLVTVSSSGGGGSGGGGSQVQLQESGGGLAQAGGSLRLSCAASGRTFSMGWFRQAPGKEREFVAAITYSGGSPYYASSVRGRFTISRDNAKNTVYLQMNSLKPEDTAVYYCAANPTYGSDWNAENWGQGTQVTVSSGSGGGGSGGGGSGGGGSFEQVQLQQPGAELVKPGASVKMSCKASGYAFSSYWINWMKQKPGQGLEWIGQIYPGDGDTNYNGKFKGRATLTADTSSSTAYMQLSSLTSEDSAVYFCARSITTVVGCAMDYWGQGTSVTVSSTRASTKGPSVFPLAPSSKSTSGGTAALGCLVKDYFPEPVTVSWNSGALTSGVHTFPAVLQSSGLYSLSSVVTVPSSSLGTQTYICNVNHKPSNTKVDKRVEPKSCIPEDTFFPSPESSCDVKLVEKSFETDTNLNFQNLSVIGFRILLLKVAGFNLLMTLRLWSS

SEQ ID NO: 16146 - protein, 1126 aa, Artificial Sequence
  Synthetic Polypeptide
MALPVTALLLPLALLLHAARPEVQLLESGGGLVQPGGSLRLSCAASGFTFSSYAMSWVRQAPGKGLEWVSSISGSGDYIYYADSVKGRFTISRDISKNTLYLQMNSLRAEDTAVYYCAKEGTGANSSLADYRGQGTLVTVSSGGGSGGGSEVQLLESGGGLVQPGGSLRLSCAASGFIFSSYAMSWVRQAPGKGQEWVSGVSGTGVNTYYADSVKGRFTISRDNSKNTLYLQMNSLRAEDTAVYYCASGKGWDSGSWYEDYRGQGTLVTVSSLEGQPKANPTVTLFPPSSEELQANKATLVCLISDFYPGAVTVAWKADGSPVKAGVETTKPSKQSNNKYAASSYLSLTPEQWKSHRSYSCQVTHEGSTVEKTVAPTECSGRADCGFTSESYQQGVLSATILYEILLGKATLYAVLVSALVLMAMVKRKDSRGRAKRSGSGATNFSLLKQAGDVEENPGPTSMDWIWRILFLVGAATGAHSQLQLQESGPGLVKPSETLSLTCTVSGGSISSGDYYWGWIRQPPGKGLEWIGHIYYSGATYYNPSLKSRVTISVDTSRNQFSLKLSSVTAADTAVYYCTRDDSSNWRSRGQGTLVTVSSSGGGGSGGGGSQVQLQESGGGLAQAGGSLRLSCAASGRTFSMGWFRQAPGKEREFVAAITYSGGSPYYASSVRGRFTISRDNAKNTVYLQMNSLKPEDTAVYYCAANPTYGSDWNAENWGQGTQVTVSSTRASTKGPSVFPLAPSSKSTSGGTAALGCLVKDYFPEPVTVSWNSGALTSGVHTFPAVLQSSGLYSLSSVVTVPSSSLGTQTYICNVNHKPSNTKVDKRVEPKSCIPEDTFFPSPESSCDVKLVEKSFETDTNLNFQNLSVIGFRILLLKVAGFNLLMTLRLWSSRAKRSGSGVKQTLNFDLLKLAGDVESNPGPSRGHMTEYKPTVRLATRDDVPRAVRTLAAAFADYPATRHTVDPDRHIERVTELQELFLTRVGLDIGKVWVADDGAAVAVWTTPESVEAGAVFAEIGPRMAELSGSRLAAQQQMEGLLAPHRPKEPAWFLATVGVSPDHQGKGLGSAVVLPGVEAAERAGVPAFLETSAPRNLPFYERLGFTVTADVEVPEGPRTWCMTRKPGA

SEQ ID NO: 16147 - protein, 893 aa, Artificial Sequence
  Synthetic Polypeptide
MALPVTALLLPLALLLHAARPEVQLLESGGGLVQPGGSLRLSCAASGFTFSSYAMSWVRQAPGKGLEWVSSISGSGDYIYYADSVKGRFTISRDISKNTLYLQMNSLRAEDTAVYYCAKEGTGANSSLADYRGQGTLVTVSSGGGSGGGSEVQLLESGGGLVQPGGSLRLSCAASGFIFSSYAMSWVRQAPGKGQEWVSGVSGTGVNTYYADSVKGRFTISRDNSKNTLYLQMNSLRAEDTAVYYCASGKGWDSGSWYEDYRGQGTLVTVSSLEGQPKANPTVTLFPPSSEELQANKATLVCLISDFYPGAVTVAWKADGSPVKAGVETTKPSKQSNNKYAASSYLSLTPEQWKSHRSYSCQVTHEGSTVEKTVAPTECSGRADCGFTSESYQQGVLSATILYEILLGKATLYAVLVSALVLMAMVKRKDSRGRAKRSGSGATNFSLLKQAGDVEENPGPTSMDWIWRILFLVGAATGAHSQLQLQESGPGLVKPSETLSLTCTVSGGSISSGDYYWGWIRQPPGKGLEWIGHIYYSGATYYNPSLKSRVTISVDTSRNQFSLKLSSVTAADTAVYYCTRDDSSNWRSRGQGTLVTVSSSGGGGSGGGGSQVQLQESGGGLAQAGGSLRLSCAASGRTFSMGWFRQAPGKEREFVAAITYSGGSPYYASSVRGRFTISRDNAKNTVYLQMNSLKPEDTAVYYCAANPTYGSDWNAENWGQGTQVTVSSTRASTKGPSVFPLAPSSKSTSGGTAALGCLVKDYFPEPVTVSWNSGALTSGVHTFPAVLQSSGLYSLSSVVTVPSSSLGTQTYICNVNHKPSNTKVDKRVEPKSCIPEDTFFPSPESSCDVKLVEKSFETDTNLNFQNLSVIGFRILLLKVAGFNLLMTLRLWSS

SEQ ID NO: 16148 - protein, 921 aa, Artificial Sequence
  Synthetic Polypeptide
MALPVTALLLPLALLLHAARPEVQLLESGGGLVQPGGSLRLSCAASGFTFSSYAMSWVRQAPGKGLEWVSSISGSGDYIYYADSVKGRFTISRDISKNTLYLQMNSLRAEDTAVYYCAKEGTGANSSLADYRGQGTLVTVSSGGGSGGGSEVQLLESGGGLVQPGGSLRLSCAASGFIFSSYAMSWVRQAPGKGQEWVSGVSGTGVNTYYADSVKGRFTISRDNSKNTLYLQMNSLRAEDTAVYYCASGKGWDSGSWYEDYRGQGTLVTVSSLEGSGRADCGFTSESYQQGVLSATILYEILLGKATLYAVLVSALVLMAMVKRKDSRGRAKRSGSGATNFSLLKQAGDVEENPGPTSMDWIWRILFLVGAATGAHSQLQLQESGPGLVKPSETLSLTCTVSGGSISSGDYYWGWIRQPPGKGLEWIGHIYYSGATYYNPSLKSRVTISVDTSRNQFSLKLSSVTAADTAVYYCTRDDSSNWRSRGQGTLVTVSSSGGGGSGGGGSQVQLQESGGGLAQAGGSLRLSCAASGRTFSMGWFRQAPGKEREFVAAITYSGGSPYYASSVRGRFTISRDNAKNTVYLQMNSLKPEDTAVYYCAANPTYGSDWNAENWGQGTQVTVSSTRGSIPEDTFFPSPESSCDVKLVEKSFETDTNLNFQNLSVIGFRILLLKVAGFNLLMTLRLWSSRAKRSGSGVKQTLNFDLLKLAGDVESNPGPSRGHMTEYKPTVRLATRDDVPRAVRTLAAAFADYPATRHTVDPDRHIERVTELQELFLTRVGLDIGKVWVADDGAAVAVWTTPESVEAGAVFAEIGPRMAELSGSRLAAQQQMEGLLAPHRPKEPAWFLATVGVSPDHQGKGLGSAVVLPGVEAAERAGVPAFLETSAPRNLPFYERLGFTVTADVEVPEGPRTWCMTRKPGA

SEQ ID NO: 16149 - protein, 688 aa, Artificial Sequence
  Synthetic Polypeptide
MALPVTALLLPLALLLHAARPEVQLLESGGGLVQPGGSLRLSCAASGFTFSSYAMSWVRQAPGKGLEWVSSISGSGDYIYYADSVKGRFTISRDISKNTLYLQMNSLRAEDTAVYYCAKEGTGANSSLADYRGQGTLVTVSSGGGSGGGSEVQLLESGGGLVQPGGSLRLSCAASGFIFSSYAMSWVRQAPGKGQEWVSGVSGTGVNTYYADSVKGRFTISRDNSKNTLYLQMNSLRAEDTAVYYCASGKGWDSGSWYEDYRGQGTLVTVSSLEGSGRADCGFTSESYQQGVLSATILYEILLGKATLYAVLVSALVLMAMVKRKDSRGRAKRSGSGATNFSLLKQAGDVEENPGPTSMDWIWRILFLVGAATGAHSQLQLQESGPGLVKPSETLSLTCTVSGGSISSGDYYWGWIRQPPGKGLEWIGHIYYSGATYYNPSLKSRVTISVDTSRNQFSLKLSSVTAADTAVYYCTRDDSSNWRSRGQGTLVTVSSSGGGGSGGGGSQVQLQESGGGLAQAGGSLRLSCAASGRTFSMGWFRQAPGKEREFVAAITYSGGSPYYASSVRGRFTISRDNAKNTVYLQMNSLKPEDTAVYYCAANPTYGSDWNAENWGQGTQVTVSSTRGSIPEDTFFPSPESSCDVKLVEKSFETDTNLNFQNLSVIGFRILLLKVAGFNLLMTLRLWSS

SEQ ID NO: 16150 - protein, 930 aa, Artificial Sequence
  Synthetic Polypeptide
MALPVTALLLPLALLLHAARPEVQLLESGGGLVQPGGSLRLSCAASGFTFSSYAMSWVRQAPGKGLEWVSSISGSGDYIYYADSVKGRFTISRDISKNTLYLQMNSLRAEDTAVYYCAKEGTGANSSLADYRGQGTLVTVSSGGGSGGGSEVQLLESGGGLVQPGGSLRLSCAASGFIFSSYAMSWVRQAPGKGQEWVSGVSGTGVNTYYADSVKGRFTISRDNSKNTLYLQMNSLRAEDTAVYYCASGKGWDSGSWYEDYRGQGTLVTVSSLEDKTHTCPPCPAGRADCGFTSESYQQGVLSATILYEILLGKATLYAVLVSALVLMAMVKRKDSRGRAKRSGSGATNFSLLKQAGDVEENPGPTSMDWIWRILFLVGAATGAHSQLQLQESGPGLVKPSETLSLTCTVSGGSISSGDYYWGWIRQPPGKGLEWIGHIYYSGATYYNPSLKSRVTISVDTSRNQFSLKLSSVTAADTAVYYCTRDDSSNWRSRGQGTLVTVSSSGGGGSGGGGSQVQLQESGGGLAQAGGSLRLSCAASGRTFSMGWFRQAPGKEREFVAAITYSGGSPYYASSVRGRFTISRDNAKNTVYLQMNSLKPEDTAVYYCAANPTYGSDWNAENWGQGTQVTVSSTRGSIPEDTFFPSPESSCDVKLVEKSFETDTNLNFQNLSVIGFRILLLKVAGFNLLMTLRLWSSRAKRSGSGVKQTLNFDLLKLAGDVESNPGPSRGHMTEYKPTVRLATRDDVPRAVRTLAAAFADYPATRHTVDPDRHIERVTELQELFLTRVGLDIGKVWVADDGAAVAVWTTPESVEAGAVFAEIGPRMAELSGSRLAAQQQMEGLLAPHRPKEPAWFLATVGVSPDHQGKGLGSAVVLPGVEAAERAGVPAFLETSAPRNLPFYERLGFTVTADVEVPEGPRTWCMTRKPGA

SEQ ID NO: 16151 - protein, 930 aa, Artificial Sequence
  Synthetic Polypeptide
MALPVTALLLPLALLLHAARPEVQLLESGGGLVQPGGSLRLSCAASGFTFSSYAMSWVRQAPGKGLEWVSSISGSGDYIYYADSVKGRFTISRDISKNTLYLQMNSLRAEDTAVYYCAKEGTGANSSLADYRGQGTLVTVSSGGGSGGGSEVQLLESGGGLVQPGGSLRLSCAASGFIFSSYAMSWVRQAPGKGQEWVSGVSGTGVNTYYADSVKGRFTISRDNSKNTLYLQMNSLRAEDTAVYYCASGKGWDSGSWYEDYRGQGTLVTVSSLEGSGRADCGFTSESYQQGVLSATILYEILLGKATLYAVLVSALVLMAMVKRKDSRGRAKRSGSGATNFSLLKQAGDVEENPGPTSMDWIWRILFLVGAATGAHSQLQLQESGPGLVKPSETLSLTCTVSGGSISSGDYYWGWIRQPPGKGLEWIGHIYYSGATYYNPSLKSRVTISVDTSRNQFSLKLSSVTAADTAVYYCTRDDSSNWRSRGQGTLVTVSSSGGGGSGGGGSQVQLQESGGGLAQAGGSLRLSCAASGRTFSMGWFRQAPGKEREFVAAITYSGGSPYYASSVRGRFTISRDNAKNTVYLQMNSLKPEDTAVYYCAANPTYGSDWNAENWGQGTQVTVSSTRDKTHTCPPCPAIPEDTFFPSPESSCDVKLVEKSFETDTNLNFQNLSVIGFRILLLKVAGFNLLMTLRLWSSRAKRSGSGVKQTLNFDLLKLAGDVESNPGPSRGHMTEYKPTVRLATRDDVPRAVRTLAAAFADYPATRHTVDPDRHIERVTELQELFLTRVGLDIGKVWVADDGAAVAVWTTPESVEAGAVFAEIGPRMAELSGSRLAAQQQMEGLLAPHRPKEPAWFLATVGVSPDHQGKGLGSAVVLPGVEAAERAGVPAFLETSAPRNLPFYERLGFTVTADVEVPEGPRTWCMTRKPGA

SEQ ID NO: 16152 - protein, 939 aa, Artificial Sequence
  Synthetic Polypeptide
MALPVTALLLPLALLLHAARPEVQLLESGGGLVQPGGSLRLSCAASGFTFSSYAMSWVRQAPGKGLEWVSSISGSGDYIYYADSVKGRFTISRDISKNTLYLQMNSLRAEDTAVYYCAKEGTGANSSLADYRGQGTLVTVSSGGGSGGGSEVQLLESGGGLVQPGGSLRLSCAASGFIFSSYAMSWVRQAPGKGQEWVSGVSGTGVNTYYADSVKGRFTISRDNSKNTLYLQMNSLRAEDTAVYYCASGKGWDSGSWYEDYRGQGTLVTVSSLEDKTHTCPPCPAGRADCGFTSESYQQGVLSATILYEILLGKATLYAVLVSALVLMAMVKRKDSRGRAKRSGSGATNFSLLKQAGDVEENPGPTSMDWIWRILFLVGAATGAHSQLQLQESGPGLVKPSETLSLTCTVSGGSISSGDYYWGWIRQPPGKGLEWIGHIYYSGATYYNPSLKSRVTISVDTSRNQFSLKLSSVTAADTAVYYCTRDDSSNWRSRGQGTLVTVSSSGGGGSGGGGSQVQLQESGGGLAQAGGSLRLSCAASGRTFSMGWFRQAPGKEREFVAAITYSGGSPYYASSVRGRFTISRDNAKNTVYLQMNSLKPEDTAVYYCAANPTYGSDWNAENWGQGTQVTVSSTRDKTHTCPPCPAIPEDTFFPSPESSCDVKLVEKSFETDTNLNFQNLSVIGFRILLLKVAGFNLLMTLRLWSSRAKRSGSGVKQTLNFDLLKLAGDVESNPGPSRGHMTEYKPTVRLATRDDVPRAVRTLAAAFADYPATRHTVDPDRHIERVTELQELFLTRVGLDIGKVWVADDGAAVAVWTTPESVEAGAVFAEIGPRMAELSGSRLAAQQQMEGLLAPHRPKEPAWFLATVGVSPDHQGKGLGSAVVLPGVEAAERAGVPAFLETSAPRNLPFYERLGFTVTADVEVPEGPRTWCMTRKPGA

SEQ ID NO: 16153 - protein, 706 aa, Artificial Sequence
  Synthetic Polypeptide
MALPVTALLLPLALLLHAARPEVQLLESGGGLVQPGGSLRLSCAASGFTFSSYAMSWVRQAPGKGLEWVSSISGSGDYIYYADSVKGRFTISRDISKNTLYLQMNSLRAEDTAVYYCAKEGTGANSSLADYRGQGTLVTVSSGGGSGGGSEVQLLESGGGLVQPGGSLRLSCAASGFIFSSYAMSWVRQAPGKGQEWVSGVSGTGVNTYYADSVKGRFTISRDNSKNTLYLQMNSLRAEDTAVYYCASGKGWDSGSWYEDYRGQGTLVTVSSLEDKTHTCPPCPAGRADCGFTSESYQQGVLSATILYEILLGKATLYAVLVSALVLMAMVKRKDSRGRAKRSGSGATNFSLLKQAGDVEENPGPTSMDWIWRILFLVGAATGAHSQLQLQESGPGLVKPSETLSLTCTVSGGSISSGDYYWGWIRQPPGKGLEWIGHIYYSGATYYNPSLKSRVTISVDTSRNQFSLKLSSVTAADTAVYYCTRDDSSNWRSRGQGTLVTVSSSGGGGSGGGGSQVQLQESGGGLAQAGGSLRLSCAASGRTFSMGWFRQAPGKEREFVAAITYSGGSPYYASSVRGRFTISRDNAKNTVYLQMNSLKPEDTAVYYCAANPTYGSDWNAENWGQGTQVTVSSTRDKTHTCPPCPAIPEDTFFPSPESSCDVKLVEKSFETDTNLNFQNLSVIGFRILLLKVAGFNLLMTLRLWSS

SEQ ID NO: 16154 - protein, 697 aa, Artificial Sequence
  Synthetic Polypeptide
MALPVTALLLPLALLLHAARPEVQLLESGGGLVQPGGSLRLSCAASGFTFSSYAMSWVRQAPGKGLEWVSSISGSGDYIYYADSVKGRFTISRDISKNTLYLQMNSLRAEDTAVYYCAKEGTGANSSLADYRGQGTLVTVSSGGGSGGGSEVQLLESGGGLVQPGGSLRLSCAASGFIFSSYAMSWVRQAPGKGQEWVSGVSGTGVNTYYADSVKGRFTISRDNSKNTLYLQMNSLRAEDTAVYYCASGKGWDSGSWYEDYRGQGTLVTVSSLEGSGRADCGFTSESYQQGVLSATILYEILLGKATLYAVLVSALVLMAMVKRKDSRGRAKRSGSGATNFSLLKQAGDVEENPGPTSMDWIWRILFLVGAATGAHSQLQLQESGPGLVKPSETLSLTCTVSGGSISSGDYYWGWIRQPPGKGLEWIGHIYYSGATYYNPSLKSRVTISVDTSRNQFSLKLSSVTAADTAVYYCTRDDSSNWRSRGQGTLVTVSSSGGGGSGGGGSQVQLQESGGGLAQAGGSLRLSCAASGRTFSMGWFRQAPGKEREFVAAITYSGGSPYYASSVRGRFTISRDNAKNTVYLQMNSLKPEDTAVYYCAANPTYGSDWNAENWGQGTQVTVSSTRDKTHTCPPCPAIPEDTFFPSPESSCDVKLVEKSFETDTNLNFQNLSVIGFRILLLKVAGFNLLMTLRLWSS

SEQ ID NO: 16155 - protein, 1148 aa, Artificial Sequence
  Synthetic Polypeptide
MALPVTALLLPLALLLHAARPEVQLLESGGGLVQPGGSLRLSCAASGFTFSSYAMSWVRQAPGKGLEWVSSISGSGDYIYYADSVKGRFTISRDISKNTLYLQMNSLRAEDTAVYYCAKEGTGANSSLADYRGQGTLVTVSSGGGSGGGSEVQLLESGGGLVQPGGSLRLSCAASGFIFSSYAMSWVRQAPGKGQEWVSGVSGTGVNTYYADSVKGRFTISRDNSKNTLYLQMNSLRAEDTAVYYCASGKGWDSGSWYEDYRGQGTLVTVSSLEGQPKANPTVTLFPPSSEELQANKATLVCLISDFYPGAVTVAWKADGSPVKAGVETTKPSKQSNNKYAASSYLSLTPEQWKSHRSYSCQVTHEGSTVEKTVAPTECSPIKTDVITMDPKDNCSKDANDTLLLQLTNTSAYYMYLLLLLKSVVYFAIITCCLLRRTAFCCNGEKSRAKRSGSGATNFSLLKQAGDVEENPGPTSMDWIWRILFLVGAATGAHSQLQLQESGPGLVKPSETLSLTCTVSGGSISSGDYYWGWIRQPPGKGLEWIGHIYYSGATYYNPSLKSRVTISVDTSRNQFSLKLSSVTAADTAVYYCTRDDSSNWRSRGQGTLVTVSSSGGGGSGGGGSQVQLQESGGGLAQAGGSLRLSCAASGRTFSMGWFRQAPGKEREFVAAITYSGGSPYYASSVRGRFTISRDNAKNTVYLQMNSLKPEDTAVYYCAANPTYGSDWNAENWGQGTQVTVSSTRASTKGPSVFPLAPSSKSTSGGTAALGCLVKDYFPEPVTVSWNSGALTSGVHTFPAVLQSSGLYSLSSVVTVPSSSLGTQTYICNVNHKPSNTKVDKRVEPKSCEVKTDSTDHVKPKETENTKQPSKSCHKPKAIVHTEKVNMMSLTVLGLRMLFAKTVAVNFLLTAKLFFLRAKRSGSGVKQTLNFDLLKLAGDVESNPGPSRGHMTEYKPTVRLATRDDVPRAVRTLAAAFADYPATRHTVDPDRHIERVTELQELFLTRVGLDIGKVWVADDGAAVAVWTTPESVEAGAVFAEIGPRMAELSGSRLAAQQQMEGLLAPHRPKEPAWFLATVGVSPDHQGKGLGSAVVLPGVEAAERAGVPAFLETSAPRNLPFYERLGFTVTADVEVPEGPRTWCMTRKPGA

SEQ ID NO: 16156 - protein, 915 aa, Artificial Sequence
  Synthetic Polypeptide
MALPVTALLLPLALLLHAARPEVQLLESGGGLVQPGGSLRLSCAASGFTFSSYAMSWVRQAPGKGLEWVSSISGSGDYIYYADSVKGRFTISRDISKNTLYLQMNSLRAEDTAVYYCAKEGTGANSSLADYRGQGTLVTVSSGGGSGGGSEVQLLESGGGLVQPGGSLRLSCAASGFIFSSYAMSWVRQAPGKGQEWVSGVSGTGVNTYYADSVKGRFTISRDNSKNTLYLQMNSLRAEDTAVYYCASGKGWDSGSWYEDYRGQGTLVTVSSLEGQPKANPTVTLFPPSSEELQANKATLVCLISDFYPGAVTVAWKADGSPVKAGVETTKPSKQSNNKYAASSYLSLTPEQWKSHRSYSCQVTHEGSTVEKTVAPTECSPIKTDVITMDPKDNCSKDANDTLLLQLTNTSAYYMYLLLLLKSVVYFAIITCCLLRRTAFCCNGEKSRAKRSGSGATNFSLLKQAGDVEENPGPTSMDWIWRILFLVGAATGAHSQLQLQESGPGLVKPSETLSLTCTVSGGSISSGDYYWGWIRQPPGKGLEWIGHIYYSGATYYNPSLKSRVTISVDTSRNQFSLKLSSVTAADTAVYYCTRDDSSNWRSRGQGTLVTVSSSGGGGSGGGGSQVQLQESGGGLAQAGGSLRLSCAASGRTFSMGWFRQAPGKEREFVAAITYSGGSPYYASSVRGRFTISRDNAKNTVYLQMNSLKPEDTAVYYCAANPTYGSDWNAENWGQGTQVTVSSTRASTKGPSVFPLAPSSKSTSGGTAALGCLVKDYFPEPVTVSWNSGALTSGVHTFPAVLQSSGLYSLSSVVTVPSSSLGTQTYICNVNHKPSNTKVDKRVEPKSCEVKTDSTDHVKPKETENTKQPSKSCHKPKAIVHTEKVNMMSLTVLGLRMLFAKTVAVNFLLTAKLFFL

SEQ ID NO: 16157 - protein, 943 aa, Artificial Sequence
  Synthetic Polypeptide
MALPVTALLLPLALLLHAARPEVQLLESGGGLVQPGGSLRLSCAASGFTFSSYAMSWVRQAPGKGLEWVSSISGSGDYIYYADSVKGRFTISRDISKNTLYLQMNSLRAEDTAVYYCAKEGTGANSSLADYRGQGTLVTVSSGGGSGGGSEVQLLESGGGLVQPGGSLRLSCAASGFIFSSYAMSWVRQAPGKGQEWVSGVSGTGVNTYYADSVKGRFTISRDNSKNTLYLQMNSLRAEDTAVYYCASGKGWDSGSWYEDYRGQGTLVTVSSLEGSPIKTDVITMDPKDNCSKDANDTLLLQLTNTSAYYMYLLLLLKSVVYFAIITCCLLRRTAFCCNGEKSRAKRSGSGATNFSLLKQAGDVEENPGPTSMDWIWRILFLVGAATGAHSQLQLQESGPGLVKPSETLSLTCTVSGGSISSGDYYWGWIRQPPGKGLEWIGHIYYSGATYYNPSLKSRVTISVDTSRNQFSLKLSSVTAADTAVYYCTRDDSSNWRSRGQGTLVTVSSSGGGGSGGGGSQVQLQESGGGLAQAGGSLRLSCAASGRTFSMGWFRQAPGKEREFVAAITYSGGSPYYASSVRGRFTISRDNAKNTVYLQMNSLKPEDTAVYYCAANPTYGSDWNAENWGQGTQVTVSSTRGSEVKTDSTDHVKPKETENTKQPSKSCHKPKAIVHTEKVNMMSLTVLGLRMLFAKTVAVNFLLTAKLFFLRAKRSGSGVKQTLNFDLLKLAGDVESNPGPSRGHMTEYKPTVRLATRDDVPRAVRTLAAAFADYPATRHTVDPDRHIERVTELQELFLTRVGLDIGKVWVADDGAAVAVWTTPESVEAGAVFAEIGPRMAELSGSRLAAQQQMEGLLAPHRPKEPAWFLATVGVSPDHQGKGLGSAVVLPGVEAAERAGVPAFLETSAPRNLPFYERLGFTVTADVEVPEGPRTWCMTRKPGA

SEQ ID NO: 16158 - protein, 710 aa, Artificial Sequence
  Synthetic Polypeptide
MALPVTALLLPLALLLHAARPEVQLLESGGGLVQPGGSLRLSCAASGFTFSSYAMSWVRQAPGKGLEWVSSISGSGDYIYYADSVKGRFTISRDISKNTLYLQMNSLRAEDTAVYYCAKEGTGANSSLADYRGQGTLVTVSSGGGSGGGSEVQLLESGGGLVQPGGSLRLSCAASGFIFSSYAMSWVRQAPGKGQEWVSGVSGTGVNTYYADSVKGRFTISRDNSKNTLYLQMNSLRAEDTAVYYCASGKGWDSGSWYEDYRGQGTLVTVSSLEGSPIKTDVITMDPKDNCSKDANDTLLLQLTNTSAYYMYLLLLLKSVVYFAIITCCLLRRTAFCCNGEKSRAKRSGSGATNFSLLKQAGDVEENPGPTSMDWIWRILFLVGAATGAHSQLQLQESGPGLVKPSETLSLTCTVSGGSISSGDYYWGWIRQPPGKGLEWIGHIYYSGATYYNPSLKSRVTISVDTSRNQFSLKLSSVTAADTAVYYCTRDDSSNWRSRGQGTLVTVSSSGGGGSGGGGSQVQLQESGGGLAQAGGSLRLSCAASGRTFSMGWFRQAPGKEREFVAAITYSGGSPYYASSVRGRFTISRDNAKNTVYLQMNSLKPEDTAVYYCAANPTYGSDWNAENWGQGTQVTVSSTRGSEVKTDSTDHVKPKETENTKQPSKSCHKPKAIVHTEKVNMMSLTVLGLRMLFAKTVAVNFLLTAKLFFL

SEQ ID NO: 16159 - protein, 728 aa, Artificial Sequence
  Synthetic Polypeptide
MALPVTALLLPLALLLHAARPEVQLLESGGGLVQPGGSLRLSCAASGFTFSSYAMSWVRQAPGKGLEWVSSISGSGDYIYYADSVKGRFTISRDISKNTLYLQMNSLRAEDTAVYYCAKEGTGANSSLADYRGQGTLVTVSSGGGSGGGSEVQLLESGGGLVQPGGSLRLSCAASGFIFSSYAMSWVRQAPGKGQEWVSGVSGTGVNTYYADSVKGRFTISRDNSKNTLYLQMNSLRAEDTAVYYCASGKGWDSGSWYEDYRGQGTLVTVSSLEDKTHTCPPCPAPIKTDVITMDPKDNCSKDANDTLLLQLTNTSAYYMYLLLLLKSVVYFAIITCCLLRRTAFCCNGEKSRAKRSGSGATNFSLLKQAGDVEENPGPTSMDWIWRILFLVGAATGAHSQLQLQESGPGLVKPSETLSLTCTVSGGSISSGDYYWGWIRQPPGKGLEWIGHIYYSGATYYNPSLKSRVTISVDTSRNQFSLKLSSVTAADTAVYYCTRDDSSNWRSRGQGTLVTVSSSGGGGSGGGGSQVQLQESGGGLAQAGGSLRLSCAASGRTFSMGWFRQAPGKEREFVAAITYSGGSPYYASSVRGRFTISRDNAKNTVYLQMNSLKPEDTAVYYCAANPTYGSDWNAENWGQGTQVTVSSTRDKTHTCPPCPAEVKTDSTDHVKPKETENTKQPSKSCHKPKAIVHTEKVNMMSLTVLGLRMLFAKTVAVNFLLTAKLFFL

SEQ ID NO: 16160 - protein, 431 aa, Artificial Sequence; identical to SEQ ID NO: 15912
  Synthetic Polypeptide

SEQ ID NO: 16161 - protein, 439 aa, Artificial Sequence; identical to SEQ ID NO: 15913
  Synthetic Polypeptide

SEQ ID NO: 16162 - protein, 642 aa, Artificial Sequence
  Synthetic Polypeptide
MALPVTALLLPLALLLHAARPEVQLVESGGGSVQAGGSLRLSCTTSGRALNMYVMGWFRQAPGNEREFVAATSSSGGSTSYPDSVKGRFTISRDNAKNTVYLQMNSLKPEDTAAYRCAASPYVSTPTMNILEEYRYWGLGTQVTVSSGTGGGGSGGGGSGGGGSEFDIQMTQSPSSLSASVGDRVTITCKASDHINNWLAWYQQKPGQAPKLLIYGATTLETGVPSRFSGSGSGTDYTLTISSLQPEDFATYYCQQSWNTPWTFGQGTKLEIKRGGGGSGGGGSGGGGSQVQLQQPGAELVKPGASVKMSCKASGYAFSSYWINWMKQKPGQGLEWIGQIYPGDGDTNYNGKFKGRATLTADTSSSTAYMQLSSLTSEDSAVYFCARSITTVVGCAMDYWGQGTSVTVSSTREQKLISEEDLKIEVMYPPPYLDNEKSNGTIIHVKGKHLCPSPLFPGPSKPFWVLVVVGGVLACYSLLVTVAFIIFWVRSKRSRLLHSDYMNMTPRRPGPTRKHYQPYAPPRDFAAYRSRVKFSRSADAPAYQQGQNQLYNELNLGRREEYDVLDKRRGRDPEMGGKPRRKNPQEGLYNELQKDKMAEAYSEIGMKGERRRGKGHDGLYQGLSTATKDTYDALHMQALPPR

SEQ ID NO: 16163 - protein, 648 aa, Artificial Sequence
  Synthetic Polypeptide
MALPVTALLLPLALLLHAARPEVQLVESGGGSVQAGGSLRLSCTTSGRALNMYVMGWFRQAPGNEREFVAATSSSGGSTSYPDSVKGRFTISRDNAKNTVYLQMNSLKPEDTAAYRCAASPYVSTPTMNILEEYRYWGLGTQVTVSSGTGGGGSGGGGSGGGGSEFDIQMTQSPSSLSASVGDRVTITCKASDHINNWLAWYQQKPGQAPKLLIYGATTLETGVPSRFSGSGSGTDYTLTISSLQPEDFATYYCQQSWNTPWTFGQGTKLEIKRGGGGSGGGGSGGGGSQVQLQQPGAELVKPGASVKMSCKASGYAFSSYWINWMKQKPGQGLEWIGQIYPGDGDTNYNGKFKGRATLTADTSSSTAYMQLSSLTSEDSAVYFCARSITTVVGCAMDYWGQGTSVTVSSTREQKLISEEDLAKPTTTPAPRPPTPAPTIASQPLSLRPEACRPAAGGAVHTRGLDFACDIYIWAPLAGTCGVLLLSLVITLYCKRGRKKLLYIFKQPFMRPVQTTQEEDGCSCRFPEEEEGGCELRVKFSRSADAPAYQQGQNQLYNELNLGRREEYDVLDKRRGRDPEMGGKPRRKNPQEGLYNELQKDKMAEAYSEIGMKGERRRGKGHDGLYQGLSTATKDTYDALHMQALPPR

SEQ ID NO: 16164 - protein, 1061 aa, Artificial Sequence
  Synthetic Polypeptide
MALPVTALLLPLALLLHAARPEVQLVESGGGSVQAGGSLRLSCTTSGRALNMYVMGWFRQAPGNEREFVAATSSSGGSTSYPDSVKGRFTISRDNAKNTVYLQMNSLKPEDTAAYRCAASPYVSTPTMNILEEYRYWGLGTQVTVSSGTGGGGSGGGGSGGGGSEFDIQMTQSPSSLSASVGDRVTITCKASDHINNWLAWYQQKPGQAPKLLIYGATTLETGVPSRFSGSGSGTDYTLTISSLQPEDFATYYCQQSWNTPWTFGQGTKLEIKRGGGGSGGGGSGGGGSQVQLQQPGAELVKPGASVKMSCKASGYAFSSYWINWMKQKPGQGLEWIGQIYPGDGDTNYNGKFKGRATLTADTSSSTAYMQLSSLTSEDSAVYFCARSITTVVGCAMDYWGQGTSVTVSSTREQKLISEEDLAKPTTTPAPRPPTPAPTIASQPLSLRPEACRPAAGGAVHTRGLDFACDIYIWAPLAGTCGVLLLSLVITLYCGRARVKFSRSADAPAYQQGQNQLYNELNLGRREEYDVLDKRRGRDPEMGGKPRRKNPQEGLYNELQKDKMAEAYSEIGMKGERRRGKGHDGLYQGLSTATKDTYDALHMQALPPRSRGSGATNFSLLKQAGDVEENPGPGIHMATYEVLCEVARKLGTDDREVVLFLLNVFIPQPTLAQLIGALRALKEEGRLTFPLLAECLFRAGRRDLLRDLLHLDPRFLERHLAGTMSYFSPYQLTVLHVDGELCARDIRSLIFLSKDTIGSRSTPQTFLHWVYCMENLDLLGPTDVDALMSMLRSLSRVDLQRQVQTLMGLHLSGPSHSQHYRHTPLETDFYDYKDDDDKTSGSGEGRGSLLTCGDVEENPGPHMTEYKPTVRLATRDDVPRAVRTLAAAFADYPATRHTVDPDRHIERVTELQELFLTRVGLDIGKVWVADDGAAVAVWTTPESVEAGAVFAEIGPRMAELSGSRLAAQQQMEGLLAPHRPKEPAWFLATVGVSPDHQGKGLGSAVVLPGVEAAERAGVPAFLETSAPRNLPFYERLGFTVTADVEVPEGPRTWCMTRKPGA

SEQ ID NO: 16165 - protein, 1001 aa, Artificial Sequence
  Synthetic Polypeptide
MALPVTALLLPLALLLHAARPEVQLVESGGGSVQAGGSLRLSCTTSGRALNMYVMGWFRQAPGNEREFVAATSSSGGSTSYPDSVKGRFTISRDNAKNTVYLQMNSLKPEDTAAYRCAASPYVSTPTMNILEEYRYWGLGTQVTVSSGTGGGGSGGGGSGGGGSEFDIQMTQSPSSLSASVGDRVTITCKASDHINNWLAWYQQKPGQAPKLLIYGATTLETGVPSRFSGSGSGTDYTLTISSLQPEDFATYYCQQSWNTPWTFGQGTKLEIKRLEIQNPDPAVYQLRDSKSSDKSVCLFTDFDSQTNVSQSKDSDVYITDKCVLDMRSMDFKSNSAVAWSNKSDFACANAFNNSIIPEDTFFPSSDVPCDVKLVEKSFETDTNLNFQNLSVIGFRILLLKVAGFNLLMTLRLWSSRAKRSGSGVKQTLNFDLLKLAGDVESNPGPTSMDWIWRILFLVGAATGAHSFEQVQLQQPGAELVKPGASVKMSCKASGYAFSSYWINWMKQKPGQGLEWIGQIYPGDGDTNYNGKFKGRATLTADTSSSTAYMQLSSLTSEDSAVYFCARSITTVVGCAMDYWGQGTSVTVSSTREDLKNVFPPEVAVFEPSKAEIAHTQKATLVCLATGFYPDHVELSWWVNGKEVHSGVCTDPQPLKEQPALNDSRYCLSSRLRVSATFWQNPRNHFRCQVQFYGLSENDEWTQDRAKPVTQIVSAEAWGRADCGITSASYHQGVLSATILYEILLGKATLYAVLVSALVLMAMVKRKDSRGRAKRSGSGATNFSLLKQAGDVEENPGPSRGHMTEYKPTVRLATRDDVPRAVRTLAAAFADYPATRHTVDPDRHIERVTELQELFLTRVGLDIGKVWVADDGAAVAVWTTPESVEAGAVFAEIGPRMAELSGSRLAAQQQMEGLLAPHRPKEPAWFLATVGVSPDHQGKGLGSAVVLPGVEAAERAGVPAFLETSAPRNLPFYERLGFTVTADVEVPEGPRTWCMTRKPGA

SEQ ID NO: 16166 - protein, 1000 aa, Artificial Sequence
  Synthetic Polypeptide
MALPVTALLLPLALLLHAARPEVQLVESGGGSVQAGGSLRLSCTTSGRALNMYVMGWFRQAPGNEREFVAATSSSGGSTSYPDSVKGRFTISRDNAKNTVYLQMNSLKPEDTAAYRCAASPYVSTPTMNILEEYRYWGLGTQVTVSSGTGGGGSGGGGSGGGGSEFDIQMTQSPSSLSASVGDRVTITCKASDHINNWLAWYQQKPGQAPKLLIYGATTLETGVPSRFSGSGSGTDYTLTISSLQPEDFATYYCQQSWNTPWTFGQGTKLEIKRLEDLKNVFPPEVAVFEPSKAEIAHTQKATLVCLATGFYPDHVELSWWVNGKEVHSGVCTDPQPLKEQPALNDSRYCLSSRLRVSATFWQNPRNHFRCQVQFYGLSENDEWTQDRAKPVTQIVSAEAWGRADCGITSASYHQGVLSATILYEILLGKATLYAVLVSALVLMAMVKRKDSRGRAKRSGSGATNFSLLKQAGDVEENPGPTSMDWIWRILFLVGAATGAHSFEQVQLQQPGAELVKPGASVKMSCKASGYAFSSYWINWMKQKPGQGLEWIGQIYPGDGDTNYNGKFKGRATLTADTSSSTAYMQLSSLTSEDSAVYFCARSITTVVGCAMDYWGQGTSVTVSSTRIQNPDPAVYQLRDSKSSDKSVCLFTDFDSQTNVSQSKDSDVYITDKCVLDMRSMDFKSNSAVAWSNKSDFACANAFNNSIIPEDTFFPSSDVPCDVKLVEKSFETDTNLNFQNLSVIGFRILLLKVAGFNLLMTLRLWSSRAKRSGSGVKQTLNFDLLKLAGDVESNPGPSRGHMTEYKPTVRLATRDDVPRAVRTLAAAFADYPATRHTVDPDRHIERVTELQELFLTRVGLDIGKVWVADDGAAVAVWTTPESVEAGAVFAEIGPRMAELSGSRLAAQQQMEGLLAPHRPKEPAWFLATVGVSPDHQGKGLGSAVVLPGVEAAERAGVPAFLETSAPRNLPFYERLGFTVTADVEVPEGPRTWCMTRKPGA

SEQ ID NO: 16167 - protein, 767 aa, Artificial Sequence
  Synthetic Polypeptide
MALPVTALLLPLALLLHAARPEVQLVESGGGSVQAGGSLRLSCTTSGRALNMYVMGWFRQAPGNEREFVAATSSSGGSTSYPDSVKGRFTISRDNAKNTVYLQMNSLKPEDTAAYRCAASPYVSTPTMNILEEYRYWGLGTQVTVSSGTGGGGSGGGGSGGGGSEFDIQMTQSPSSLSASVGDRVTITCKASDHINNWLAWYQQKPGQAPKLLIYGATTLETGVPSRFSGSGSGTDYTLTISSLQPEDFATYYCQQSWNTPWTFGQGTKLEIKRLEDLKNVFPPEVAVFEPSEAEISHTQKATLVCLATGFYPDHVELSWWVNGKEVHSGVCTDPQPLKEQPALNDSRYCLSSRLRVSATFWQNPRNHFRCQVQFYGLSENDEWTQDRAKPVTQIVSAEAWGRADCGFTSESYQQGVLSATILYEILLGKATLYAVLVSALVLMAMVKRKDSRGRAKRSGSGATNFSLLKQAGDVEENPGPTSMDWIWRILFLVGAATGAHSFEQVQLQQPGAELVKPGASVKMSCKASGYAFSSYWINWMKQKPGQGLEWIGQIYPGDGDTNYNGKFKGRATLTADTSSSTAYMQLSSLTSEDSAVYFCARSITTVVGCAMDYWGQGTSVTVSSTRIQNPDPAVYQLRDSKSSDKSVCLFTDFDSQTNVSQSKDSDVYITDKCVLDMRSMDFKSNSAVAWSNKSDFACANAFNNSIIPEDTFFPSPESSCDVKLVEKSFETDTNLNFQNLSVIGFRILLLKVAGFNLLMTLRLWSS

SEQ ID NO: 16168 - protein, 992 aa, Artificial Sequence
  Synthetic Polypeptide
MALPVTALLLPLALLLHAARPEVQLVESGGGSVQAGGSLRLSCTTSGRALNMYVMGWFRQAPGNEREFVAATSSSGGSTSYPDSVKGRFTISRDNAKNTVYLQMNSLKPEDTAAYRCAASPYVSTPTMNILEEYRYWGLGTQVTVSSGTGGGGSGGGGSGGGGSEFDIQMTQSPSSLSASVGDRVTITCKASDHINNWLAWYQQKPGQAPKLLIYGATTLETGVPSRFSGSGSGTDYTLTISSLQPEDFATYYCQQSWNTPWTFGQGTKLEIKRLEDLKNVFPPEVAVFEPSEAEISHTQKATLVCLATGFYPDHVELSWWVNGKEVHSGVCTDPQPLKEQPALNDSRYCLSSRLRVSATFWQNPRNHFRCQVQFYGLSENDEWTQDRAKPVTQIVSAEAWGRADCGFTSESYQQGVLSATILYEILLGKATLYAVLVSALVLMAMVKRKDSRGRAKRSGSGATNFSLLKQAGDVEENPGPTSMDWIWRILFLVGAATGAHSFEQVQLQQPGAELVKPGASVKMSCKASGYAFSSYWINWMKQKPGQGLEWIGQIYPGDGDTNYNGKFKGRATLTADTSSSTAYMQLSSLTSEDSAVYFCARSITTVVGCAMDYWGQGTSVTVSSTRIQNPDPAVYQLRDSKSSDKSVCLFTDFDSQTNVSQSKDSDVYITDKCVLDMRSMDFKSNSAVAWSNKSDFACANAFNNSIIPEDTFFPSPESSCDVKLVEKSFETDTNLNFQNLSVIGFRILLLKVAGFNLLMTLRLWSSRAKRSGSGVKQTLNFDLLKLAGDVESNPGPSRGGIHTMATYEVLCEVARKLGTDDREVVLFLLNVFIPQPTLAQLIGALRALKEEGRLTFPLLAECLFRAGRRDLLRDLLHLDPRFLERHLAGTMSYFSPYQLTVLHVDGELCARDIRSLIFLSKDTIGSRSTPQTFLHWVYCMENLDLLGPTDVDALMSMLRSLSRVDLQRQVQTLMGLHLSGPSHSQHYRHTP

SEQ ID NO: 16169 - protein, 771 aa, Artificial Sequence
  Synthetic Polypeptide
MALPVTALLLPLALLLHAARPEVQLVESGGGSVQAGGSLRLSCTTSGRALNMYVMGWFRQAPGNEREFVAATSSSGGSTSYPDSVKGRFTISRDNAKNTVYLQMNSLKPEDTAAYRCAASPYVSTPTMNILEEYRYWGLGTQVTVSSGTGGGGSGGGGSGGGGSEFDIQMTQSPSSLSASVGDRVTITCKASDHINNWLAWYQQKPGQAPKLLIYGATTLETGVPSRFSGSGSGTDYTLTISSLQPEDFATYYCQQSWNTPWTFGQGTKLEIKRLEIQNPDPAVYQLRDSKSSDKSVCLFTDFDSQTNVSQSKDSDVYITDKCVLDMRSMDFKSNSAVAWSNKSDFACANAFNNSIIPEDTFFPSPESSCDVKLVEKSFETDTNLNFQNLSVIGFRILLLKVAGFNLLMTLRLWSSRAKRSGSGVKQTLNFDLLKLAGDVESNPGPTSMDWIWRILFLVGAATGAHSFEQVQLQQPGAELVKPGASVKMSCKASGYAFSSYWINWMKQKPGQGLEWIGQIYPGDGDTNYNGKFKGRATLTADTSSSTAYMQLSSLTSEDSAVYFCARSITTVVGCAMDYWGQGTSVTVSSTREDLKNVFPPEVAVFEPSEAEISHTQKATLVCLATGFYPDHVELSWWVNGKEVHSGVCTDPQPLKEQPALNDSRYCLSSRLRVSATFWQNPRNHFRCQVQFYGLSENDEWTQDRAKPVTQIVSAEAWGRADCGFTSESYQQGVLSATILYEILLGKATLYAVLVSALVLMAMVKRKDSRG

SEQ ID NO: 16170 - protein, 993 aa, Artificial Sequence
  Synthetic Polypeptide
MALPVTALLLPLALLLHAARPEVQLVESGGGSVQAGGSLRLSCTTSGRALNMYVMGWFRQAPGNEREFVAATSSSGGSTSYPDSVKGRFTISRDNAKNTVYLQMNSLKPEDTAAYRCAASPYVSTPTMNILEEYRYWGLGTQVTVSSGTGGGGSGGGGSGGGGSEFDIQMTQSPSSLSASVGDRVTITCKASDHINNWLAWYQQKPGQAPKLLIYGATTLETGVPSRFSGSGSGTDYTLTISSLQPEDFATYYCQQSWNTPWTFGQGTKLEIKRLEIQNPDPAVYQLRDSKSSDKSVCLFTDFDSQTNVSQSKDSDVYITDKCVLDMRSMDFKSNSAVAWSNKSDFACANAFNNSIIPEDTFFPSPESSCDVKLVEKSFETDTNLNFQNLSVIGFRILLLKVAGFNLLMTLRLWSSRAKRSGSGVKQTLNFDLLKLAGDVESNPGPTSMDWIWRILFLVGAATGAHSFEQVQLQQPGAELVKPGASVKMSCKASGYAFSSYWINWMKQKPGQGLEWIGQIYPGDGDTNYNGKFKGRATLTADTSSSTAYMQLSSLTSEDSAVYFCARSITTVVGCAMDYWGQGTSVTVSSTREDLKNVFPPEVAVFEPSEAEISHTQKATLVCLATGFYPDHVELSWWVNGKEVHSGVCTDPQPLKEQPALNDSRYCLSSRLRVSATFWQNPRNHFRCQVQFYGLSENDEWTQDRAKPVTQIVSAEAWGRADCGFTSESYQQGVLSATILYEILLGKATLYAVLVSALVLMAMVKRKDSRGRAKRSGSGATNFSLLKQAGDVEENPGPSRGGIHTMATYEVLCEVARKLGTDDREVVLFLLNVFIPQPTLAQLIGALRALKEEGRLTFPLLAECLFRAGRRDLLRDLLHLDPRFLERHLAGTMSYFSPYQLTVLHVDGELCARDIRSLIFLSKDTIGSRSTPQTFLHWVYCMENLDLLGPTDVDALMSMLRSLSRVDLQRQVQTLMGLHLSGPSHSQHYRHTP

SEQ ID NO: 16171 - protein, 1045 aa, Artificial Sequence
  Synthetic Polypeptide
MALPVTALLLPLALLLHAARPLEGKPIPNPLLGLDSTGSGEDLKNVFPPEVAVFEPSKAEIAHTQKATLVCLATGFYPDHVELSWWVNGKEVHSGVCTDPQPLKEQPALNDSRYCLSSRLRVSATFWQNPRNHFRCQVQFYGLSENDEWTQDRAKPVTQIVSAEAWGRADCGITSASYHQGVLSATILYEILLGKATLYAVLVSALVLMAMVKRKDSRGRAKRSGSGATNFSLLKQAGDVEENPGPTSMALPVTALLLPLALLLHAARPEVQLVESGGGSVQAGGSLRLSCTTSGRALNMYVMGWFRQAPGNEREFVAATSSSGGSTSYPDSVKGRFTISRDNAKNTVYLQMNSLKPEDTAAYRCAASPYVSTPTMNILEEYRYWGLGTQVTVSSGTGGGGSGGGGSGGGGSEFDIQMTQSPSSLSASVGDRVTITCKASDHINNWLAWYQQKPGQAPKLLIYGATTLETGVPSRFSGSGSGTDYTLTISSLQPEDFATYYCQQSWNTPWTFGQGTKLEIKRGGGGSGGGGSGGGGSQVQLQQPGAELVKPGASVKMSCKASGYAFSSYWINWMKQKPGQGLEWIGQIYPGDGDTNYNGKFKGRATLTADTSSSTAYMQLSSLTSEDSAVYFCARSITTVVGCAMDYWGQGTSVTVSSTREQKLISEEDGSGIQNPDPAVYQLRDSKSSDKSVCLFTDFDSQTNVSQSKDSDVYITDKCVLDMRSMDFKSNSAVAWSNKSDFACANAFNNSIIPEDTFFPSSDVPCDVKLVEKSFETDTNLNFQNLSVIGFRILLLKVAGFNLLMTLRLWSSRAKRSGSGVKQTLNFDLLKLAGDVESNPGPSRGHMTEYKPTVRLATRDDVPRAVRTLAAAFADYPATRHTVDPDRHIERVTELQELFLTRVGLDIGKVWVADDGAAVAVWTTPESVEAGAVFAEIGPRMAELSGSRLAAQQQMEGLLAPHRPKEPAWFLATVGVSPDHQGKGLGSAVVLPGVEAAERAGVPAFLETSAPRNLPFYERLGFTVTADVEVPEGPRTWCMTRKPGA

SEQ ID NO: 16172 - protein, 1046 aa, Artificial Sequence
  Synthetic Polypeptide
MALPVTALLLPLALLLHAARPLEQKLISEEDLGSGDRPDPAVYQLRDSKSSDKSVCLFTDFDSQTNVSQSKDSDVYITDKCVLDMRSMDFKSNSAVAWSNKSDFACANAFNNSIIPEDTFFPSPESSCDVKLVEKSFETDTNLNFQNLSVIGFRILLLKVAGFNLLMTLRLWSSSSRAKRSGSGVKQTLNFDLLKLAGDVESNPGPTSMALPVTALLLPLALLLHAARPEVQLVESGGGSVQAGGSLRLSCTTSGRALNMYVMGWFRQAPGNEREFVAATSSSGGSTSYPDSVKGRFTISRDNAKNTVYLQMNSLKPEDTAAYRCAASPYVSTPTMNILEEYRYWGLGTQVTVSSGTGGGGSGGGGSGGGGSEFDIQMTQSPSSLSASVGDRVTITCKASDHINNWLAWYQQKPGQAPKLLIYGATTLETGVPSRFSGSGSGTDYTLTISSLQPEDFATYYCQQSWNTPWTFGQGTKLEIKRGGGGSGGGGSGGGGSQVQLQQPGAELVKPGASVKMSCKASGYAFSSYWINWMKQKPGQGLEWIGQIYPGDGDTNYNGKFKGRATLTADTSSSTAYMQLSSLTSEDSAVYFCARSITTVVGCAMDYWGQGTSVTVSSTRGKPIPNPLLGLDSTGSGEDLKNVFPPEVAVFEPSEAEISHTQKATLVCLATGFYPDHVELSWWVNGKEVHSGVCTDPQPLKEQPALNDSRYCLSSRLRVSATFWQNPRNHFRCQVQFYGLSENDEWTQDRAKPVTQIVSAEAWGRADCGFTSESYQQGVLSATILYEILLGKATLYAVLVSALVLMAMVKRKDSRGRAKRSGSGATNFSLLKQAGDVEENPGPSRGHMTEYKPTVRLATRDDVPRAVRTLAAAFADYPATRHTVDPDRHIERVTELQELFLTRVGLDIGKVWVADDGAAVAVWTTPESVEAGAVFAEIGPRMAELSGSRLAAQQQMEGLLAPHRPKEPAWFLATVGVSPDHQGKGLGSAVVLPGVEAAERAGVPAFLETSAPRNLPFYERLGFTVTADVEVPEGPRTWCMTRKPGA

SEQ ID NO: 16173 - protein, 1000 aa, Artificial Sequence
  Synthetic Polypeptide
MALPVTALLLPLALLLHAARPEVQLVESGGGSVQAGGSLRLSCTTSGRALNMYVMGWFRQAPGNEREFVAATSSSGGSTSYPDSVKGRFTISRDNAKNTVYLQMNSLKPEDTAAYRCAASPYVSTPTMNILEEYRYWGLGTQVTVSSGTGGGGSGGGGSGGGGSEFDIQMTQSPSSLSASVGDRVTITCKASDHINNWLAWYQQKPGQAPKLLIYGATTLETGVPSRFSGSGSGTDYTLTISSLQPEDFATYYCQQSWNTPWTFGQGTKLEIKRLEDLKNVFPPEVAVFEPSEAEISHTQKATLVCLATGFYPDHVELSWWVNGKEVHSGVSTDPQPLKEQPALNDSRYCLSSRLRVSATFWQNPRNHFRCQVQFYGLSENDEWTQDRAKPVTQIVSAEAWGRADCGFTSESYQQGVLSATILYEILLGKATLYAVLVSALVLMAMVKRKDSRGRAKRSGSGATNFSLLKQAGDVEENPGPTSMDWIWRILFLVGAATGAHSFEQVQLQQPGAELVKPGASVKMSCKASGYAFSSYWINWMKQKPGQGLEWIGQIYPGDGDTNYNGKFKGRATLTADTSSSTAYMQLSSLTSEDSAVYFCARSITTVVGCAMDYWGQGTSVTVSSTRIQNPDPAVYQLRDSKSSDKSVCLFTDFDSQTNVSQSKDSDVYITDKTVLDMRSMDFKSNSAVAWSNKSDFACANAFNNSIIPEDTFFPSPESSCDVKLVEKSFETDTNLNFQNLSVIGFRILLLKVAGFNLLMTLRLWSSRAKRSGSGVKQTLNFDLLKLAGDVESNPGPSRGHMTEYKPTVRLATRDDVPRAVRTLAAAFADYPATRHTVDPDRHIERVTELQELFLTRVGLDIGKVWVADDGAAVAVWTTPESVEAGAVFAEIGPRMAELSGSRLAAQQQMEGLLAPHRPKEPAWFLATVGVSPDHQGKGLGSAVVLPGVEAAERAGVPAFLETSAPRNLPFYERLGFTVTADVEVPEGPRTWCMTRKPGA

SEQ ID NO: 16174 - protein, 1082 aa, Artificial Sequence
  Synthetic Polypeptide
MALPVTALLLPLALLLHAARPEVQLVESGGGSVQAGGSLRLSCTTSGRALNMYVMGWFRQAPGNEREFVAATSSSGGSTSYPDSVKGRFTISRDNAKNTVYLQMNSLKPEDTAAYRCAASPYVSTPTMNILEEYRYWGLGTQVTVSSGTGGGGSGGGGSGGGGSEFDIQMTQSPSSLSASVGDRVTITCKASDHINNWLAWYQQKPGQAPKLLIYGATTLETGVPSRFSGSGSGTDYTLTISSLQPEDFATYYCQQSWNTPWTFGQGTKLEIKRLEDLKNVFPPEVAVFEPSEAEISHTQKATLVCLATGFYPDHVELSWWVNGKEVHSGVSTDPQPLKEQPALNDSRYCLSSRLRVSATFWQNPRNHFRCQVQFYGLSENDEWTQDRAKPVTQIVSAEAWGRADCGFTSESYQQGVLSATILYEILLGKATLYAVLVSALVLMAMVKRKDSRGRAKRSGSGATNFSLLKQAGDVEENPGPTSMDWIWRILFLVGAATGAHSFEQVQLQQPGAELVKPGASVKMSCKASGYAFSSYWINWMKQKPGQGLEWIGQIYPGDGDTNYNGKFKGRATLTADTSSSTAYMQLSSLTSEDSAVYFCARSITTVVGCAMDYWGQGTSVTVSSTREQKLISEEDGSGTPFPSLAPPIMLLVDGKQQMVVVCLVLDVAPPGLDSPIWFSAGNGSALDAFTYGPSPATDGTWTNLAHLSLPSEELASWEPLVCHTGPGAEGHSRSTQPMHLSGEASTARTCPQEPLRGTPGGALWLGVLRLLLFKLLLFDLLLTCSCLCDPAGPLPSPATTTRLRALGSHRLHPATETGGREATSSPRPQPRDRRWGDTPPGRKPGSPVRAKRSGSGVKQTLNFDLLKLAGDVESNPGPSRGHMTEYKPTVRLATRDDVPRAVRTLAAAFADYPATRHTVDPDRHIERVTELQELFLTRVGLDIGKVWVADDGAAVAVWTTPESVEAGAVFAEIGPRMAELSGSRLAAQQQMEGLLAPHRPKEPAWFLATVGVSPDHQGKGLGSAVVLPGVEAAERAGVPAFLETSAPRNLPFYERLGFTVTADVEVPEGPRTWCMTRKPGA

SEQ ID NO: 16175 - protein, 1100 aa, Artificial Sequence
  Synthetic Polypeptide
MALPVTALLLPLALLLHAARPLEDLKNVFPPEVAVFEPSEAEISHTQKATLVCLATGFYPDHVELSWWVNGKEVHSGVSTDPQPLKEQPALNDSRYCLSSRLRVSATFWQNPRNHFRCQVQFYGLSENDEWTQDRAKPVTQIVSAEAWGRADCGFTSESYQQGVLSATILYEILLGKATLYAVLVSALVLMAMVKRKDSRGRAKRSGSGATNFSLLKQAGDVEENPGPTSMALPVTALLLPLALLLHAARPEVQLVESGGGSVQAGGSLRLSCTTSGRALNMYVMGWFRQAPGNEREFVAATSSSGGSTSYPDSVKGRFTISRDNAKNTVYLQMNSLKPEDTAAYRCAASPYVSTPTMNILEEYRYWGLGTQVTVSSGTGGGGSGGGGSGGGGSEFDIQMTQSPSSLSASVGDRVTITCKASDHINNWLAWYQQKPGQAPKLLIYGATTLETGVPSRFSGSGSGTDYTLTISSLQPEDFATYYCQQSWNTPWTFGQGTKLEIKRGGGGSGGGGSGGGGSQVQLQQPGAELVKPGASVKMSCKASGYAFSSYWINWMKQKPGQGLEWIGQIYPGDGDTNYNGKFKGRATLTADTSSSTAYMQLSSLTSEDSAVYFCARSITTVVGCAMDYWGQGTSVTVSSTREQKLISEEDLGSGTPFPSLAPPIMLLVDGKQQMVVVCLVLDVAPPGLDSPIWFSAGNGSALDAFTYGPSPATDGTWTNLAHLSLPSEELASWEPLVCHTGPGAEGHSRSTQPMHLSGEASTARTCPQEPLRGTPGGALWLGVLRLLLFKLLLFDLLLTCSCLCDPAGPLPSPATTTRLRALGSHRLHPATETGGREATSSPRPQPRDRRWGDTPPGRKPGSPVRAKRSGSGVKQTLNFDLLKLAGDVESNPGPSRSRGHMTEYKPTVRLATRDDVPRAVRTLAAAFADYPATRHTVDPDRHIERVTELQELFLTRVGLDIGKVWVADDGAAVAVWTTPESVEAGAVFAEIGPRMAELSGSRLAAQQQMEGLLAPHRPKEPAWFLATVGVSPDHQGKGLGSAVVLPGVEAAERAGVPAFLETSAPRNLPFYERLGFTVTADVEVPEGPRTWCMTRKPGA

SEQ ID NO: 16176 - protein, 1037 aa, Artificial Sequence
  Synthetic Polypeptide
MALPVTALLLPLALLLHAARPEVQLVESGGGSVQAGGSLRLSCTTSGRALNMYVMGWFRQAPGNEREFVAATSSSGGSTSYPDSVKGRFTISRDNAKNTVYLQMNSLKPEDTAAYRCAASPYVSTPTMNILEEYRYWGLGTQVTVSSGTGGGGSGGGGSGGGGSEFDIQMTQSPSSLSASVGDRVTITCKASDHINNWLAWYQQKPGQAPKLLIYGATTLETGVPSRFSGSGSGTDYTLTISSLQPEDFATYYCQQSWNTPWTFGQGTKLEIKRLEGKPIPNPLLGLDSTGSGDKQLDADVSPKPTIFLPSIAETKLQKAGTYLCLLEKFFPDVIKIHWQEKKSNTILGSQEGNTMKTNDTYMKFSWLTVPEKSLDKEHRCIVRHENNKNGVDQEIIFPPIKTDVITMDPKDNCSKDANDTLLLQLTNTSAYYMYLLLLLKSVVYFAIITCCLLRRTAFCCNGEKSRAKRSGSGATNFSLLKQAGDVEENPGPTSMDWIWRILFLVGAATGAHSFEQVQLQQPGAELVKPGASVKMSCKASGYAFSSYWINWMKQKPGQGLEWIGQIYPGDGDTNYNGKFKGRATLTADTSSSTAYMQLSSLTSEDSAVYFCARSITTVVGCAMDYWGQGTSVTVSSTREQKLISEEDGSGSQPHTKPSVFVMKNGTNVACLVKEFYPKDIRINLVSSKKITEFDPAIVISPSGKYNAVKLGKYEDSNSVTCSVQHDNKTVHSTDFEVKTDSTDHVKPKETENTKQPSKSCHKPKAIVHTEKVNMMSLTVLGLRMLFAKTVAVNFLLTAKLFFLRAKRSGSGVKQTLNFDLLKLAGDVESNPGPSRGHMTEYKPTVRLATRDDVPRAVRTLAAAFADYPATRHTVDPDRHIERVTELQELFLTRVGLDIGKVWVADDGAAVAVWTTPESVEAGAVFAEIGPRMAELSGSRLAAQQQMEGLLAPHRPKEPAWFLATVGVSPDHQGKGLGSAVVLPGVEAAERAGVPAFLETSAPRNLPFYERLGFTVTADVEVPEGPRTWCMTRKPGA

SEQ ID NO: 16177 - protein, 775 aa, Artificial Sequence
  Synthetic Polypeptide
MALPVTALLLPLALLLHAARPEVQLVESGGGSVQAGGSLRLSCTTSGRALNMYVMGWFRQAPGNEREFVAATSSSGGSTSYPDSVKGRFTISRDNAKNTVYLQMNSLKPEDTAAYRCAASPYVSTPTMNILEEYRYWGLGTQVTVSSGTGGGGSGGGGSGGGGSEFDIQMTQSPSSLSASVGDRVTITCKASDHINNWLAWYQQKPGQAPKLLIYGATTLETGVPSRFSGSGSGTDYTLTISSLQPEDFATYYCQQSWNTPWTFGQGTKLEIKRLESQPHTKPSVFVMKNGTNVACLVKEFYPKDIRINLVSSKKITEFDPAIVISPSGKYNAVKLGKYEDSNSVTCSVQHDNKTVHSTDFEVKTDSTDHVKPKETENTKQPSKSCHKPKAIVHTEKVNMMSLTVLGLRMLFAKTVAVNFLLTAKLFFLRAKRSGSGATNFSLLKQAGDVEENPGPTSMDWIWRILFLVGAATGAHSFEQVQLQQPGAELVKPGASVKMSCKASGYAFSSYWINWMKQKPGQGLEWIGQIYPGDGDTNYNGKFKGRATLTADTSSSTAYMQLSSLTSEDSAVYFCARSITTVVGCAMDYWGQGTSVTVSSTRDKQLDADVSPKPTIFLPSIAETKLQKAGTYLCLLEKFFPDVIKIHWQEKKSNTILGSQEGNTMKTNDTYMKFSWLTVPEKSLDKEHRCIVRHENNKNGVDQEIIFPPIKTDVITMDPKDNCSKDANDTLLLQLTNTSAYYMYLLLLLKSVVYFAIITCCLLRRTAFCCNGEKS

SEQ ID NO: 16178 - protein, 1052 aa, Artificial Sequence
  Synthetic Polypeptide
MALPVTALLLPLALLLHAARPLEGKPIPNPLLGLDSTGSGDKQLDADVSPKPTIFLPSIAETKLQKAGTYLCLLEKFFPDVIKIHWQEKKSNTILGSQEGNTMKTNDTYMKFSWLTVPEKSLDKEHRCIVRHENNKNGVDQEIIFPPIKTDVITMDPKDNCSKDANDTLLLQLTNTSAYYMYLLLLLKSVVYFAIITCCLLRRTAFCCNGEKSRAKRSGSGATNFSLLKQAGDVEENPGPTSMALPVTALLLPLALLLHAARPEVQLVESGGGSVQAGGSLRLSCTTSGRALNMYVMGWFRQAPGNEREFVAATSSSGGSTSYPDSVKGRFTISRDNAKNTVYLQMNSLKPEDTAAYRCAASPYVSTPTMNILEEYRYWGLGTQVTVSSGTGGGGSGGGGSGGGGSEFDIQMTQSPSSLSASVGDRVTITCKASDHINNWLAWYQQKPGQAPKLLIYGATTLETGVPSRFSGSGSGTDYTLTISSLQPEDFATYYCQQSWNTPWTFGQGTKLEIKRGGGGSGGGGSGGGGSQVQLQQPGAELVKPGASVKMSCKASGYAFSSYWINWMKQKPGQGLEWIGQIYPGDGDTNYNGKFKGRATLTADTSSSTAYMQLSSLTSEDSAVYFCARSITTVVGCAMDYWGQGTSVTVSSTREQKLISEEDGSGSQPHTKPSVFVMKNGTNVACLVKEFYPKDIRINLVSSKKITEFDPAIVISPSGKYNAVKLGKYEDSNSVTCSVQHDNKTVHSTDFEVKTDSTDHVKPKETENTKQPSKSCHKPKAIVHTEKVNMMSLTVLGLRMLFAKTVAVNFLLTAKLFFLRAKRSGSGVKQTLNFDLLKLAGDVESNPGPSRGHMTEYKPTVRLATRDDVPRAVRTLAAAFADYPATRHTVDPDRHIERVTELQELFLTRVGLDIGKVWVADDGAAVAVWTTPESVEAGAVFAEIGPRMAELSGSRLAAQQQMEGLLAPHRPKEPAWFLATVGVSPDHQGKGLGSAVVLPGVEAAERAGVPAFLETSAPRNLPFYERLGFTVTADVEVPEGPRTWCMTRKPGA

SEQ ID NO: 16179 - protein, 1177 aa, Artificial Sequence
  Synthetic Polypeptide
MALPVTALLLPLALLLHAARPEVQLVESGGGSVQAGGSLRLSCTTSGRALNMYVMGWFRQAPGNEREFVAATSSSGGSTSYPDSVKGRFTISRDNAKNTVYLQMNSLKPEDTAAYRCAASPYVSTPTMNILEEYRYWGLGTQVTVSSGTGGGGSGGGGSGGGGSEFDIQMTQSPSSLSASVGDRVTITCKASDHINNWLAWYQQKPGQAPKLLIYGATTLETGVPSRFSGSGSGTDYTLTISSLQPEDFATYYCQQSWNTPWTFGQGTKLEIKRGQPKANPTVTLFPPSSEELQANKATLVCLISDFYPGAVTVAWKADGSPVKAGVETTKPSKQSNNKYAASSYLSLTPEQWKSHRSYSCQVTHEGSTVEKTVAPTECSGSQSFGLLDPKLCYLLDGILFIYGVILTALFLRVKFSRSADAPAYQQGQNQLYNELNLGRREEYDVLDKRRGRDPEMGGKPQRRKNPQEGLYNELQKDKMAEAYSEIGMKGERRRGKGHDGLYQGLSTATKDTYDALHMQALPPRRAKRSGSGATNFSLLKQAGDVEENPGPTSMDWIWRILFLVGAATGAHSFEQVQLQQPGAELVKPGASVKMSCKASGYAFSSYWINWMKQKPGQGLEWIGQIYPGDGDTNYNGKFKGRATLTADTSSSTAYMQLSSLTSEDSAVYFCARSITTVVGCAMDYWGQGTSVTVSSASTKGPSVFPLAPSSKSTSGGTAALGCLVKDYFPEPVTVSWNSGALTSGVHTFPAVLQSSGLYSLSSVVTVPSSSLGTQTYICNVNHKPSNTKVDKRVEPKSCGTQSFGLLDPKLCYLLDGILFIYGVILTALFLRVKFSRSADAPAYQQGQNQLYNELNLGRREEYDVLDKRRGRDPEMGGKPQRRKNPQEGLYNELQKDKMAEAYSEIGMKGERRRGKGHDGLYQGLSTATKDTYDALHMQALPPRRAKRSGSGVKQTLNFDLLKLAGDVESNPGPSRGHMTEYKPTVRLATRDDVPRAVRTLAAAFADYPATRHTVDPDRHIERVTELQELFLTRVGLDIGKVWVADDGAAVAVWTTPESVEAGAVFAEIGPRMAELSGSRLAAQQQMEGLLAPHRPKEPAWFLATVGVSPDHQGKGLGSAVVLPGVEAAERAGVPAFLETSAPRNLPFYERLGFTVTADVEVPEGPRTWCMTRKPGA

SEQ ID NO: 16180 - protein, 963 aa, Artificial Sequence
  Synthetic Polypeptide
MALPVTALLLPLALLLHAARPEVQLVESGGGSVQAGGSLRLSCTTSGRALNMYVMGWFRQAPGNEREFVAATSSSGGSTSYPDSVKGRFTISRDNAKNTVYLQMNSLKPEDTAAYRCAASPYVSTPTMNILEEYRYWGLGTQVTVSSGTGGGGSGGGGSGGGGSEFDIQMTQSPSSLSASVGDRVTITCKASDHINNWLAWYQQKPGQAPKLLIYGATTLETGVPSRFSGSGSGTDYTLTISSLQPEDFATYYCQQSWNTPWTFGQGTKLEIKRLEDLKNVFPPEVAVFEPSEAEISHTQKATLVCLATGFYPDHVELSWWVNGKEVHSGVSTDPQPLKEQPALNDSRYCLSSRLRVSATFWQNPRNHFRCQVQFYGLSENDEWTQDRAKPVTQIVSAEAWGRADCGSQSFGLLDPKLCYLLDGILFIYGVILTALFLRVKFSRSADAPAYQQGQNQLYNELNLGRREEYDVLDKRRGRDPEMGGKPQRRKNPQEGLYNELQKDKMAEAYSEIGMKGERRRGKGHDGLYQGLSTATKDTYDALHMQALPPRRAKRSGSGATNFSLLKQAGDVEENPGPTSMDWIWRILFLVGAATGAHSFEQVQLQQPGAELVKPGASVKMSCKASGYAFSSYWINWMKQKPGQGLEWIGQIYPGDGDTNYNGKFKGRATLTADTSSSTAYMQLSSLTSEDSAVYFCARSITTVVGCAMDYWGQGTSVTVSSTRIQNPDPAVYQLRDSKSSDKSVCLFTDFDSQTNVSQSKDSDVYITDKTVLDMRSMDFKSNSAVAWSNKSDFACANAFNNSIIPEDTFFPSPESSCGTQSFGLLDPKLCYLLDGILFIYGVILTALFLRVKFSRSADAPAYQQGQNQLYNELNLGRREEYDVLDKRRGRDPEMGGKPQRRKNPQEGLYNELQKDKMAEAYSEIGMKGERRRGKGHDGLYQGLSTATKDTYDALHMQALPPR

SEQ ID NO: 16181 - protein, 963 aa, Artificial Sequence
  Synthetic Polypeptide
MALPVTALLLPLALLLHAARPEVQLVESGGGSVQAGGSLRLSCTTSGRALNMYVMGWFRQAPGNEREFVAATSSSGGSTSYPDSVKGRFTISRDNAKNTVYLQMNSLKPEDTAAYRCAASPYVSTPTMNILEEYRYWGLGTQVTVSSGTGGGGSGGGGSGGGGSEFDIQMTQSPSSLSASVGDRVTITCKASDHINNWLAWYQQKPGQAPKLLIYGATTLETGVPSRFSGSGSGTDYTLTISSLQPEDFATYYCQQSWNTPWTFGQGTKLEIKRLEDLKNVFPPEVAVFEPSKAEIAHTQKATLVCLATGFYPDHVELSWWVNGKEVHSGVCTDPQPLKEQPALNDSRYCLSSRLRVSATFWQNPRNHFRCQVQFYGLSENDEWTQDRAKPVTQIVSAEAWGRADCGSQSFGLLDPKLCYLLDGILFIYGVILTALFLRVKFSRSADAPAYQQGQNQLYNELNLGRREEYDVLDKRRGRDPEMGGKPQRRKNPQEGLYNELQKDKMAEAYSEIGMKGERRRGKGHDGLYQGLSTATKDTYDALHMQALPPRRAKRSGSGATNFSLLKQAGDVEENPGPTSMDWIWRILFLVGAATGAHSFEQVQLQQPGAELVKPGASVKMSCKASGYAFSSYWINWMKQKPGQGLEWIGQIYPGDGDTNYNGKFKGRATLTADTSSSTAYMQLSSLTSEDSAVYFCARSITTVVGCAMDYWGQGTSVTVSSTRIQNPDPAVYQLRDSKSSDKSVCLFTDFDSQTNVSQSKDSDVYITDKCVLDMRSMDFKSNSAVAWSNKSDFACANAFNNSIIPEDTFFPSSDVPCGTQSFGLLDPKLCYLLDGILFIYGVILTALFLRVKFSRSADAPAYQQGQNQLYNELNLGRREEYDVLDKRRGRDPEMGGKPQRRKNPQEGLYNELQKDKMAEAYSEIGMKGERRRGKGHDGLYQGLSTATKDTYDALHMQALPPR

SEQ ID NO: 16182 - protein, 1034 aa, Artificial Sequence
  Synthetic Polypeptide
MALPVTALLLPLALLLHAARPEVQLVESGGGSVQAGGSLRLSCTTSGRALNMYVMGWFRQAPGNEREFVAATSSSGGSTSYPDSVKGRFTISRDNAKNTVYLQMNSLKPEDTAAYRCAASPYVSTPTMNILEEYRYWGLGTQVTVSSGTGGGGSGGGGSGGGGSEFDIQMTQSPSSLSASVGDRVTITCKASDHINNWLAWYQQKPGQAPKLLIYGATTLETGVPSRFSGSGSGTDYTLTISSLQPEDFATYYCQQSWNTPWTFGQGTKLEIKRLEGKPIPNPLLGLDSTGSGEDLKNVFPPEVAVFEPSEAEISHTQKATLVCLATGFYPDHVELSWWVNGKEVHSGVSTDPQPLKEQPALNDSRYCLSSRLRVSATFWQNPRNHFRCQVQFYGLSENDEWTQDRAKPVTQIVSAEAWGRADCGSQSFGLLDPKLCYLLDGILFIYGVILTALFLRVKFSRSADAPAYQQGQNQLYNELNLGRREEYDVLDKRRGRDPEMGGKPQRRKNPQEGLYNELQKDKMAEAYSEIGMKGERRRGKGHDGLYQGLSTATKDTYDALHMQALPPRRAKRSGSGATNFSLLKQAGDVEENPGPTSMDWIWRILFLVGAATGAHSFEQVQLQQPGAELVKPGASVKMSCKASGYAFSSYWINWMKQKPGQGLEWIGQIYPGDGDTNYNGKFKGRATLTADTSSSTAYMQLSSLTSEDSAVYFCARSITTVVGCAMDYWGQGTSVTVSSTREQKLISEEDGSGIQNPDPAVYQLRDSKSSDKSVCLFTDFDSQTNVSQSKDSDVYITDKTVLDMRSMDFKSNSAVAWSNKSDFACANAFNNSIIPEDTFFPSPESSCGTQSFGLLDPKLCYLLDGILFIYGVILTALFLRSKRSRLLHSDYMNMTPRRPGPTRKHYQPYAPPRDFAAYRSRVKFSRSADAPAYQQGQNQLYNELNLGRREEYDVLDKRRGRDPEMGGKPQRRKNPQEGLYNELQKDKMAEAYSEIGMKGERRRGKGHDGLYQGLSTATKDTYDALHMQALPPR

SEQ ID NO: 16183 - protein, 1075 aa, Artificial Sequence
  Synthetic Polypeptide
MALPVTALLLPLALLLHAARPEVQLVESGGGSVQAGGSLRLSCTTSGRALNMYVMGWFRQAPGNEREFVAATSSSGGSTSYPDSVKGRFTISRDNAKNTVYLQMNSLKPEDTAAYRCAASPYVSTPTMNILEEYRYWGLGTQVTVSSGTGGGGSGGGGSGGGGSEFDIQMTQSPSSLSASVGDRVTITCKASDHINNWLAWYQQKPGQAPKLLIYGATTLETGVPSRFSGSGSGTDYTLTISSLQPEDFATYYCQQSWNTPWTFGQGTKLEIKRLEGKPIPNPLLGLDSTGSGEDLKNVFPPEVAVFEPSEAEISHTQKATLVCLATGFYPDHVELSWWVNGKEVHSGVSTDPQPLKEQPALNDSRYCLSSRLRVSATFWQNPRNHFRCQVQFYGLSENDEWTQDRAKPVTQIVSAEAWGRADCGSQSFGLLDPKLCYLLDGILFIYGVILTALFLRSKRSRLLHSDYMNMTPRRPGPTRKHYQPYAPPRDFAAYRSRVKFSRSADAPAYQQGQNQLYNELNLGRREEYDVLDKRRGRDPEMGGKPQRRKNPQEGLYNELQKDKMAEAYSEIGMKGERRRGKGHDGLYQGLSTATKDTYDALHMQALPPRRAKRSGSGATNFSLLKQAGDVEENPGPTSMDWIWRILFLVGAATGAHSFEQVQLQQPGAELVKPGASVKMSCKASGYAFSSYWINWMKQKPGQGLEWIGQIYPGDGDTNYNGKFKGRATLTADTSSSTAYMQLSSLTSEDSAVYFCARSITTVVGCAMDYWGQGTSVTVSSTREQKLISEEDGSGIQNPDPAVYQLRDSKSSDKSVCLFTDFDSQTNVSQSKDSDVYITDKTVLDMRSMDFKSNSAVAWSNKSDFACANAFNNSIIPEDTFFPSPESSCGTQSFGLLDPKLCYLLDGILFIYGVILTALFLRSKRSRLLHSDYMNMTPRRPGPTRKHYQPYAPPRDFAAYRSRVKFSRSADAPAYQQGQNQLYNELNLGRREEYDVLDKRRGRDPEMGGKPQRRKNPQEGLYNELQKDKMAEAYSEIGMKGERRRGKGHDGLYQGLSTATKDTYDALHMQALPPR

SEQ ID NO: 16184 - protein, 1036 aa, Artificial Sequence
  Synthetic Polypeptide
MALPVTALLLPLALLLHAARPEVQLVESGGGSVQAGGSLRLSCTTSGRALNMYVMGWFRQAPGNEREFVAATSSSGGSTSYPDSVKGRFTISRDNAKNTVYLQMNSLKPEDTAAYRCAASPYVSTPTMNILEEYRYWGLGTQVTVSSGTGGGGSGGGGSGGGGSEFDIQMTQSPSSLSASVGDRVTITCKASDHINNWLAWYQQKPGQAPKLLIYGATTLETGVPSRFSGSGSGTDYTLTISSLQPEDFATYYCQQSWNTPWTFGQGTKLEIKRLEGKPIPNPLLGLDSTGSGEDLKNVFPPEVAVFEPSEAEISHTQKATLVCLATGFYPDHVELSWWVNGKEVHSGVSTDPQPLKEQPALNDSRYCLSSRLRVSATFWQNPRNHFRCQVQFYGLSENDEWTQDRAKPVTQIVSAEAWGRADCGSQSFGLLDPKLCYLLDGILFIYGVILTALFLRVKFSRSADAPAYQQGQNQLYNELNLGRREEYDVLDKRRGRDPEMGGKPQRRKNPQEGLYNELQKDKMAEAYSEIGMKGERRRGKGHDGLYQGLSTATKDTYDALHMQALPPRRAKRSGSGATNFSLLKQAGDVEENPGPTSMDWIWRILFLVGAATGAHSFEQVQLQQPGAELVKPGASVKMSCKASGYAFSSYWINWMKQKPGQGLEWIGQIYPGDGDTNYNGKFKGRATLTADTSSSTAYMQLSSLTSEDSAVYFCARSITTVVGCAMDYWGQGTSVTVSSTREQKLISEEDLGSGIQNPDPAVYQLRDSKSSDKSVCLFTDFDSQTNVSQSKDSDVYITDKTVLDMRSMDFKSNSAVAWSNKSDFACANAFNNSIIPEDTFFPSPESSCGTQSFGLLDPKLCYLLDGILFIYGVILTALFLKRGRKKLLYIFKQPFMRPVQTTQEEDGCSCRFPEEEEGGCELRVKFSRSADAPAYQQGQNQLYNELNLGRREEYDVLDKRRGRDPEMGGKPQRRKNPQEGLYNELQKDKMAEAYSEIGMKGERRRGKGHDGLYQGLSTATKDTYDALHMQALPPR

SEQ ID NO: 16185 - protein, 1078 aa, Artificial Sequence
  Synthetic Polypeptide
MALPVTALLLPLALLLHAARPEVQLVESGGGSVQAGGSLRLSCTTSGRALNMYVMGWFRQAPGNEREFVAATSSSGGSTSYPDSVKGRFTISRDNAKNTVYLQMNSLKPEDTAAYRCAASPYVSTPTMNILEEYRYWGLGTQVTVSSGTGGGGSGGGGSGGGGSEFDIQMTQSPSSLSASVGDRVTITCKASDHINNWLAWYQQKPGQAPKLLIYGATTLETGVPSRFSGSGSGTDYTLTISSLQPEDFATYYCQQSWNTPWTFGQGTKLEIKRLEGKPIPNPLLGLDSTGSGEDLKNVFPPEVAVFEPSEAEISHTQKATLVCLATGFYPDHVELSWWVNGKEVHSGVSTDPQPLKEQPALNDSRYCLSSRLRVSATFWQNPRNHFRCQVQFYGLSENDEWTQDRAKPVTQIVSAEAWGRADCGSQSFGLLDPKLCYLLDGILFIYGVILTALFLKRGRKKLLYIFKQPFMRPVQTTQEEDGCSCRFPEEEEGGCELRVKFSRSADAPAYQQGQNQLYNELNLGRREEYDVLDKRRGRDPEMGGKPQRRKNPQEGLYNELQKDKMAEAYSEIGMKGERRRGKGHDGLYQGLSTATKDTYDALHMQALPPRRAKRSGSGATNFSLLKQAGDVEENPGPTSMDWIWRILFLVGAATGAHSFEQVQLQQPGAELVKPGASVKMSCKASGYAFSSYWINWMKQKPGQGLEWIGQIYPGDGDTNYNGKFKGRATLTADTSSSTAYMQLSSLTSEDSAVYFCARSITTVVGCAMDYWGQGTSVTVSSTREQKLISEEDLGSGIQNPDPAVYQLRDSKSSDKSVCLFTDFDSQTNVSQSKDSDVYITDKTVLDMRSMDFKSNSAVAWSNKSDFACANAFNNSIIPEDTFFPSPESSCGTQSFGLLDPKLCYLLDGILFIYGVILTALFLKRGRKKLLYIFKQPFMRPVQTTQEEDGCSCRFPEEEEGGCELRVKFSRSADAPAYQQGQNQLYNELNLGRREEYDVLDKRRGRDPEMGGKPQRRKNPQEGLYNELQKDKMAEAYSEIGMKGERRRGKGHDGLYQGLSTATKDTYDALHMQALPPR

SEQ ID NO: 16186 - protein, 968 aa, Artificial Sequence
  Synthetic Polypeptide
MALPVTALLLPLALLLHAARPEVQLVESGGGSVQAGGSLRLSCTTSGRALNMYVMGWFRQAPGNEREFVAATSSSGGSTSYPDSVKGRFTISRDNAKNTVYLQMNSLKPEDTAAYRCAASPYVSTPTMNILEEYRYWGLGTQVTVSSGTGGGGSGGGGSGGGGSEFDIQMTQSPSSLSASVGDRVTITCKASDHINNWLAWYQQKPGQAPKLLIYGATTLETGVPSRFSGSGSGTDYTLTISSLQPEDFATYYCQQSWNTPWTFGQGTKLEIKRLEQSFGLLDPKLCYLLDGILFIYGVILTALFLRVKFSRSADAPAYQQGQNQLYNELNLGRREEYDVLDKRRGRDPEMGGKPQRRKNPQEGLYNELQKDKMAEAYSEIGMKGERRRGKGHDGLYQGLSTATKDTYDALHMQALPPRRAKRSGSGATNFSLLKQAGDVEENPGPTSMDWIWRILFLVGAATGAHSFEQVQLQQPGAELVKPGASVKMSCKASGYAFSSYWINWMKQKPGQGLEWIGQIYPGDGDTNYNGKFKGRATLTADTSSSTAYMQLSSLTSEDSAVYFCARSITTVVGCAMDYWGQGTSVTVSSTRQSFGLLDPKLCYLLDGILFIYGVILTALFLRVKFSRSADAPAYQQGQNQLYNELNLGRREEYDVLDKRRGRDPEMGGKPQRRKNPQEGLYNELQKDKMAEAYSEIGMKGERRRGKGHDGLYQGLSTATKDTYDALHMQALPPRRAKRSGSGVKQTLNFDLLKLAGDVESNPGPSRGHMTEYKPTVRLATRDDVPRAVRTLAAAFADYPATRHTVDPDRHIERVTELQELFLTRVGLDIGKVWVADDGAAVAVWTTPESVEAGAVFAEIGPRMAELSGSRLAAQQQMEGLLAPHRPKEPAWFLATVGVSPDHQGKGLGSAVVLPGVEAAERAGVPAFLETSAPRNLPFYERLGFTVTADVEVPEGPRTWCMTRKPGA

SEQ ID NO: 16187 - protein, 793 aa, Artificial Sequence
  Synthetic Polypeptide
MALPVTALLLPLALLLHAARPEVQLVESGGGSVQAGGSLRLSCTTSGRALNMYVMGWFRQAPGNEREFVAATSSSGGSTSYPDSVKGRFTISRDNAKNTVYLQMNSLKPEDTAAYRCAASPYVSTPTMNILEEYRYWGLGTQVTVSSGTGGGGSGGGGSGGGGSEFDIQMTQSPSSLSASVGDRVTITCKASDHINNWLAWYQQKPGQAPKLLIYGATTLETGVPSRFSGSGSGTDYTLTISSLQPEDFATYYCQQSWNTPWTFGQGTKLEIKRLEGQPKANPTVTLFPPSSEELQANKATLVCLISDFYPGAVTVAWKADGSPVKAGVETTKPSKQSNNKYAASSYLSLTPEQWKSHRSYSCQVTHEGSTVEKTVAPTECSPIKTDVITMDPKDNCSKDANDTLLLQLTNTSAYYMYLLLLLKSVVYFAIITCCLLRRTAFCCNGEKSRAKRSGSGATNFSLLKQAGDVEENPGPTSMDWIWRILFLVGAATGAHSFEQVQLQQPGAELVKPGASVKMSCKASGYAFSSYWINWMKQKPGQGLEWIGQIYPGDGDTNYNGKFKGRATLTADTSSSTAYMQLSSLTSEDSAVYFCARSITTVVGCAMDYWGQGTSVTVSSTRASTKGPSVFPLAPSSKSTSGGTAALGCLVKDYFPEPVTVSWNSGALTSGVHTFPAVLQSSGLYSLSSVVTVPSSSLGTQTYICNVNHKPSNTKVDKRVEPKSCEVKTDSTDHVKPKETENTKQPSKSCHKPKAIVHTEKVNMMSLTVLGLRMLFAKTVAVNFLLTAKLFFL

SEQ ID NO: 16188 - protein, 771 aa, Artificial Sequence
  Synthetic Polypeptide
MALPVTALLLPLALLLHAARPEVQLVESGGGSVQAGGSLRLSCTTSGRALNMYVMGWFRQAPGNEREFVAATSSSGGSTSYPDSVKGRFTISRDNAKNTVYLQMNSLKPEDTAAYRCAASPYVSTPTMNILEEYRYWGLGTQVTVSSGTGGGGSGGGGSGGGGSEFDIQMTQSPSSLSASVGDRVTITCKASDHINNWLAWYQQKPGQAPKLLIYGATTLETGVPSRFSGSGSGTDYTLTISSLQPEDFATYYCQQSWNTPWTFGQGTKLEIKRLEGQPKANPTVTLFPPSSEELQANKATLVCLISDFYPGAVTVAWKADGSPVKAGVETTKPSKQSNNKYAASSYLSLTPEQWKSHRSYSCQVTHEGSTVEKTVAPTECSGRADCGITSASYHQGVLSATILYEILLGKATLYAVLVSALVLMAMVKRKDSRGRAKRSGSGATNFSLLKQAGDVEENPGPTSMDWIWRILFLVGAATGAHSFEQVQLQQPGAELVKPGASVKMSCKASGYAFSSYWINWMKQKPGQGLEWIGQIYPGDGDTNYNGKFKGRATLTADTSSSTAYMQLSSLTSEDSAVYFCARSITTVVGCAMDYWGQGTSVTVSSTRASTKGPSVFPLAPSSKSTSGGTAALGCLVKDYFPEPVTVSWNSGALTSGVHTFPAVLQSSGLYSLSSVVTVPSSSLGTQTYICNVNHKPSNTKVDKRVEPKSCIPEDTFFPSSDVPCDVKLVEKSFETDTNLNFQNLSVIGFRILLLKVAGFNLLMTLRLWSS

SEQ ID NO: 16189 - protein, 771 aa, Artificial Sequence
  Synthetic Polypeptide
MALPVTALLLPLALLLHAARPEVQLVESGGGSVQAGGSLRLSCTTSGRALNMYVMGWFRQAPGNEREFVAATSSSGGSTSYPDSVKGRFTISRDNAKNTVYLQMNSLKPEDTAAYRCAASPYVSTPTMNILEEYRYWGLGTQVTVSSGTGGGGSGGGGSGGGGSEFDIQMTQSPSSLSASVGDRVTITCKASDHINNWLAWYQQKPGQAPKLLIYGATTLETGVPSRFSGSGSGTDYTLTISSLQPEDFATYYCQQSWNTPWTFGQGTKLEIKRLEGQPKANPTVTLFPPSSEELQANKATLVCLISDFYPGAVTVAWKADGSPVKAGVETTKPSKQSNNKYAASSYLSLTPEQWKSHRSYSCQVTHEGSTVEKTVAPTECSGRADCGFTSESYQQGVLSATILYEILLGKATLYAVLVSALVLMAMVKRKDSRGRAKRSGSGATNFSLLKQAGDVEENPGPTSMDWIWRILFLVGAATGAHSFEQVQLQQPGAELVKPGASVKMSCKASGYAFSSYWINWMKQKPGQGLEWIGQIYPGDGDTNYNGKFKGRATLTADTSSSTAYMQLSSLTSEDSAVYFCARSITTVVGCAMDYWGQGTSVTVSSTRASTKGPSVFPLAPSSKSTSGGTAALGCLVKDYFPEPVTVSWNSGALTSGVHTFPAVLQSSGLYSLSSVVTVPSSSLGTQTYICNVNHKPSNTKVDKRVEPKSCIPEDTFFPSPESSCDVKLVEKSFETDTNLNFQNLSVIGFRILLLKVAGFNLLMTLRLWSS

SEQ ID NO: 16190 - protein, 597 aa, Artificial Sequence
  Synthetic Polypeptide
MALPVTALLLPLALLLHAARPEVQLVESGGGSVQAGGSLRLSCTTSGRALNMYVMGWFRQAPGNEREFVAATSSSGGSTSYPDSVKGRFTISRDNAKNTVYLQMNSLKPEDTAAYRCAASPYVSTPTMNILEEYRYWGLGTQVTVSSGTGGGGSGGGGSGGGGSEFDIQMTQSPSSLSASVGDRVTITCKASDHINNWLAWYQQKPGQAPKLLIYGATTLETGVPSRFSGSGSGTDYTLTISSLQPEDFATYYCQQSWNTPWTFGQGTKLEIKRGGGGSGGGGSGGGGSQVQLQQPGAELVKPGASVKMSCKASGYAFSSYWINWMKQKPGQGLEWIGQIYPGDGDTNYNGKFKGRATLTADTSSSTAYMQLSSLTSEDSAVYFCARSITTVVGCAMDYWGQGTSVTVSSTRDGNEEMGGITQTPYKVSISGTTVILTCPQYPGSEILWQHNDKNIGGDEDDKNIGSDEDHLSLKEFSELEQSGYYVCYPRGSKPEDANFYLYLRARVCENCMEMDVMSVATIVIVDICITGGLLLLVYYWSKNRKAKAKPVTRGAGAGGRQRGQNKERPPPVPNPDYEPIRKGQRDLYSGLNQRRI

SEQ ID NO: 16191 - protein, 562 aa, Artificial Sequence
  Synthetic Polypeptide
MALPVTALLLPLALLLHAARPEVQLVESGGGSVQAGGSLRLSCTTSGRALNMYVMGWFRQAPGNEREFVAATSSSGGSTSYPDSVKGRFTISRDNAKNTVYLQMNSLKPEDTAAYRCAASPYVSTPTMNILEEYRYWGLGTQVTVSSGTGGGGSGGGGSGGGGSEFDIQMTQSPSSLSASVGDRVTITCKASDHINNWLAWYQQKPGQAPKLLIYGATTLETGVPSRFSGSGSGTDYTLTISSLQPEDFATYYCQQSWNTPWTFGQGTKLEIKRGGGGSGGGGSGGGGSQVQLQQPGAELVKPGASVKMSCKASGYAFSSYWINWMKQKPGQGLEWIGQIYPGDGDTNYNGKFKGRATLTADTSSSTAYMQLSSLTSEDSAVYFCARSITTVVGCAMDYWGQGTSVTVSSTRFKIPIEELEDRVFVNCNTSITWVEGTVGTLLSDITRLDLGKRILDPRGIYRCNGTDIYKDKESTVQVHYRMCQSCVELDPATVAGIIVTDVIATLLLALGVFCFAGHETGRLSGAADTQALLRNDQVYQPLRDRDDAQYSHLGGNWARNK

SEQ ID NO: 16192 - protein, 572 aa, Artificial Sequence
  Synthetic Polypeptide
MALPVTALLLPLALLLHAARPEVQLVESGGGSVQAGGSLRLSCTTSGRALNMYVMGWFRQAPGNEREFVAATSSSGGSTSYPDSVKGRFTISRDNAKNTVYLQMNSLKPEDTAAYRCAASPYVSTPTMNILEEYRYWGLGTQVTVSSGTGGGGSGGGGSGGGGSEFDIQMTQSPSSLSASVGDRVTITCKASDHINNWLAWYQQKPGQAPKLLIYGATTLETGVPSRFSGSGSGTDYTLTISSLQPEDFATYYCQQSWNTPWTFGQGTKLEIKRGGGGSGGGGSGGGGSQVQLQQPGAELVKPGASVKMSCKASGYAFSSYWINWMKQKPGQGLEWIGQIYPGDGDTNYNGKFKGRATLTADTSSSTAYMQLSSLTSEDSAVYFCARSITTVVGCAMDYWGQGTSVTVSSTRQSIKGNHLVKVYDYQEDGSVLLTCDAEAKNITWFKDGKMIGFLTEDKKKWNLGSNAKDPRGMYQCKGSQNKSKPLQVYYRMCQNCIELNAATISGFLFAEIVSIFVLAVGVYFIAGQDGVRQSRASDKQTLLPNDQLYQPLKDREDDQYSHLQGNQLRRN

SEQ ID NO: 16193 - protein, 555 aa, Artificial Sequence
  Synthetic Polypeptide
MALPVTALLLPLALLLHAARPEVQLVESGGGSVQAGGSLRLSCTTSGRALNMYVMGWFRQAPGNEREFVAATSSSGGSTSYPDSVKGRFTISRDNAKNTVYLQMNSLKPEDTAAYRCAASPYVSTPTMNILEEYRYWGLGTQVTVSSGTGGGGSGGGGSGGGGSEFDIQMTQSPSSLSASVGDRVTITCKASDHINNWLAWYQQKPGQAPKLLIYGATTLETGVPSRFSGSGSGTDYTLTISSLQPEDFATYYCQQSWNTPWTFGQGTKLEIKRGGGGSGGGGSGGGGSQVQLQQPGAELVKPGASVKMSCKASGYAFSSYWINWMKQKPGQGLEWIGQIYPGDGDTNYNGKFKGRATLTADTSSSTAYMQLSSLTSEDSAVYFCARSITTVVGCAMDYWGQGTSVTVSSTRQSFGLLDPKLCYLLDGILFIYGVILTALFLRVKFSRSADAPAYQQGQNQLYNELNLGRREEYDVLDKRRGRDPEMGGKPQRRKNPQEGLYNELQKDKMAEAYSEIGMKGERRRGKGHDGLYQGLSTATKDTYDALHMQALPPR

SEQ ID NO: 16194 - protein, 788 aa, Artificial Sequence
  Synthetic Polypeptide
MALPVTALLLPLALLLHAARPEVQLVESGGGSVQAGGSLRLSCTTSGRALNMYVMGWFRQAPGNEREFVAATSSSGGSTSYPDSVKGRFTISRDNAKNTVYLQMNSLKPEDTAAYRCAASPYVSTPTMNILEEYRYWGLGTQVTVSSGTGGGGSGGGGSGGGGSEFDIQMTQSPSSLSASVGDRVTITCKASDHINNWLAWYQQKPGQAPKLLIYGATTLETGVPSRFSGSGSGTDYTLTISSLQPEDFATYYCQQSWNTPWTFGQGTKLEIKRGGGGSGGGGSGGGGSQVQLQQPGAELVKPGASVKMSCKASGYAFSSYWINWMKQKPGQGLEWIGQIYPGDGDTNYNGKFKGRATLTADTSSSTAYMQLSSLTSEDSAVYFCARSITTVVGCAMDYWGQGTSVTVSSTRGSGIQNPDPAVYQLRDSKSSDKSVCLFTDFDSQTNVSQSKDSDVYITDKTVLDMRSMDFKSNSAVAWSNKSDFACANAFNNSIIPEDTFFPSPESSCDVKLVEKSFETDTNLNFQNLSVIGFRILLLKVAGFNLLMTLRLWSSRAKRSGSGVKQTLNFDLLKLAGDVESNPGPSRGHMTEYKPTVRLATRDDVPRAVRTLAAAFADYPATRHTVDPDRHIERVTELQELFLTRVGLDIGKVWVADDGAAVAVWTTPESVEAGAVFAEIGPRMAELSGSRLAAQQQMEGLLAPHRPKEPAWFLATVGVSPDHQGKGLGSAVVLPGVEAAERAGVPAFLETSAPRNLPFYERLGFTVTADVEVPEGPRTWCMTRKPGA

SEQ ID NO: 16195 - protein, 820 aa, Artificial Sequence
  Synthetic Polypeptide
MALPVTALLLPLALLLHAARPEVQLVESGGGSVQAGGSLRLSCTTSGRALNMYVMGWFRQAPGNEREFVAATSSSGGSTSYPDSVKGRFTISRDNAKNTVYLQMNSLKPEDTAAYRCAASPYVSTPTMNILEEYRYWGLGTQVTVSSGTGGGGSGGGGSGGGGSEFDIQMTQSPSSLSASVGDRVTITCKASDHINNWLAWYQQKPGQAPKLLIYGATTLETGVPSRFSGSGSGTDYTLTISSLQPEDFATYYCQQSWNTPWTFGQGTKLEIKRGGGGSGGGGSGGGGSQVQLQQPGAELVKPGASVKMSCKASGYAFSSYWINWMKQKPGQGLEWIGQIYPGDGDTNYNGKFKGRATLTADTSSSTAYMQLSSLTSEDSAVYFCARSITTVVGCAMDYWGQGTSVTVSSLEDLKNVFPPEVAVFEPSEAEISHTQKATLVCLATGFYPDHVELSWWVNGKEVHSGVSTDPQPLKEQPALNDSRYCLSSRLRVSATFWQNPRNHFRCQVQFYGLSENDEWTQDRAKPVTQIVSAEAWGRADCGFTSESYQQGVLSATILYEILLGKATLYAVLVSALVLMAMVKRKDSRGRAKRSGSGATNFSLLKQAGDVEENPGPTRGHMTEYKPTVRLATRDDVPRAVRTLAAAFADYPATRHTVDPDRHIERVTELQELFLTRVGLDIGKVWVADDGAAVAVWTTPESVEAGAVFAEIGPRMAELSGSRLAAQQQMEGLLAPHRPKEPAWFLATVGVSPDHQGKGLGSAVVLPGVEAAERAGVPAFLETSAPRNLPFYERLGFTVTADVEVPEGPRTWCMTRKPGA

SEQ ID NO: 16196 - protein, 870 aa, Artificial Sequence
  Synthetic Polypeptide
MALPVTALLLPLALLLHAARPEVQLVESGGGSVQAGGSLRLSCTTSGRALNMYVMGWFRQAPGNEREFVAATSSSGGSTSYPDSVKGRFTISRDNAKNTVYLQMNSLKPEDTAAYRCAASPYVSTPTMNILEEYRYWGLGTQVTVSSGTGGGGSGGGGSGGGGSEFDIQMTQSPSSLSASVGDRVTITCKASDHINNWLAWYQQKPGQAPKLLIYGATTLETGVPSRFSGSGSGTDYTLTISSLQPEDFATYYCQQSWNTPWTFGQGTKLEIKRGGGGSGGGGSGGGGSQVQLQQPGAELVKPGASVKMSCKASGYAFSSYWINWMKQKPGQGLEWIGQIYPGDGDTNYNGKFKGRATLTADTSSSTAYMQLSSLTSEDSAVYFCARSITTVVGCAMDYWGQGTSVTVSSTREQKLISEEDLGSGTPFPSLAPPIMLLVDGKQQMVVVCLVLDVAPPGLDSPIWFSAGNGSALDAFTYGPSPATDGTWTNLAHLSLPSEELASWEPLVCHTGPGAEGHSRSTQPMHLSGEASTARTCPQEPLRGTPGGALWLGVLRLLLFKLLLFDLLLTCSCLCDPAGPLPSPATTTRLRALGSHRLHPATETGGREATSSPRPQPRDRRWGDTPPGRKPGSPVRAKRSGSGVKQTLNFDLLKLAGDVESNPGPSRSRGHMTEYKPTVRLATRDDVPRAVRTLAAAFADYPATRHTVDPDRHIERVTELQELFLTRVGLDIGKVWVADDGAAVAVWTTPESVEAGAVFAEIGPRMAELSGSRLAAQQQMEGLLAPHRPKEPAWFLATVGVSPDHQGKGLGSAVVLPGVEAAERAGVPAFLETSAPRNLPFYERLGFTVTADVEVPEGPRTWCMTRKPGA

SEQ ID NO: 16197 - protein, 684 aa, Artificial Sequence
  Synthetic Polypeptide
MALPVTALLLPLALLLHAARPEVQLVESGGGSVQAGGSLRLSCTTSGRALNMYVMGWFRQAPGNEREFVAATSSSGGSTSYPDSVKGRFTISRDNAKNTVYLQMNSLKPEDTAAYRCAASPYVSTPTMNILEEYRYWGLGTQVTVSSGTGGGGSGGGGSGGGGSEFDIQMTQSPSSLSASVGDRVTITCKASDHINNWLAWYQQKPGQAPKLLIYGATTLETGVPSRFSGSGSGTDYTLTISSLQPEDFATYYCQQSWNTPWTFGQGTKLEIKRLEDLKNVFPPEVAVFEPSEAEISHTQKATLVCLATGFYPDHVELSWWVNGKEVHSGVSTDPQPLKEQPALNDSRYCLSSRLRVSATFWQNPRNHFRCQVQFYGLSENDEWTQDRAKPVTQIVSAEAWGRADCGFTSESYQQGVLSATILYEILLGKATLYAVLVSALVLMAMVKRKDSRGRAKRSGSGATNFSLLKQAGDVEENPGPTRGHMTEYKPTVRLATRDDVPRAVRTLAAAFADYPATRHTVDPDRHIERVTELQELFLTRVGLDIGKVWVADDGAAVAVWTTPESVEAGAVFAEIGPRMAELSGSRLAAQQQMEGLLAPHRPKEPAWFLATVGVSPDHQGKGLGSAVVLPGVEAAERAGVPAFLETSAPRNLPFYERLGFTVTADVEVPEGPRTWCMTRKPGA

SEQ ID NO: 16198 - protein, 454 aa, Artificial Sequence
  Synthetic Polypeptide
MALPVTALLLPLALLLHAARPEVQLVESGGGSVQAGGSLRLSCTTSGRALNMYVMGWFRQAPGNEREFVAATSSSGGSTSYPDSVKGRFTISRDNAKNTVYLQMNSLKPEDTAAYRCAASPYVSTPTMNILEEYRYWGLGTQVTVSSGTGGGGSGGGGSGGGGSEFDIQMTQSPSSLSASVGDRVTITCKASDHINNWLAWYQQKPGQAPKLLIYGATTLETGVPSRFSGSGSGTDYTLTISSLQPEDFATYYCQQSWNTPWTFGQGTKLEIKRLEDLKNVFPPEVAVFEPSEAEISHTQKATLVCLATGFYPDHVELSWWVNGKEVHSGVSTDPQPLKEQPALNDSRYCLSSRLRVSATFWQNPRNHFRCQVQFYGLSENDEWTQDRAKPVTQIVSAEAWGRADCGFTSESYQQGVLSATILYEILLGKATLYAVLVSALVLMAMVKRKDSRG

SEQ ID NO: 16199 - protein, 702 aa, Artificial Sequence
  Synthetic Polypeptide
MALPVTALLLPLALLLHAARPEVQLVESGGGSVQAGGSLRLSCTTSGRALNMYVMGWFRQAPGNEREFVAATSSSGGSTSYPDSVKGRFTISRDNAKNTVYLQMNSLKPEDTAAYRCAASPYVSTPTMNILEEYRYWGLGTQVTVSSGTGGGGSGGGGSGGGGSEFDIQMTQSPSSLSASVGDRVTITCKASDHINNWLAWYQQKPGQAPKLLIYGATTLETGVPSRFSGSGSGTDYTLTISSLQPEDFATYYCQQSWNTPWTFGQGTKLEIKRLEGKPIPNPLLGLDSTGSGEDLKNVFPPEVAVFEPSEAEISHTQKATLVCLATGFYPDHVELSWWVNGKEVHSGVCTDPQPLKEQPALNDSRYCLSSRLRVSATFWQNPRNHFRCQVQFYGLSENDEWTQDRAKPVTQIVSAEAWGRADCGFTSESYQQGVLSATILYEILLGKATLYAVLVSALVLMAMVKRKDSRGRAKRSGSGATNFSLLKQAGDVEENPGPTRGHMTEYKPTVRLATRDDVPRAVRTLAAAFADYPATRHTVDPDRHIERVTELQELFLTRVGLDIGKVWVADDGAAVAVWTTPESVEAGAVFAEIGPRMAELSGSRLAAQQQMEGLLAPHRPKEPAWFLATVGVSPDHQGKGLGSAVVLPGVEAAERAGVPAFLETSAPRNLPFYERLGFTVTADVEVPEGPRTWCMTRKPGA

SEQ ID NO: 16200 - protein, 472 aa, Artificial Sequence
  Synthetic Polypeptide
MALPVTALLLPLALLLHAARPEVQLVESGGGSVQAGGSLRLSCTTSGRALNMYVMGWFRQAPGNEREFVAATSSSGGSTSYPDSVKGRFTISRDNAKNTVYLQMNSLKPEDTAAYRCAASPYVSTPTMNILEEYRYWGLGTQVTVSSGTGGGGSGGGGSGGGGSEFDIQMTQSPSSLSASVGDRVTITCKASDHINNWLAWYQQKPGQAPKLLIYGATTLETGVPSRFSGSGSGTDYTLTISSLQPEDFATYYCQQSWNTPWTFGQGTKLEIKRLEGKPIPNPLLGLDSTGSGEDLKNVFPPEVAVFEPSEAEISHTQKATLVCLATGFYPDHVELSWWVNGKEVHSGVCTDPQPLKEQPALNDSRYCLSSRLRVSATFWQNPRNHFRCQVQFYGLSENDEWTQDRAKPVTQIVSAEAWGRADCGFTSESYQQGVLSATILYEILLGKATLYAVLVSALVLMAMVKRKDSRG

SEQ ID NO: 16201 - protein, 788 aa, Artificial Sequence
  Synthetic Polypeptide
MALPVTALLLPLALLLHAARPEVQLVESGGGSVQAGGSLRLSCTTSGRALNMYVMGWFRQAPGNEREFVAATSSSGGSTSYPDSVKGRFTISRDNAKNTVYLQMNSLKPEDTAAYRCAASPYVSTPTMNILEEYRYWGLGTQVTVSSGTGGGGSGGGGSGGGGSEFDIQMTQSPSSLSASVGDRVTITCKASDHINNWLAWYQQKPGQAPKLLIYGATTLETGVPSRFSGSGSGTDYTLTISSLQPEDFATYYCQQSWNTPWTFGQGTKLEIKRGGGGSGGGGSGGGGSQVQLQQPGAELVKPGASVKMSCKASGYAFSSYWINWMKQKPGQGLEWIGQIYPGDGDTNYNGKFKGRATLTADTSSSTAYMQLSSLTSEDSAVYFCARSITTVVGCAMDYWGQGTSVTVSSTRGSGIQNPDPAVYQLRDSKSSDKSVCLFTDFDSQTNVSQSKDSDVYITDKTVLDMRSMDFKSNSAVAWSNKSDFACANAFNNSIIPEDTFFPSSDVPCDVKLVEKSFETDTNLNFQNLSVIGFRILLLKVAGFNLLMTLRLWSSRAKRSGSGVKQTLNFDLLKLAGDVESNPGPSRGHMTEYKPTVRLATRDDVPRAVRTLAAAFADYPATRHTVDPDRHIERVTELQELFLTRVGLDIGKVWVADDGAAVAVWTTPESVEAGAVFAEIGPRMAELSGSRLAAQQQMEGLLAPHRPKEPAWFLATVGVSPDHQGKGLGSAVVLPGVEAAERAGVPAFLETSAPRNLPFYERLGFTVTADVEVPEGPRTWCMTRKPGA

SEQ ID NO: 16202 - protein, 820 aa, Artificial Sequence
  Synthetic Polypeptide
MALPVTALLLPLALLLHAARPEVQLVESGGGSVQAGGSLRLSCTTSGRALNMYVMGWFRQAPGNEREFVAATSSSGGSTSYPDSVKGRFTISRDNAKNTVYLQMNSLKPEDTAAYRCAASPYVSTPTMNILEEYRYWGLGTQVTVSSGTGGGGSGGGGSGGGGSEFDIQMTQSPSSLSASVGDRVTITCKASDHINNWLAWYQQKPGQAPKLLIYGATTLETGVPSRFSGSGSGTDYTLTISSLQPEDFATYYCQQSWNTPWTFGQGTKLEIKRGGGGSGGGGSGGGGSQVQLQQPGAELVKPGASVKMSCKASGYAFSSYWINWMKQKPGQGLEWIGQIYPGDGDTNYNGKFKGRATLTADTSSSTAYMQLSSLTSEDSAVYFCARSITTVVGCAMDYWGQGTSVTVSSLEDLKNVFPPEVAVFEPSKAEIAHTQKATLVCLATGFYPDHVELSWWVNGKEVHSGVSTDPQPLKEQPALNDSRYCLSSRLRVSATFWQNPRNHFRCQVQFYGLSENDEWTQDRAKPVTQIVSAEAWGRADCGITSASYHQGVLSATILYEILLGKATLYAVLVSALVLMAMVKRKDSRGRAKRSGSGATNFSLLKQAGDVEENPGPTRGHMTEYKPTVRLATRDDVPRAVRTLAAAFADYPATRHTVDPDRHIERVTELQELFLTRVGLDIGKVWVADDGAAVAVWTTPESVEAGAVFAEIGPRMAELSGSRLAAQQQMEGLLAPHRPKEPAWFLATVGVSPDHQGKGLGSAVVLPGVEAAERAGVPAFLETSAPRNLPFYERLGFTVTADVEVPEGPRTWCMTRKPGA

SEQ ID NO: 16203 - protein, 640 aa, Artificial Sequence; identical to SEQ ID NO: 14777
  Synthetic Polypeptide

SEQ ID NO: 16204 - protein, 993 aa, Artificial Sequence; identical to SEQ ID NO: 14778
  Synthetic Polypeptide

SEQ ID NO: 16205 - protein, 992 aa, Artificial Sequence; identical to SEQ ID NO: 14779
  Synthetic Polypeptide

SEQ ID NO: 16206 - protein, 992 aa, Artificial Sequence; identical to SEQ ID NO: 14780
  Synthetic Polypeptide

SEQ ID NO: 16207 - protein, 759 aa, Artificial Sequence; identical to SEQ ID NO: 14781
  Synthetic Polypeptide

SEQ ID NO: 16208 - protein, 984 aa, Artificial Sequence; identical to SEQ ID NO: 14782
  Synthetic Polypeptide

SEQ ID NO: 16209 - protein, 763 aa, Artificial Sequence; identical to SEQ ID NO: 14783
  Synthetic Polypeptide

SEQ ID NO: 16210 - protein, 985 aa, Artificial Sequence; identical to SEQ ID NO: 14784
  Synthetic Polypeptide

SEQ ID NO: 16211 - protein, 992 aa, Artificial Sequence; identical to SEQ ID NO: 14785
  Synthetic Polypeptide

SEQ ID NO: 16212 - protein, 1074 aa, Artificial Sequence; identical to SEQ ID NO: 14786
  Synthetic Polypeptide

SEQ ID NO: 16213 - protein, 1029 aa, Artificial Sequence; identical to SEQ ID NO: 14787
  Synthetic Polypeptide

SEQ ID NO: 16214 - protein, 767 aa, Artificial Sequence; identical to SEQ ID NO: 14788
  Synthetic Polypeptide

SEQ ID NO: 16215 - protein, 1169 aa, Artificial Sequence; identical to SEQ ID NO: 14789
  Synthetic Polypeptide

SEQ ID NO: 16216 - protein, 955 aa, Artificial Sequence; identical to SEQ ID NO: 14790
  Synthetic Polypeptide

SEQ ID NO: 16217 - protein, 955 aa, Artificial Sequence; identical to SEQ ID NO: 14791
  Synthetic Polypeptide

SEQ ID NO: 16218 - protein, 1026 aa, Artificial Sequence; identical to SEQ ID NO: 14792
  Synthetic Polypeptide

SEQ ID NO: 16219 - protein, 1067 aa, Artificial Sequence; identical to SEQ ID NO: 14793
  Synthetic Polypeptide

SEQ ID NO: 16220 - protein, 1028 aa, Artificial Sequence; identical to SEQ ID NO: 14794
  Synthetic Polypeptide

SEQ ID NO: 16221 - protein, 1070 aa, Artificial Sequence; identical to SEQ ID NO: 14795
  Synthetic Polypeptide

SEQ ID NO: 16222 - protein, 960 aa, Artificial Sequence; identical to SEQ ID NO: 14796
  Synthetic Polypeptide

SEQ ID NO: 16223 - protein, 785 aa, Artificial Sequence; identical to SEQ ID NO: 14797
  Synthetic Polypeptide

SEQ ID NO: 16224 - protein, 763 aa, Artificial Sequence; identical to SEQ ID NO: 14798
  Synthetic Polypeptide

SEQ ID NO: 16225 - protein, 763 aa, Artificial Sequence; identical to SEQ ID NO: 14799
  Synthetic Polypeptide

SEQ ID NO: 16226 - protein, 593 aa, Artificial Sequence; identical to SEQ ID NO: 14800
  Synthetic Polypeptide

SEQ ID NO: 16227 - protein, 558 aa, Artificial Sequence; identical to SEQ ID NO: 14801
  Synthetic Polypeptide

SEQ ID NO: 16228 - protein, 568 aa, Artificial Sequence; identical to SEQ ID NO: 14802
  Synthetic Polypeptide

SEQ ID NO: 16229 - protein, 551 aa, Artificial Sequence; identical to SEQ ID NO: 14803
  Synthetic Polypeptide

SEQ ID NO: 16230 - protein, 587 aa, Artificial Sequence; identical to SEQ ID NO: 14804
  Synthetic Polypeptide

SEQ ID NO: 16231 - protein, 421 aa, Artificial Sequence; identical to SEQ ID NO: 14805
  Synthetic Polypeptide

SEQ ID NO: 16232 - protein, 599 aa, Artificial Sequence; identical to SEQ ID NO: 14806
  Synthetic Polypeptide

SEQ ID NO: 16233 - protein, 433 aa, Artificial Sequence; identical to SEQ ID NO: 14807
  Synthetic Polypeptide

SEQ ID NO: 16234 - protein, 1138 aa, Artificial Sequence
  Synthetic Polypeptide
MALPVTALLLPLALLLHAARPEVQLVESGGGSVQAGGSLRLSCTTSGRALNMYVMGWFRQAPGNEREFVAATSSSGGSTSYPDSVKGRFTISRDNAKNTVYLQMNSLKPEDTAAYRCAASPYVSTPTMNILEEYRYWGLGTQVTVSSGTGGGGSGGGGSGGGGSEFDIQMTQSPSSLSASVGDRVTITCKASDHINNWLAWYQQKPGQAPKLLIYGATTLETGVPSRFSGSGSGTDYTLTISSLQPEDFATYYCQQSWNTPWTFGQGTKLEIKRLEIQNPDPAVYQLRDSKSSDKSVCLFTDFDSQTNVSQSKDSDVYITDKCVLDMRSMDFKSNSAVAWSNKSDFACANAFNNSIIPEDTFFPSSDVPCDVKLVEKSFETDTNLNFQNLSVIGFRILLLKVAGFNLLMTLRLWSSRAKRSGSGVKQTLNFDLLKLAGDVESNPGPTSMDWIWRILFLVGAATGAHSGPQVQLQESGGGLAQAGGSLRLSCAASGRTFSMGWFRQAPGKEREFVAAITYSGGSPYYASSVRGRFTISRDNAKNTVYLQMNSLKPEDTAVYYCAANPTYGSDWNAENWGQGTQVTVSSGSGGGGSGGGGSGGGGSFEQVQLQQPGAELVKPGASVKMSCKASGYAFSSYWINWMKQKPGQGLEWIGQIYPGDGDTNYNGKFKGRATLTADTSSSTAYMQLSSLTSEDSAVYFCARSITTVVGCAMDYWGQGTSVTVSSTREDLKNVFPPEVAVFEPSKAEIAHTQKATLVCLATGFYPDHVELSWWVNGKEVHSGVCTDPQPLKEQPALNDSRYCLSSRLRVSATFWQNPRNHFRCQVQFYGLSENDEWTQDRAKPVTQIVSAEAWGRADCGITSASYHQGVLSATILYEILLGKATLYAVLVSALVLMAMVKRKDSRGRAKRSGSGATNFSLLKQAGDVEENPGPSRGHMTEYKPTVRLATRDDVPRAVRTLAAAFADYPATRHTVDPDRHIERVTELQELFLTRVGLDIGKVWVADDGAAVAVWTTPESVEAGAVFAEIGPRMAELSGSRLAAQQQMEGLLAPHRPKEPAWFLATVGVSPDHQGKGLGSAVVLPGVEAAERAGVPAFLETSAPRNLPFYERLGFTVTADVEVPEGPRTWCMTRKPGA

SEQ ID NO: 16235 - protein, 1137 aa, Artificial Sequence
  Synthetic Polypeptide
MALPVTALLLPLALLLHAARPEVQLVESGGGSVQAGGSLRLSCTTSGRALNMYVMGWFRQAPGNEREFVAATSSSGGSTSYPDSVKGRFTISRDNAKNTVYLQMNSLKPEDTAAYRCAASPYVSTPTMNILEEYRYWGLGTQVTVSSGTGGGGSGGGGSGGGGSEFDIQMTQSPSSLSASVGDRVTITCKASDHINNWLAWYQQKPGQAPKLLIYGATTLETGVPSRFSGSGSGTDYTLTISSLQPEDFATYYCQQSWNTPWTFGQGTKLEIKRLEDLKNVFPPEVAVFEPSKAEIAHTQKATLVCLATGFYPDHVELSWWVNGKEVHSGVCTDPQPLKEQPALNDSRYCLSSRLRVSATFWQNPRNHFRCQVQFYGLSENDEWTQDRAKPVTQIVSAEAWGRADCGITSASYHQGVLSATILYEILLGKATLYAVLVSALVLMAMVKRKDSRGRAKRSGSGATNFSLLKQAGDVEENPGPTSMDWIWRILFLVGAATGAHSGPQVQLQESGGGLAQAGGSLRLSCAASGRTFSMGWFRQAPGKEREFVAAITYSGGSPYYASSVRGRFTISRDNAKNTVYLQMNSLKPEDTAVYYCAANPTYGSDWNAENWGQGTQVTVSSGSGGGGSGGGGSGGGGSFEQVQLQQPGAELVKPGASVKMSCKASGYAFSSYWINWMKQKPGQGLEWIGQIYPGDGDTNYNGKFKGRATLTADTSSSTAYMQLSSLTSEDSAVYFCARSITTVVGCAMDYWGQGTSVTVSSTRIQNPDPAVYQLRDSKSSDKSVCLFTDFDSQTNVSQSKDSDVYITDKCVLDMRSMDFKSNSAVAWSNKSDFACANAFNNSIIPEDTFFPSSDVPCDVKLVEKSFETDTNLNFQNLSVIGFRILLLKVAGFNLLMTLRLWSSRAKRSGSGVKQTLNFDLLKLAGDVESNPGPSRGHMTEYKPTVRLATRDDVPRAVRTLAAAFADYPATRHTVDPDRHIERVTELQELFLTRVGLDIGKVWVADDGAAVAVWTTPESVEAGAVFAEIGPRMAELSGSRLAAQQQMEGLLAPHRPKEPAWFLATVGVSPDHQGKGLGSAVVLPGVEAAERAGVPAFLETSAPRNLPFYERLGFTVTADVEVPEGPRTWCMTRKPGA

SEQ ID NO: 16236 - protein, 1137 aa, Artificial Sequence
  Synthetic Polypeptide
MALPVTALLLPLALLLHAARPEVQLVESGGGSVQAGGSLRLSCTTSGRALNMYVMGWFRQAPGNEREFVAATSSSGGSTSYPDSVKGRFTISRDNAKNTVYLQMNSLKPEDTAAYRCAASPYVSTPTMNILEEYRYWGLGTQVTVSSGTGGGGSGGGGSGGGGSEFDIQMTQSPSSLSASVGDRVTITCKASDHINNWLAWYQQKPGQAPKLLIYGATTLETGVPSRFSGSGSGTDYTLTISSLQPEDFATYYCQQSWNTPWTFGQGTKLEIKRLEDLKNVFPPEVAVFEPSEAEISHTQKATLVCLATGFYPDHVELSWWVNGKEVHSGVCTDPQPLKEQPALNDSRYCLSSRLRVSATFWQNPRNHFRCQVQFYGLSENDEWTQDRAKPVTQIVSAEAWGRADCGFTSESYQQGVLSATILYEILLGKATLYAVLVSALVLMAMVKRKDSRGRAKRSGSGATNFSLLKQAGDVEENPGPTSMDWIWRILFLVGAATGAHSGPQVQLQESGGGLAQAGGSLRLSCAASGRTFSMGWFRQAPGKEREFVAAITYSGGSPYYASSVRGRFTISRDNAKNTVYLQMNSLKPEDTAVYYCAANPTYGSDWNAENWGQGTQVTVSSGSGGGGSGGGGSGGGGSFEQVQLQQPGAELVKPGASVKMSCKASGYAFSSYWINWMKQKPGQGLEWIGQIYPGDGDTNYNGKFKGRATLTADTSSSTAYMQLSSLTSEDSAVYFCARSITTVVGCAMDYWGQGTSVTVSSTRIQNPDPAVYQLRDSKSSDKSVCLFTDFDSQTNVSQSKDSDVYITDKCVLDMRSMDFKSNSAVAWSNKSDFACANAFNNSIIPEDTFFPSPESSCDVKLVEKSFETDTNLNFQNLSVIGFRILLLKVAGFNLLMTLRLWSSRAKRSGSGVKQTLNFDLLKLAGDVESNPGPSRGHMTEYKPTVRLATRDDVPRAVRTLAAAFADYPATRHTVDPDRHIERVTELQELFLTRVGLDIGKVWVADDGAAVAVWTTPESVEAGAVFAEIGPRMAELSGSRLAAQQQMEGLLAPHRPKEPAWFLATVGVSPDHQGKGLGSAVVLPGVEAAERAGVPAFLETSAPRNLPFYERLGFTVTADVEVPEGPRTWCMTRKPGA

SEQ ID NO: 16237 - protein, 904 aa, Artificial Sequence
  Synthetic Polypeptide
MALPVTALLLPLALLLHAARPEVQLVESGGGSVQAGGSLRLSCTTSGRALNMYVMGWFRQAPGNEREFVAATSSSGGSTSYPDSVKGRFTISRDNAKNTVYLQMNSLKPEDTAAYRCAASPYVSTPTMNILEEYRYWGLGTQVTVSSGTGGGGSGGGGSGGGGSEFDIQMTQSPSSLSASVGDRVTITCKASDHINNWLAWYQQKPGQAPKLLIYGATTLETGVPSRFSGSGSGTDYTLTISSLQPEDFATYYCQQSWNTPWTFGQGTKLEIKRLEDLKNVFPPEVAVFEPSEAEISHTQKATLVCLATGFYPDHVELSWWVNGKEVHSGVCTDPQPLKEQPALNDSRYCLSSRLRVSATFWQNPRNHFRCQVQFYGLSENDEWTQDRAKPVTQIVSAEAWGRADCGFTSESYQQGVLSATILYEILLGKATLYAVLVSALVLMAMVKRKDSRGRAKRSGSGATNFSLLKQAGDVEENPGPTSMDWIWRILFLVGAATGAHSGPQVQLQESGGGLAQAGGSLRLSCAASGRTFSMGWFRQAPGKEREFVAAITYSGGSPYYASSVRGRFTISRDNAKNTVYLQMNSLKPEDTAVYYCAANPTYGSDWNAENWGQGTQVTVSSGSGGGGSGGGGSGGGGSFEQVQLQQPGAELVKPGASVKMSCKASGYAFSSYWINWMKQKPGQGLEWIGQIYPGDGDTNYNGKFKGRATLTADTSSSTAYMQLSSLTSEDSAVYFCARSITTVVGCAMDYWGQGTSVTVSSTRIQNPDPAVYQLRDSKSSDKSVCLFTDFDSQTNVSQSKDSDVYITDKCVLDMRSMDFKSNSAVAWSNKSDFACANAFNNSIIPEDTFFPSPESSCDVKLVEKSFETDTNLNFQNLSVIGFRILLLKVAGFNLLMTLRLWSS

SEQ ID NO: 16238 - protein, 1129 aa, Artificial Sequence
  Synthetic Polypeptide
MALPVTALLLPLALLLHAARPEVQLVESGGGSVQAGGSLRLSCTTSGRALNMYVMGWFRQAPGNEREFVAATSSSGGSTSYPDSVKGRFTISRDNAKNTVYLQMNSLKPEDTAAYRCAASPYVSTPTMNILEEYRYWGLGTQVTVSSGTGGGGSGGGGSGGGGSEFDIQMTQSPSSLSASVGDRVTITCKASDHINNWLAWYQQKPGQAPKLLIYGATTLETGVPSRFSGSGSGTDYTLTISSLQPEDFATYYCQQSWNTPWTFGQGTKLEIKRLEDLKNVFPPEVAVFEPSEAEISHTQKATLVCLATGFYPDHVELSWWVNGKEVHSGVCTDPQPLKEQPALNDSRYCLSSRLRVSATFWQNPRNHFRCQVQFYGLSENDEWTQDRAKPVTQIVSAEAWGRADCGFTSESYQQGVLSATILYEILLGKATLYAVLVSALVLMAMVKRKDSRGRAKRSGSGATNFSLLKQAGDVEENPGPTSMDWIWRILFLVGAATGAHSGPQVQLQESGGGLAQAGGSLRLSCAASGRTFSMGWFRQAPGKEREFVAAITYSGGSPYYASSVRGRFTISRDNAKNTVYLQMNSLKPEDTAVYYCAANPTYGSDWNAENWGQGTQVTVSSGSGGGGSGGGGSGGGGSFEQVQLQQPGAELVKPGASVKMSCKASGYAFSSYWINWMKQKPGQGLEWIGQIYPGDGDTNYNGKFKGRATLTADTSSSTAYMQLSSLTSEDSAVYFCARSITTVVGCAMDYWGQGTSVTVSSTRIQNPDPAVYQLRDSKSSDKSVCLFTDFDSQTNVSQSKDSDVYITDKCVLDMRSMDFKSNSAVAWSNKSDFACANAFNNSIIPEDTFFPSPESSCDVKLVEKSFETDTNLNFQNLSVIGFRILLLKVAGFNLLMTLRLWSSRAKRSGSGVKQTLNFDLLKLAGDVESNPGPSRGGIHTMATYEVLCEVARKLGTDDREVVLFLLNVFIPQPTLAQLIGALRALKEEGRLTFPLLAECLFRAGRRDLLRDLLHLDPRFLERHLAGTMSYFSPYQLTVLHVDGELCARDIRSLIFLSKDTIGSRSTPQTFLHWVYCMENLDLLGPTDVDALMSMLRSLSRVDLQRQVQTLMGLHLSGPSHSQHYRHTP

SEQ ID NO: 16239 - protein, 908 aa, Artificial Sequence
  Synthetic Polypeptide
MALPVTALLLPLALLLHAARPEVQLVESGGGSVQAGGSLRLSCTTSGRALNMYVMGWFRQAPGNEREFVAATSSSGGSTSYPDSVKGRFTISRDNAKNTVYLQMNSLKPEDTAAYRCAASPYVSTPTMNILEEYRYWGLGTQVTVSSGTGGGGSGGGGSGGGGSEFDIQMTQSPSSLSASVGDRVTITCKASDHINNWLAWYQQKPGQAPKLLIYGATTLETGVPSRFSGSGSGTDYTLTISSLQPEDFATYYCQQSWNTPWTFGQGTKLEIKRLEIQNPDPAVYQLRDSKSSDKSVCLFTDFDSQTNVSQSKDSDVYITDKCVLDMRSMDFKSNSAVAWSNKSDFACANAFNNSIIPEDTFFPSPESSCDVKLVEKSFETDTNLNFQNLSVIGFRILLLKVAGFNLLMTLRLWSSRAKRSGSGVKQTLNFDLLKLAGDVESNPGPTSMDWIWRILFLVGAATGAHSGPQVQLQESGGGLAQAGGSLRLSCAASGRTFSMGWFRQAPGKEREFVAAITYSGGSPYYASSVRGRFTISRDNAKNTVYLQMNSLKPEDTAVYYCAANPTYGSDWNAENWGQGTQVTVSSGSGGGGSGGGGSGGGGSFEQVQLQQPGAELVKPGASVKMSCKASGYAFSSYWINWMKQKPGQGLEWIGQIYPGDGDTNYNGKFKGRATLTADTSSSTAYMQLSSLTSEDSAVYFCARSITTVVGCAMDYWGQGTSVTVSSTREDLKNVFPPEVAVFEPSEAEISHTQKATLVCLATGFYPDHVELSWWVNGKEVHSGVCTDPQPLKEQPALNDSRYCLSSRLRVSATFWQNPRNHFRCQVQFYGLSENDEWTQDRAKPVTQIVSAEAWGRADCGFTSESYQQGVLSATILYEILLGKATLYAVLVSALVLMAMVKRKDSRG

SEQ ID NO: 16240 - protein, 1130 aa, Artificial Sequence
  Synthetic Polypeptide
MALPVTALLLPLALLLHAARPEVQLVESGGGSVQAGGSLRLSCTTSGRALNMYVMGWFRQAPGNEREFVAATSSSGGSTSYPDSVKGRFTISRDNAKNTVYLQMNSLKPEDTAAYRCAASPYVSTPTMNILEEYRYWGLGTQVTVSSGTGGGGSGGGGSGGGGSEFDIQMTQSPSSLSASVGDRVTITCKASDHINNWLAWYQQKPGQAPKLLIYGATTLETGVPSRFSGSGSGTDYTLTISSLQPEDFATYYCQQSWNTPWTFGQGTKLEIKRLEIQNPDPAVYQLRDSKSSDKSVCLFTDFDSQTNVSQSKDSDVYITDKCVLDMRSMDFKSNSAVAWSNKSDFACANAFNNSIIPEDTFFPSPESSCDVKLVEKSFETDTNLNFQNLSVIGFRILLLKVAGFNLLMTLRLWSSRAKRSGSGVKQTLNFDLLKLAGDVESNPGPTSMDWIWRILFLVGAATGAHSGPQVQLQESGGGLAQAGGSLRLSCAASGRTFSMGWFRQAPGKEREFVAAITYSGGSPYYASSVRGRFTISRDNAKNTVYLQMNSLKPEDTAVYYCAANPTYGSDWNAENWGQGTQVTVSSGSGGGGSGGGGSGGGGSFEQVQLQQPGAELVKPGASVKMSCKASGYAFSSYWINWMKQKPGQGLEWIGQIYPGDGDTNYNGKFKGRATLTADTSSSTAYMQLSSLTSEDSAVYFCARSITTVVGCAMDYWGQGTSVTVSSTREDLKNVFPPEVAVFEPSEAEISHTQKATLVCLATGFYPDHVELSWWVNGKEVHSGVCTDPQPLKEQPALNDSRYCLSSRLRVSATFWQNPRNHFRCQVQFYGLSENDEWTQDRAKPVTQIVSAEAWGRADCGFTSESYQQGVLSATILYEILLGKATLYAVLVSALVLMAMVKRKDSRGRAKRSGSGATNFSLLKQAGDVEENPGPSRGGIHTMATYEVLCEVARKLGTDDREVVLFLLNVFIPQPTLAQLIGALRALKEEGRLTFPLLAECLFRAGRRDLLRDLLHLDPRFLERHLAGTMSYFSPYQLTVLHVDGELCARDIRSLIFLSKDTIGSRSTPQTFLHWVYCMENLDLLGPTDVDALMSMLRSLSRVDLQRQVQTLMGLHLSGPSHSQHYRHTP

SEQ ID NO: 16241 - protein, 1137 aa, Artificial Sequence
  Synthetic Polypeptide
MALPVTALLLPLALLLHAARPEVQLVESGGGSVQAGGSLRLSCTTSGRALNMYVMGWFRQAPGNEREFVAATSSSGGSTSYPDSVKGRFTISRDNAKNTVYLQMNSLKPEDTAAYRCAASPYVSTPTMNILEEYRYWGLGTQVTVSSGTGGGGSGGGGSGGGGSEFDIQMTQSPSSLSASVGDRVTITCKASDHINNWLAWYQQKPGQAPKLLIYGATTLETGVPSRFSGSGSGTDYTLTISSLQPEDFATYYCQQSWNTPWTFGQGTKLEIKRLEDLKNVFPPEVAVFEPSEAEISHTQKATLVCLATGFYPDHVELSWWVNGKEVHSGVSTDPQPLKEQPALNDSRYCLSSRLRVSATFWQNPRNHFRCQVQFYGLSENDEWTQDRAKPVTQIVSAEAWGRADCGFTSESYQQGVLSATILYEILLGKATLYAVLVSALVLMAMVKRKDSRGRAKRSGSGATNFSLLKQAGDVEENPGPTSMDWIWRILFLVGAATGAHSGPQVQLQESGGGLAQAGGSLRLSCAASGRTFSMGWFRQAPGKEREFVAAITYSGGSPYYASSVRGRFTISRDNAKNTVYLQMNSLKPEDTAVYYCAANPTYGSDWNAENWGQGTQVTVSSGSGGGGSGGGGSGGGGSFEQVQLQQPGAELVKPGASVKMSCKASGYAFSSYWINWMKQKPGQGLEWIGQIYPGDGDTNYNGKFKGRATLTADTSSSTAYMQLSSLTSEDSAVYFCARSITTVVGCAMDYWGQGTSVTVSSTRIQNPDPAVYQLRDSKSSDKSVCLFTDFDSQTNVSQSKDSDVYITDKTVLDMRSMDFKSNSAVAWSNKSDFACANAFNNSIIPEDTFFPSPESSCDVKLVEKSFETDTNLNFQNLSVIGFRILLLKVAGFNLLMTLRLWSSRAKRSGSGVKQTLNFDLLKLAGDVESNPGPSRGHMTEYKPTVRLATRDDVPRAVRTLAAAFADYPATRHTVDPDRHIERVTELQELFLTRVGLDIGKVWVADDGAAVAVWTTPESVEAGAVFAEIGPRMAELSGSRLAAQQQMEGLLAPHRPKEPAWFLATVGVSPDHQGKGLGSAVVLPGVEAAERAGVPAFLETSAPRNLPFYERLGFTVTADVEVPEGPRTWCMTRKPGA

SEQ ID NO: 16242 - protein, 1219 aa, Artificial Sequence
  Synthetic Polypeptide
MALPVTALLLPLALLLHAARPEVQLVESGGGSVQAGGSLRLSCTTSGRALNMYVMGWFRQAPGNEREFVAATSSSGGSTSYPDSVKGRFTISRDNAKNTVYLQMNSLKPEDTAAYRCAASPYVSTPTMNILEEYRYWGLGTQVTVSSGTGGGGSGGGGSGGGGSEFDIQMTQSPSSLSASVGDRVTITCKASDHINNWLAWYQQKPGQAPKLLIYGATTLETGVPSRFSGSGSGTDYTLTISSLQPEDFATYYCQQSWNTPWTFGQGTKLEIKRLEDLKNVFPPEVAVFEPSEAEISHTQKATLVCLATGFYPDHVELSWWVNGKEVHSGVSTDPQPLKEQPALNDSRYCLSSRLRVSATFWQNPRNHFRCQVQFYGLSENDEWTQDRAKPVTQIVSAEAWGRADCGFTSESYQQGVLSATILYEILLGKATLYAVLVSALVLMAMVKRKDSRGRAKRSGSGATNFSLLKQAGDVEENPGPTSMDWIWRILFLVGAATGAHSGPQVQLQESGGGLAQAGGSLRLSCAASGRTFSMGWFRQAPGKEREFVAAITYSGGSPYYASSVRGRFTISRDNAKNTVYLQMNSLKPEDTAVYYCAANPTYGSDWNAENWGQGTQVTVSSGSGGGGSGGGGSGGGGSFEQVQLQQPGAELVKPGASVKMSCKASGYAFSSYWINWMKQKPGQGLEWIGQIYPGDGDTNYNGKFKGRATLTADTSSSTAYMQLSSLTSEDSAVYFCARSITTVVGCAMDYWGQGTSVTVSSTREQKLISEEDGSGTPFPSLAPPIMLLVDGKQQMVVVCLVLDVAPPGLDSPIWFSAGNGSALDAFTYGPSPATDGTWTNLAHLSLPSEELASWEPLVCHTGPGAEGHSRSTQPMHLSGEASTARTCPQEPLRGTPGGALWLGVLRLLLFKLLLFDLLLTCSCLCDPAGPLPSPATTTRLRALGSHRLHPATETGGREATSSPRPQPRDRRWGDTPPGRKPGSPVRAKRSGSGVKQTLNFDLLKLAGDVESNPGPSRGHMTEYKPTVRLATRDDVPRAVRTLAAAFADYPATRHTVDPDRHIERVTELQELFLTRVGLDIGKVWVADDGAAVAVWTTPESVEAGAVFAEIGPRMAELSGSRLAAQQQMEGLLAPHRPKEPAWFLATVGVSPDHQGKGLGSAVVLPGVEAAERAGVPAFLETSAPRNLPFYERLGFTVTADVEVPEGPRTWCMTRKPGA

SEQ ID NO: 16243 - protein, 1174 aa, Artificial Sequence
  Synthetic Polypeptide
MALPVTALLLPLALLLHAARPEVQLVESGGGSVQAGGSLRLSCTTSGRALNMYVMGWFRQAPGNEREFVAATSSSGGSTSYPDSVKGRFTISRDNAKNTVYLQMNSLKPEDTAAYRCAASPYVSTPTMNILEEYRYWGLGTQVTVSSGTGGGGSGGGGSGGGGSEFDIQMTQSPSSLSASVGDRVTITCKASDHINNWLAWYQQKPGQAPKLLIYGATTLETGVPSRFSGSGSGTDYTLTISSLQPEDFATYYCQQSWNTPWTFGQGTKLEIKRLEGKPIPNPLLGLDSTGSGDKQLDADVSPKPTIFLPSIAETKLQKAGTYLCLLEKFFPDVIKIHWQEKKSNTILGSQEGNTMKTNDTYMKFSWLTVPEKSLDKEHRCIVRHENNKNGVDQEIIFPPIKTDVITMDPKDNCSKDANDTLLLQLTNTSAYYMYLLLLLKSVVYFAIITCCLLRRTAFCCNGEKSRAKRSGSGATNFSLLKQAGDVEENPGPTSMDWIWRILFLVGAATGAHSGPQVQLQESGGGLAQAGGSLRLSCAASGRTFSMGWFRQAPGKEREFVAAITYSGGSPYYASSVRGRFTISRDNAKNTVYLQMNSLKPEDTAVYYCAANPTYGSDWNAENWGQGTQVTVSSGSGGGGSGGGGSGGGGSFEQVQLQQPGAELVKPGASVKMSCKASGYAFSSYWINWMKQKPGQGLEWIGQIYPGDGDTNYNGKFKGRATLTADTSSSTAYMQLSSLTSEDSAVYFCARSITTVVGCAMDYWGQGTSVTVSSTREQKLISEEDGSGSQPHTKPSVFVMKNGTNVACLVKEFYPKDIRINLVSSKKITEFDPAIVISPSGKYNAVKLGKYEDSNSVTCSVQHDNKTVHSTDFEVKTDSTDHVKPKETENTKQPSKSCHKPKAIVHTEKVNMMSLTVLGLRMLFAKTVAVNFLLTAKLFFLRAKRSGSGVKQTLNFDLLKLAGDVESNPGPSRGHMTEYKPTVRLATRDDVPRAVRTLAAAFADYPATRHTVDPDRHIERVTELQELFLTRVGLDIGKVWVADDGAAVAVWTTPESVEAGAVFAEIGPRMAELSGSRLAAQQQMEGLLAPHRPKEPAWFLATVGVSPDHQGKGLGSAVVLPGVEAAERAGVPAFLETSAPRNLPFYERLGFTVTADVEVPEGPRTWCMTRKPGA

SEQ ID NO: 16244 - protein, 912 aa, Artificial Sequence
  Synthetic Polypeptide
MALPVTALLLPLALLLHAARPEVQLVESGGGSVQAGGSLRLSCTTSGRALNMYVMGWFRQAPGNEREFVAATSSSGGSTSYPDSVKGRFTISRDNAKNTVYLQMNSLKPEDTAAYRCAASPYVSTPTMNILEEYRYWGLGTQVTVSSGTGGGGSGGGGSGGGGSEFDIQMTQSPSSLSASVGDRVTITCKASDHINNWLAWYQQKPGQAPKLLIYGATTLETGVPSRFSGSGSGTDYTLTISSLQPEDFATYYCQQSWNTPWTFGQGTKLEIKRLESQPHTKPSVFVMKNGTNVACLVKEFYPKDIRINLVSSKKITEFDPAIVISPSGKYNAVKLGKYEDSNSVTCSVQHDNKTVHSTDFEVKTDSTDHVKPKETENTKQPSKSCHKPKAIVHTEKVNMMSLTVLGLRMLFAKTVAVNFLLTAKLFFLRAKRSGSGATNFSLLKQAGDVEENPGPTSMDWIWRILFLVGAATGAHSGPQVQLQESGGGLAQAGGSLRLSCAASGRTFSMGWFRQAPGKEREFVAAITYSGGSPYYASSVRGRFTISRDNAKNTVYLQMNSLKPEDTAVYYCAANPTYGSDWNAENWGQGTQVTVSSGSGGGGSGGGGSGGGGSFEQVQLQQPGAELVKPGASVKMSCKASGYAFSSYWINWMKQKPGQGLEWIGQIYPGDGDTNYNGKFKGRATLTADTSSSTAYMQLSSLTSEDSAVYFCARSITTVVGCAMDYWGQGTSVTVSSTRDKQLDADVSPKPTIFLPSIAETKLQKAGTYLCLLEKFFPDVIKIHWQEKKSNTILGSQEGNTMKTNDTYMKFSWLTVPEKSLDKEHRCIVRHENNKNGVDQEIIFPPIKTDVITMDPKDNCSKDANDTLLLQLTNTSAYYMYLLLLLKSVVYFAIITCCLLRRTAFCCNGEKS

SEQ ID NO: 16245 - protein, 1314 aa, Artificial Sequence
  Synthetic Polypeptide
MALPVTALLLPLALLLHAARPEVQLVESGGGSVQAGGSLRLSCTTSGRALNMYVMGWFRQAPGNEREFVAATSSSGGSTSYPDSVKGRFTISRDNAKNTVYLQMNSLKPEDTAAYRCAASPYVSTPTMNILEEYRYWGLGTQVTVSSGTGGGGSGGGGSGGGGSEFDIQMTQSPSSLSASVGDRVTITCKASDHINNWLAWYQQKPGQAPKLLIYGATTLETGVPSRFSGSGSGTDYTLTISSLQPEDFATYYCQQSWNTPWTFGQGTKLEIKRGQPKANPTVTLFPPSSEELQANKATLVCLISDFYPGAVTVAWKADGSPVKAGVETTKPSKQSNNKYAASSYLSLTPEQWKSHRSYSCQVTHEGSTVEKTVAPTECSGSQSFGLLDPKLCYLLDGILFIYGVILTALFLRVKFSRSADAPAYQQGQNQLYNELNLGRREEYDVLDKRRGRDPEMGGKPQRRKNPQEGLYNELQKDKMAEAYSEIGMKGERRRGKGHDGLYQGLSTATKDTYDALHMQALPPRRAKRSGSGATNFSLLKQAGDVEENPGPTSMDWIWRILFLVGAATGAHSGPQVQLQESGGGLAQAGGSLRLSCAASGRTFSMGWFRQAPGKEREFVAAITYSGGSPYYASSVRGRFTISRDNAKNTVYLQMNSLKPEDTAVYYCAANPTYGSDWNAENWGQGTQVTVSSGSGGGGSGGGGSGGGGSFEQVQLQQPGAELVKPGASVKMSCKASGYAFSSYWINWMKQKPGQGLEWIGQIYPGDGDTNYNGKFKGRATLTADTSSSTAYMQLSSLTSEDSAVYFCARSITTVVGCAMDYWGQGTSVTVSSASTKGPSVFPLAPSSKSTSGGTAALGCLVKDYFPEPVTVSWNSGALTSGVHTFPAVLQSSGLYSLSSVVTVPSSSLGTQTYICNVNHKPSNTKVDKRVEPKSCGTQSFGLLDPKLCYLLDGILFIYGVILTALFLRVKFSRSADAPAYQQGQNQLYNELNLGRREEYDVLDKRRGRDPEMGGKPQRRKNPQEGLYNELQKDKMAEAYSEIGMKGERRRGKGHDGLYQGLSTATKDTYDALHMQALPPRRAKRSGSGVKQTLNFDLLKLAGDVESNPGPSRGHMTEYKPTVRLATRDDVPRAVRTLAAAFADYPATRHTVDPDRHIERVTELQELFLTRVGLDIGKVWVADDGAAVAVWTTPESVEAGAVFAEIGPRMAELSGSRLAAQQQMEGLLAPHRPKEPAWFLATVGVSPDHQGKGLGSAVVLPGVEAAERAGVPAFLETSAPRNLPFYERLGFTVTADVEVPEGPRTWCMTRKPGA

SEQ ID NO: 16246 - protein, 1100 aa, Artificial Sequence
  Synthetic Polypeptide
MALPVTALLLPLALLLHAARPEVQLVESGGGSVQAGGSLRLSCTTSGRALNMYVMGWFRQAPGNEREFVAATSSSGGSTSYPDSVKGRFTISRDNAKNTVYLQMNSLKPEDTAAYRCAASPYVSTPTMNILEEYRYWGLGTQVTVSSGTGGGGSGGGGSGGGGSEFDIQMTQSPSSLSASVGDRVTITCKASDHINNWLAWYQQKPGQAPKLLIYGATTLETGVPSRFSGSGSGTDYTLTISSLQPEDFATYYCQQSWNTPWTFGQGTKLEIKRLEDLKNVFPPEVAVFEPSEAEISHTQKATLVCLATGFYPDHVELSWWVNGKEVHSGVSTDPQPLKEQPALNDSRYCLSSRLRVSATFWQNPRNHFRCQVQFYGLSENDEWTQDRAKPVTQIVSAEAWGRADCGSQSFGLLDPKLCYLLDGILFIYGVILTALFLRVKFSRSADAPAYQQGQNQLYNELNLGRREEYDVLDKRRGRDPEMGGKPQRRKNPQEGLYNELQKDKMAEAYSEIGMKGERRRGKGHDGLYQGLSTATKDTYDALHMQALPPRRAKRSGSGATNFSLLKQAGDVEENPGPTSMDWIWRILFLVGAATGAHSGPQVQLQESGGGLAQAGGSLRLSCAASGRTFSMGWFRQAPGKEREFVAAITYSGGSPYYASSVRGRFTISRDNAKNTVYLQMNSLKPEDTAVYYCAANPTYGSDWNAENWGQGTQVTVSSGSGGGGSGGGGSGGGGSFEQVQLQQPGAELVKPGASVKMSCKASGYAFSSYWINWMKQKPGQGLEWIGQIYPGDGDTNYNGKFKGRATLTADTSSSTAYMQLSSLTSEDSAVYFCARSITTVVGCAMDYWGQGTSVTVSSTRIQNPDPAVYQLRDSKSSDKSVCLFTDFDSQTNVSQSKDSDVYITDKTVLDMRSMDFKSNSAVAWSNKSDFACANAFNNSIIPEDTFFPSPESSCGTQSFGLLDPKLCYLLDGILFIYGVILTALFLRVKFSRSADAPAYQQGQNQLYNELNLGRREEYDVLDKRRGRDPEMGGKPQRRKNPQEGLYNELQKDKMAEAYSEIGMKGERRRGKGHDGLYQGLSTATKDTYDALHMQALPPR

SEQ ID NO: 16247 - protein, 1100 aa, Artificial Sequence
  Synthetic Polypeptide
MALPVTALLLPLALLLHAARPEVQLVESGGGSVQAGGSLRLSCTTSGRALNMYVMGWFRQAPGNEREFVAATSSSGGSTSYPDSVKGRFTISRDNAKNTVYLQMNSLKPEDTAAYRCAASPYVSTPTMNILEEYRYWGLGTQVTVSSGTGGGGSGGGGSGGGGSEFDIQMTQSPSSLSASVGDRVTITCKASDHINNWLAWYQQKPGQAPKLLIYGATTLETGVPSRFSGSGSGTDYTLTISSLQPEDFATYYCQQSWNTPWTFGQGTKLEIKRLEDLKNVFPPEVAVFEPSKAEIAHTQKATLVCLATGFYPDHVELSWWVNGKEVHSGVCTDPQPLKEQPALNDSRYCLSSRLRVSATFWQNPRNHFRCQVQFYGLSENDEWTQDRAKPVTQIVSAEAWGRADCGSQSFGLLDPKLCYLLDGILFIYGVILTALFLRVKFSRSADAPAYQQGQNQLYNELNLGRREEYDVLDKRRGRDPEMGGKPQRRKNPQEGLYNELQKDKMAEAYSEIGMKGERRRGKGHDGLYQGLSTATKDTYDALHMQALPPRRAKRSGSGATNFSLLKQAGDVEENPGPTSMDWIWRILFLVGAATGAHSGPQVQLQESGGGLAQAGGSLRLSCAASGRTFSMGWFRQAPGKEREFVAAITYSGGSPYYASSVRGRFTISRDNAKNTVYLQMNSLKPEDTAVYYCAANPTYGSDWNAENWGQGTQVTVSSGSGGGGSGGGGSGGGGSFEQVQLQQPGAELVKPGASVKMSCKASGYAFSSYWINWMKQKPGQGLEWIGQIYPGDGDTNYNGKFKGRATLTADTSSSTAYMQLSSLTSEDSAVYFCARSITTVVGCAMDYWGQGTSVTVSSTRIQNPDPAVYQLRDSKSSDKSVCLFTDFDSQTNVSQSKDSDVYITDKCVLDMRSMDFKSNSAVAWSNKSDFACANAFNNSIIPEDTFFPSSDVPCGTQSFGLLDPKLCYLLDGILFIYGVILTALFLRVKFSRSADAPAYQQGQNQLYNELNLGRREEYDVLDKRRGRDPEMGGKPQRRKNPQEGLYNELQKDKMAEAYSEIGMKGERRRGKGHDGLYQGLSTATKDTYDALHMQALPPR

SEQ ID NO: 16248 - protein, 1171 aa, Artificial Sequence
  Synthetic Polypeptide
MALPVTALLLPLALLLHAARPEVQLVESGGGSVQAGGSLRLSCTTSGRALNMYVMGWFRQAPGNEREFVAATSSSGGSTSYPDSVKGRFTISRDNAKNTVYLQMNSLKPEDTAAYRCAASPYVSTPTMNILEEYRYWGLGTQVTVSSGTGGGGSGGGGSGGGGSEFDIQMTQSPSSLSASVGDRVTITCKASDHINNWLAWYQQKPGQAPKLLIYGATTLETGVPSRFSGSGSGTDYTLTISSLQPEDFATYYCQQSWNTPWTFGQGTKLEIKRLEGKPIPNPLLGLDSTGSGEDLKNVFPPEVAVFEPSEAEISHTQKATLVCLATGFYPDHVELSWWVNGKEVHSGVSTDPQPLKEQPALNDSRYCLSSRLRVSATFWQNPRNHFRCQVQFYGLSENDEWTQDRAKPVTQIVSAEAWGRADCGSQSFGLLDPKLCYLLDGILFIYGVILTALFLRVKFSRSADAPAYQQGQNQLYNELNLGRREEYDVLDKRRGRDPEMGGKPQRRKNPQEGLYNELQKDKMAEAYSEIGMKGERRRGKGHDGLYQGLSTATKDTYDALHMQALPPRRAKRSGSGATNFSLLKQAGDVEENPGPTSMDWIWRILFLVGAATGAHSGPQVQLQESGGGLAQAGGSLRLSCAASGRTFSMGWFRQAPGKEREFVAAITYSGGSPYYASSVRGRFTISRDNAKNTVYLQMNSLKPEDTAVYYCAANPTYGSDWNAENWGQGTQVTVSSGSGGGGSGGGGSGGGGSFEQVQLQQPGAELVKPGASVKMSCKASGYAFSSYWINWMKQKPGQGLEWIGQIYPGDGDTNYNGKFKGRATLTADTSSSTAYMQLSSLTSEDSAVYFCARSITTVVGCAMDYWGQGTSVTVSSTREQKLISEEDGSGIQNPDPAVYQLRDSKSSDKSVCLFTDFDSQTNVSQSKDSDVYITDKTVLDMRSMDFKSNSAVAWSNKSDFACANAFNNSIIPEDTFFPSPESSCGTQSFGLLDPKLCYLLDGILFIYGVILTALFLRSKRSRLLHSDYMNMTPRRPGPTRKHYQPYAPPRDFAAYRSRVKFSRSADAPAYQQGQNQLYNELNLGRREEYDVLDKRRGRDPEMGGKPQRRKNPQEGLYNELQKDKMAEAYSEIGMKGERRRGKGHDGLYQGLSTATKDTYDALHMQALPPR

SEQ ID NO: 16249 - protein, 1212 aa, Artificial Sequence
  Synthetic Polypeptide
MALPVTALLLPLALLLHAARPEVQLVESGGGSVQAGGSLRLSCTTSGRALNMYVMGWFRQAPGNEREFVAATSSSGGSTSYPDSVKGRFTISRDNAKNTVYLQMNSLKPEDTAAYRCAASPYVSTPTMNILEEYRYWGLGTQVTVSSGTGGGGSGGGGSGGGGSEFDIQMTQSPSSLSASVGDRVTITCKASDHINNWLAWYQQKPGQAPKLLIYGATTLETGVPSRFSGSGSGTDYTLTISSLQPEDFATYYCQQSWNTPWTFGQGTKLEIKRLEGKPIPNPLLGLDSTGSGEDLKNVFPPEVAVFEPSEAEISHTQKATLVCLATGFYPDHVELSWWVNGKEVHSGVSTDPQPLKEQPALNDSRYCLSSRLRVSATFWQNPRNHFRCQVQFYGLSENDEWTQDRAKPVTQIVSAEAWGRADCGSQSFGLLDPKLCYLLDGILFIYGVILTALFLRSKRSRLLHSDYMNMTPRRPGPTRKHYQPYAPPRDFAAYRSRVKFSRSADAPAYQQGQNQLYNELNLGRREEYDVLDKRRGRDPEMGGKPQRRKNPQEGLYNELQKDKMAEAYSEIGMKGERRRGKGHDGLYQGLSTATKDTYDALHMQALPPRRAKRSGSGATNFSLLKQAGDVEENPGPTSMDWIWRILFLVGAATGAHSGPQVQLQESGGGLAQAGGSLRLSCAASGRTFSMGWFRQAPGKEREFVAAITYSGGSPYYASSVRGRFTISRDNAKNTVYLQMNSLKPEDTAVYYCAANPTYGSDWNAENWGQGTQVTVSSGSGGGGSGGGGSGGGGSFEQVQLQQPGAELVKPGASVKMSCKASGYAFSSYWINWMKQKPGQGLEWIGQIYPGDGDTNYNGKFKGRATLTADTSSSTAYMQLSSLTSEDSAVYFCARSITTVVGCAMDYWGQGTSVTVSSTREQKLISEEDGSGIQNPDPAVYQLRDSKSSDKSVCLFTDFDSQTNVSQSKDSDVYITDKTVLDMRSMDFKSNSAVAWSNKSDFACANAFNNSIIPEDTFFPSPESSCGTQSFGLLDPKLCYLLDGILFIYGVILTALFLRSKRSRLLHSDYMNMTPRRPGPTRKHYQPYAPPRDFAAYRSRVKFSRSADAPAYQQGQNQLYNELNLGRREEYDVLDKRRGRDPEMGGKPQRRKNPQEGLYNELQKDKMAEAYSEIGMKGERRRGKGHDGLYQGLSTATKDTYDALHMQALPPR

SEQ ID NO: 16250 - protein, 1173 aa, Artificial Sequence
  Synthetic Polypeptide
MALPVTALLLPLALLLHAARPEVQLVESGGGSVQAGGSLRLSCTTSGRALNMYVMGWFRQAPGNEREFVAATSSSGGSTSYPDSVKGRFTISRDNAKNTVYLQMNSLKPEDTAAYRCAASPYVSTPTMNILEEYRYWGLGTQVTVSSGTGGGGSGGGGSGGGGSEFDIQMTQSPSSLSASVGDRVTITCKASDHINNWLAWYQQKPGQAPKLLIYGATTLETGVPSRFSGSGSGTDYTLTISSLQPEDFATYYCQQSWNTPWTFGQGTKLEIKRLEGKPIPNPLLGLDSTGSGEDLKNVFPPEVAVFEPSEAEISHTQKATLVCLATGFYPDHVELSWWVNGKEVHSGVSTDPQPLKEQPALNDSRYCLSSRLRVSATFWQNPRNHFRCQVQFYGLSENDEWTQDRAKPVTQIVSAEAWGRADCGSQSFGLLDPKLCYLLDGILFIYGVILTALFLRVKFSRSADAPAYQQGQNQLYNELNLGRREEYDVLDKRRGRDPEMGGKPQRRKNPQEGLYNELQKDKMAEAYSEIGMKGERRRGKGHDGLYQGLSTATKDTYDALHMQALPPRRAKRSGSGATNFSLLKQAGDVEENPGPTSMDWIWRILFLVGAATGAHSGPQVQLQESGGGLAQAGGSLRLSCAASGRTFSMGWFRQAPGKEREFVAAITYSGGSPYYASSVRGRFTISRDNAKNTVYLQMNSLKPEDTAVYYCAANPTYGSDWNAENWGQGTQVTVSSGSGGGGSGGGGSGGGGSFEQVQLQQPGAELVKPGASVKMSCKASGYAFSSYWINWMKQKPGQGLEWIGQIYPGDGDTNYNGKFKGRATLTADTSSSTAYMQLSSLTSEDSAVYFCARSITTVVGCAMDYWGQGTSVTVSSTREQKLISEEDLGSGIQNPDPAVYQLRDSKSSDKSVCLFTDFDSQTNVSQSKDSDVYITDKTVLDMRSMDFKSNSAVAWSNKSDFACANAFNNSIIPEDTFFPSPESSCGTQSFGLLDPKLCYLLDGILFIYGVILTALFLKRGRKKLLYIFKQPFMRPVQTTQEEDGCSCRFPEEEEGGCELRVKFSRSADAPAYQQGQNQLYNELNLGRREEYDVLDKRRGRDPEMGGKPQRRKNPQEGLYNELQKDKMAEAYSEIGMKGERRRGKGHDGLYQGLSTATKDTYDALHMQALPPR

SEQ ID NO: 16251 - protein, 1215 aa, Artificial Sequence
  Synthetic Polypeptide
MALPVTALLLPLALLLHAARPEVQLVESGGGSVQAGGSLRLSCTTSGRALNMYVMGWFRQAPGNEREFVAATSSSGGSTSYPDSVKGRFTISRDNAKNTVYLQMNSLKPEDTAAYRCAASPYVSTPTMNILEEYRYWGLGTQVTVSSGTGGGGSGGGGSGGGGSEFDIQMTQSPSSLSASVGDRVTITCKASDHINNWLAWYQQKPGQAPKLLIYGATTLETGVPSRFSGSGSGTDYTLTISSLQPEDFATYYCQQSWNTPWTFGQGTKLEIKRLEGKPIPNPLLGLDSTGSGEDLKNVFPPEVAVFEPSEAEISHTQKATLVCLATGFYPDHVELSWWVNGKEVHSGVSTDPQPLKEQPALNDSRYCLSSRLRVSATFWQNPRNHFRCQVQFYGLSENDEWTQDRAKPVTQIVSAEAWGRADCGSQSFGLLDPKLCYLLDGILFIYGVILTALFLKRGRKKLLYIFKQPFMRPVQTTQEEDGCSCRFPEEEEGGCELRVKFSRSADAPAYQQGQNQLYNELNLGRREEYDVLDKRRGRDPEMGGKPQRRKNPQEGLYNELQKDKMAEAYSEIGMKGERRRGKGHDGLYQGLSTATKDTYDALHMQALPPRRAKRSGSGATNFSLLKQAGDVEENPGPTSMDWIWRILFLVGAATGAHSGPQVQLQESGGGLAQAGGSLRLSCAASGRTFSMGWFRQAPGKEREFVAAITYSGGSPYYASSVRGRFTISRDNAKNTVYLQMNSLKPEDTAVYYCAANPTYGSDWNAENWGQGTQVTVSSGSGGGGSGGGGSGGGGSFEQVQLQQPGAELVKPGASVKMSCKASGYAFSSYWINWMKQKPGQGLEWIGQIYPGDGDTNYNGKFKGRATLTADTSSSTAYMQLSSLTSEDSAVYFCARSITTVVGCAMDYWGQGTSVTVSSTREQKLISEEDLGSGIQNPDPAVYQLRDSKSSDKSVCLFTDFDSQTNVSQSKDSDVYITDKTVLDMRSMDFKSNSAVAWSNKSDFACANAFNNSIIPEDTFFPSPESSCGTQSFGLLDPKLCYLLDGILFIYGVILTALFLKRGRKKLLYIFKQPFMRPVQTTQEEDGCSCRFPEEEEGGCELRVKFSRSADAPAYQQGQNQLYNELNLGRREEYDVLDKRRGRDPEMGGKPQRRKNPQEGLYNELQKDKMAEAYSEIGMKGERRRGKGHDGLYQGLSTATKDTYDALHMQALPPR

SEQ ID NO: 16252 - protein, 1105 aa, Artificial Sequence
  Synthetic Polypeptide
MALPVTALLLPLALLLHAARPEVQLVESGGGSVQAGGSLRLSCTTSGRALNMYVMGWFRQAPGNEREFVAATSSSGGSTSYPDSVKGRFTISRDNAKNTVYLQMNSLKPEDTAAYRCAASPYVSTPTMNILEEYRYWGLGTQVTVSSGTGGGGSGGGGSGGGGSEFDIQMTQSPSSLSASVGDRVTITCKASDHINNWLAWYQQKPGQAPKLLIYGATTLETGVPSRFSGSGSGTDYTLTISSLQPEDFATYYCQQSWNTPWTFGQGTKLEIKRLEQSFGLLDPKLCYLLDGILFIYGVILTALFLRVKFSRSADAPAYQQGQNQLYNELNLGRREEYDVLDKRRGRDPEMGGKPQRRKNPQEGLYNELQKDKMAEAYSEIGMKGERRRGKGHDGLYQGLSTATKDTYDALHMQALPPRRAKRSGSGATNFSLLKQAGDVEENPGPTSMDWIWRILFLVGAATGAHSGPQVQLQESGGGLAQAGGSLRLSCAASGRTFSMGWFRQAPGKEREFVAAITYSGGSPYYASSVRGRFTISRDNAKNTVYLQMNSLKPEDTAVYYCAANPTYGSDWNAENWGQGTQVTVSSGSGGGGSGGGGSGGGGSFEQVQLQQPGAELVKPGASVKMSCKASGYAFSSYWINWMKQKPGQGLEWIGQIYPGDGDTNYNGKFKGRATLTADTSSSTAYMQLSSLTSEDSAVYFCARSITTVVGCAMDYWGQGTSVTVSSTRQSFGLLDPKLCYLLDGILFIYGVILTALFLRVKFSRSADAPAYQQGQNQLYNELNLGRREEYDVLDKRRGRDPEMGGKPQRRKNPQEGLYNELQKDKMAEAYSEIGMKGERRRGKGHDGLYQGLSTATKDTYDALHMQALPPRRAKRSGSGVKQTLNFDLLKLAGDVESNPGPSRGHMTEYKPTVRLATRDDVPRAVRTLAAAFADYPATRHTVDPDRHIERVTELQELFLTRVGLDIGKVWVADDGAAVAVWTTPESVEAGAVFAEIGPRMAELSGSRLAAQQQMEGLLAPHRPKEPAWFLATVGVSPDHQGKGLGSAVVLPGVEAAERAGVPAFLETSAPRNLPFYERLGFTVTADVEVPEGPRTWCMTRKPGA

SEQ ID NO: 16253 - protein, 930 aa, Artificial Sequence
  Synthetic Polypeptide
MALPVTALLLPLALLLHAARPEVQLVESGGGSVQAGGSLRLSCTTSGRALNMYVMGWFRQAPGNEREFVAATSSSGGSTSYPDSVKGRFTISRDNAKNTVYLQMNSLKPEDTAAYRCAASPYVSTPTMNILEEYRYWGLGTQVTVSSGTGGGGSGGGGSGGGGSEFDIQMTQSPSSLSASVGDRVTITCKASDHINNWLAWYQQKPGQAPKLLIYGATTLETGVPSRFSGSGSGTDYTLTISSLQPEDFATYYCQQSWNTPWTFGQGTKLEIKRLEGQPKANPTVTLFPPSSEELQANKATLVCLISDFYPGAVTVAWKADGSPVKAGVETTKPSKQSNNKYAASSYLSLTPEQWKSHRSYSCQVTHEGSTVEKTVAPTECSPIKTDVITMDPKDNCSKDANDTLLLQLTNTSAYYMYLLLLLKSVVYFAIITCCLLRRTAFCCNGEKSRAKRSGSGATNFSLLKQAGDVEENPGPTSMDWIWRILFLVGAATGAHSGPQVQLQESGGGLAQAGGSLRLSCAASGRTFSMGWFRQAPGKEREFVAAITYSGGSPYYASSVRGRFTISRDNAKNTVYLQMNSLKPEDTAVYYCAANPTYGSDWNAENWGQGTQVTVSSGSGGGGSGGGGSGGGGSFEQVQLQQPGAELVKPGASVKMSCKASGYAFSSYWINWMKQKPGQGLEWIGQIYPGDGDTNYNGKFKGRATLTADTSSSTAYMQLSSLTSEDSAVYFCARSITTVVGCAMDYWGQGTSVTVSSTRASTKGPSVFPLAPSSKSTSGGTAALGCLVKDYFPEPVTVSWNSGALTSGVHTFPAVLQSSGLYSLSSVVTVPSSSLGTQTYICNVNHKPSNTKVDKRVEPKSCEVKTDSTDHVKPKETENTKQPSKSCHKPKAIVHTEKVNMMSLTVLGLRMLFAKTVAVNFLLTAKLFFL

SEQ ID NO: 16254 - protein, 908 aa, Artificial Sequence
  Synthetic Polypeptide
MALPVTALLLPLALLLHAARPEVQLVESGGGSVQAGGSLRLSCTTSGRALNMYVMGWFRQAPGNEREFVAATSSSGGSTSYPDSVKGRFTISRDNAKNTVYLQMNSLKPEDTAAYRCAASPYVSTPTMNILEEYRYWGLGTQVTVSSGTGGGGSGGGGSGGGGSEFDIQMTQSPSSLSASVGDRVTITCKASDHINNWLAWYQQKPGQAPKLLIYGATTLETGVPSRFSGSGSGTDYTLTISSLQPEDFATYYCQQSWNTPWTFGQGTKLEIKRLEGQPKANPTVTLFPPSSEELQANKATLVCLISDFYPGAVTVAWKADGSPVKAGVETTKPSKQSNNKYAASSYLSLTPEQWKSHRSYSCQVTHEGSTVEKTVAPTECSGRADCGITSASYHQGVLSATILYEILLGKATLYAVLVSALVLMAMVKRKDSRGRAKRSGSGATNFSLLKQAGDVEENPGPTSMDWIWRILFLVGAATGAHSGPQVQLQESGGGLAQAGGSLRLSCAASGRTFSMGWFRQAPGKEREFVAAITYSGGSPYYASSVRGRFTISRDNAKNTVYLQMNSLKPEDTAVYYCAANPTYGSDWNAENWGQGTQVTVSSGSGGGGSGGGGSGGGGSFEQVQLQQPGAELVKPGASVKMSCKASGYAFSSYWINWMKQKPGQGLEWIGQIYPGDGDTNYNGKFKGRATLTADTSSSTAYMQLSSLTSEDSAVYFCARSITTVVGCAMDYWGQGTSVTVSSTRASTKGPSVFPLAPSSKSTSGGTAALGCLVKDYFPEPVTVSWNSGALTSGVHTFPAVLQSSGLYSLSSVVTVPSSSLGTQTYICNVNHKPSNTKVDKRVEPKSCIPEDTFFPSSDVPCDVKLVEKSFETDTNLNFQNLSVIGFRILLLKVAGFNLLMTLRLWSS

SEQ ID NO: 16255 - protein, 908 aa, Artificial Sequence
  Synthetic Polypeptide
MALPVTALLLPLALLLHAARPEVQLVESGGGSVQAGGSLRLSCTTSGRALNMYVMGWFRQAPGNEREFVAATSSSGGSTSYPDSVKGRFTISRDNAKNTVYLQMNSLKPEDTAAYRCAASPYVSTPTMNILEEYRYWGLGTQVTVSSGTGGGGSGGGGSGGGGSEFDIQMTQSPSSLSASVGDRVTITCKASDHINNWLAWYQQKPGQAPKLLIYGATTLETGVPSRFSGSGSGTDYTLTISSLQPEDFATYYCQQSWNTPWTFGQGTKLEIKRLEGQPKANPTVTLFPPSSEELQANKATLVCLISDFYPGAVTVAWKADGSPVKAGVETTKPSKQSNNKYAASSYLSLTPEQWKSHRSYSCQVTHEGSTVEKTVAPTECSGRADCGFTSESYQQGVLSATILYEILLGKATLYAVLVSALVLMAMVKRKDSRGRAKRSGSGATNFSLLKQAGDVEENPGPTSMDWIWRILFLVGAATGAHSGPQVQLQESGGGLAQAGGSLRLSCAASGRTFSMGWFRQAPGKEREFVAAITYSGGSPYYASSVRGRFTISRDNAKNTVYLQMNSLKPEDTAVYYCAANPTYGSDWNAENWGQGTQVTVSSGSGGGGSGGGGSGGGGSFEQVQLQQPGAELVKPGASVKMSCKASGYAFSSYWINWMKQKPGQGLEWIGQIYPGDGDTNYNGKFKGRATLTADTSSSTAYMQLSSLTSEDSAVYFCARSITTVVGCAMDYWGQGTSVTVSSTRASTKGPSVFPLAPSSKSTSGGTAALGCLVKDYFPEPVTVSWNSGALTSGVHTFPAVLQSSGLYSLSSVVTVPSSSLGTQTYICNVNHKPSNTKVDKRVEPKSCIPEDTFFPSPESSCDVKLVEKSFETDTNLNFQNLSVIGFRILLLKVAGFNLLMTLRLWSS

SEQ ID NO: 16256 - protein, 771 aa, Artificial Sequence
  Synthetic Polypeptide
MALPVTALLLPLALLLHAARPEVQLLESGGGLVQPGGSLRLSCAASGFTFSSYAMSWVRQAPGKGLEWVSSISGSGDYIYYADSVKGRFTISRDISKNTLYLQMNSLRAEDTAVYYCAKEGTGANSSLADYRGQGTLVTVSSGGGSGGGSEVQLVESGGGSVQAGGSLRLSCTTSGRALNMYVMGWFRQAPGNEREFVAATSSSGGSTSYPDSVKGRFTISRDNAKNTVYLQMNSLKPEDTAAYRCAASPYVSTPTMNILEEYRYWGLGTQVTVSSGTGGGGSGGGGSGGGGSEFDIQMTQSPSSLSASVGDRVTITCKASDHINNWLAWYQQKPGQAPKLLIYGATTLETGVPSRFSGSGSGTDYTLTISSLQPEDFATYYCQQSWNTPWTFGQGTKLEIKRGGGGSGGGGSGGGGSQVQLQQPGAELVKPGASVKMSCKASGYAFSSYWINWMKQKPGQGLEWIGQIYPGDGDTNYNGKFKGRATLTADTSSSTAYMQLSSLTSEDSAVYFCARSITTVVGCAMDYWGQGTSVTVSSTREQKLISEEDLKIEVMYPPPYLDNEKSNGTIIHVKGKHLCPSPLFPGPSKPFWVLVVVGGVLACYSLLVTVAFIIFWVRSKRSRLLHSDYMNMTPRRPGPTRKHYQPYAPPRDFAAYRSRVKFSRSADAPAYQQGQNQLYNELNLGRREEYDVLDKRRGRDPEMGGKPRRKNPQEGLYNELQKDKMAEAYSEIGMKGERRRGKGHDGLYQGLSTATKDTYDALHMQALPPR

SEQ ID NO: 16257 - protein, 777 aa, Artificial Sequence
  Synthetic Polypeptide
MALPVTALLLPLALLLHAARPEVQLLESGGGLVQPGGSLRLSCAASGFTFSSYAMSWVRQAPGKGLEWVSSISGSGDYIYYADSVKGRFTISRDISKNTLYLQMNSLRAEDTAVYYCAKEGTGANSSLADYRGQGTLVTVSSGGGSGGGSEVQLVESGGGSVQAGGSLRLSCTTSGRALNMYVMGWFRQAPGNEREFVAATSSSGGSTSYPDSVKGRFTISRDNAKNTVYLQMNSLKPEDTAAYRCAASPYVSTPTMNILEEYRYWGLGTQVTVSSGTGGGGSGGGGSGGGGSEFDIQMTQSPSSLSASVGDRVTITCKASDHINNWLAWYQQKPGQAPKLLIYGATTLETGVPSRFSGSGSGTDYTLTISSLQPEDFATYYCQQSWNTPWTFGQGTKLEIKRGGGGSGGGGSGGGGSQVQLQQPGAELVKPGASVKMSCKASGYAFSSYWINWMKQKPGQGLEWIGQIYPGDGDTNYNGKFKGRATLTADTSSSTAYMQLSSLTSEDSAVYFCARSITTVVGCAMDYWGQGTSVTVSSTREQKLISEEDLAKPTTTPAPRPPTPAPTIASQPLSLRPEACRPAAGGAVHTRGLDFACDIYIWAPLAGTCGVLLLSLVITLYCKRGRKKLLYIFKQPFMRPVQTTQEEDGCSCRFPEEEEGGCELRVKFSRSADAPAYQQGQNQLYNELNLGRREEYDVLDKRRGRDPEMGGKPRRKNPQEGLYNELQKDKMAEAYSEIGMKGERRRGKGHDGLYQGLSTATKDTYDALHMQALPPR

SEQ ID NO: 16258 - protein, 1190 aa, Artificial Sequence
  Synthetic Polypeptide
MALPVTALLLPLALLLHAARPEVQLLESGGGLVQPGGSLRLSCAASGFTFSSYAMSWVRQAPGKGLEWVSSISGSGDYIYYADSVKGRFTISRDISKNTLYLQMNSLRAEDTAVYYCAKEGTGANSSLADYRGQGTLVTVSSGGGSGGGSEVQLVESGGGSVQAGGSLRLSCTTSGRALNMYVMGWFRQAPGNEREFVAATSSSGGSTSYPDSVKGRFTISRDNAKNTVYLQMNSLKPEDTAAYRCAASPYVSTPTMNILEEYRYWGLGTQVTVSSGTGGGGSGGGGSGGGGSEFDIQMTQSPSSLSASVGDRVTITCKASDHINNWLAWYQQKPGQAPKLLIYGATTLETGVPSRFSGSGSGTDYTLTISSLQPEDFATYYCQQSWNTPWTFGQGTKLEIKRGGGGSGGGGSGGGGSQVQLQQPGAELVKPGASVKMSCKASGYAFSSYWINWMKQKPGQGLEWIGQIYPGDGDTNYNGKFKGRATLTADTSSSTAYMQLSSLTSEDSAVYFCARSITTVVGCAMDYWGQGTSVTVSSTREQKLISEEDLAKPTTTPAPRPPTPAPTIASQPLSLRPEACRPAAGGAVHTRGLDFACDIYIWAPLAGTCGVLLLSLVITLYCGRARVKFSRSADAPAYQQGQNQLYNELNLGRREEYDVLDKRRGRDPEMGGKPRRKNPQEGLYNELQKDKMAEAYSEIGMKGERRRGKGHDGLYQGLSTATKDTYDALHMQALPPRSRGSGATNFSLLKQAGDVEENPGPGIHMATYEVLCEVARKLGTDDREVVLFLLNVFIPQPTLAQLIGALRALKEEGRLTFPLLAECLFRAGRRDLLRDLLHLDPRFLERHLAGTMSYFSPYQLTVLHVDGELCARDIRSLIFLSKDTIGSRSTPQTFLHWVYCMENLDLLGPTDVDALMSMLRSLSRVDLQRQVQTLMGLHLSGPSHSQHYRHTPLETDFYDYKDDDDKTSGSGEGRGSLLTCGDVEENPGPHMTEYKPTVRLATRDDVPRAVRTLAAAFADYPATRHTVDPDRHIERVTELQELFLTRVGLDIGKVWVADDGAAVAVWTTPESVEAGAVFAEIGPRMAELSGSRLAAQQQMEGLLAPHRPKEPAWFLATVGVSPDHQGKGLGSAVVLPGVEAAERAGVPAFLETSAPRNLPFYERLGFTVTADVEVPEGPRTWCMTRKPGA

SEQ ID NO: 16259 - protein, 1130 aa, Artificial Sequence
  Synthetic Polypeptide
MALPVTALLLPLALLLHAARPEVQLLESGGGLVQPGGSLRLSCAASGFTFSSYAMSWVRQAPGKGLEWVSSISGSGDYIYYADSVKGRFTISRDISKNTLYLQMNSLRAEDTAVYYCAKEGTGANSSLADYRGQGTLVTVSSGGGSGGGSEVQLVESGGGSVQAGGSLRLSCTTSGRALNMYVMGWFRQAPGNEREFVAATSSSGGSTSYPDSVKGRFTISRDNAKNTVYLQMNSLKPEDTAAYRCAASPYVSTPTMNILEEYRYWGLGTQVTVSSGTGGGGSGGGGSGGGGSEFDIQMTQSPSSLSASVGDRVTITCKASDHINNWLAWYQQKPGQAPKLLIYGATTLETGVPSRFSGSGSGTDYTLTISSLQPEDFATYYCQQSWNTPWTFGQGTKLEIKRLEIQNPDPAVYQLRDSKSSDKSVCLFTDFDSQTNVSQSKDSDVYITDKCVLDMRSMDFKSNSAVAWSNKSDFACANAFNNSIIPEDTFFPSSDVPCDVKLVEKSFETDTNLNFQNLSVIGFRILLLKVAGFNLLMTLRLWSSRAKRSGSGVKQTLNFDLLKLAGDVESNPGPTSMDWIWRILFLVGAATGAHSFEQVQLQQPGAELVKPGASVKMSCKASGYAFSSYWINWMKQKPGQGLEWIGQIYPGDGDTNYNGKFKGRATLTADTSSSTAYMQLSSLTSEDSAVYFCARSITTVVGCAMDYWGQGTSVTVSSTREDLKNVFPPEVAVFEPSKAEIAHTQKATLVCLATGFYPDHVELSWWVNGKEVHSGVCTDPQPLKEQPALNDSRYCLSSRLRVSATFWQNPRNHFRCQVQFYGLSENDEWTQDRAKPVTQIVSAEAWGRADCGITSASYHQGVLSATILYEILLGKATLYAVLVSALVLMAMVKRKDSRGRAKRSGSGATNFSLLKQAGDVEENPGPSRGHMTEYKPTVRLATRDDVPRAVRTLAAAFADYPATRHTVDPDRHIERVTELQELFLTRVGLDIGKVWVADDGAAVAVWTTPESVEAGAVFAEIGPRMAELSGSRLAAQQQMEGLLAPHRPKEPAWFLATVGVSPDHQGKGLGSAVVLPGVEAAERAGVPAFLETSAPRNLPFYERLGFTVTADVEVPEGPRTWCMTRKPGA

SEQ ID NO: 16260 - protein, 1129 aa, Artificial Sequence
  Synthetic Polypeptide
MALPVTALLLPLALLLHAARPEVQLLESGGGLVQPGGSLRLSCAASGFTFSSYAMSWVRQAPGKGLEWVSSISGSGDYIYYADSVKGRFTISRDISKNTLYLQMNSLRAEDTAVYYCAKEGTGANSSLADYRGQGTLVTVSSGGGSGGGSEVQLVESGGGSVQAGGSLRLSCTTSGRALNMYVMGWFRQAPGNEREFVAATSSSGGSTSYPDSVKGRFTISRDNAKNTVYLQMNSLKPEDTAAYRCAASPYVSTPTMNILEEYRYWGLGTQVTVSSGTGGGGSGGGGSGGGGSEFDIQMTQSPSSLSASVGDRVTITCKASDHINNWLAWYQQKPGQAPKLLIYGATTLETGVPSRFSGSGSGTDYTLTISSLQPEDFATYYCQQSWNTPWTFGQGTKLEIKRLEDLKNVFPPEVAVFEPSKAEIAHTQKATLVCLATGFYPDHVELSWWVNGKEVHSGVCTDPQPLKEQPALNDSRYCLSSRLRVSATFWQNPRNHFRCQVQFYGLSENDEWTQDRAKPVTQIVSAEAWGRADCGITSASYHQGVLSATILYEILLGKATLYAVLVSALVLMAMVKRKDSRGRAKRSGSGATNFSLLKQAGDVEENPGPTSMDWIWRILFLVGAATGAHSFEQVQLQQPGAELVKPGASVKMSCKASGYAFSSYWINWMKQKPGQGLEWIGQIYPGDGDTNYNGKFKGRATLTADTSSSTAYMQLSSLTSEDSAVYFCARSITTVVGCAMDYWGQGTSVTVSSTRIQNPDPAVYQLRDSKSSDKSVCLFTDFDSQTNVSQSKDSDVYITDKCVLDMRSMDFKSNSAVAWSNKSDFACANAFNNSIIPEDTFFPSSDVPCDVKLVEKSFETDTNLNFQNLSVIGFRILLLKVAGFNLLMTLRLWSSRAKRSGSGVKQTLNFDLLKLAGDVESNPGPSRGHMTEYKPTVRLATRDDVPRAVRTLAAAFADYPATRHTVDPDRHIERVTELQELFLTRVGLDIGKVWVADDGAAVAVWTTPESVEAGAVFAEIGPRMAELSGSRLAAQQQMEGLLAPHRPKEPAWFLATVGVSPDHQGKGLGSAVVLPGVEAAERAGVPAFLETSAPRNLPFYERLGFTVTADVEVPEGPRTWCMTRKPGA

SEQ ID NO: 16261 - protein, 896 aa, Artificial Sequence
  Synthetic Polypeptide
MALPVTALLLPLALLLHAARPEVQLLESGGGLVQPGGSLRLSCAASGFTFSSYAMSWVRQAPGKGLEWVSSISGSGDYIYYADSVKGRFTISRDISKNTLYLQMNSLRAEDTAVYYCAKEGTGANSSLADYRGQGTLVTVSSGGGSGGGSEVQLVESGGGSVQAGGSLRLSCTTSGRALNMYVMGWFRQAPGNEREFVAATSSSGGSTSYPDSVKGRFTISRDNAKNTVYLQMNSLKPEDTAAYRCAASPYVSTPTMNILEEYRYWGLGTQVTVSSGTGGGGSGGGGSGGGGSEFDIQMTQSPSSLSASVGDRVTITCKASDHINNWLAWYQQKPGQAPKLLIYGATTLETGVPSRFSGSGSGTDYTLTISSLQPEDFATYYCQQSWNTPWTFGQGTKLEIKRLEDLKNVFPPEVAVFEPSEAEISHTQKATLVCLATGFYPDHVELSWWVNGKEVHSGVCTDPQPLKEQPALNDSRYCLSSRLRVSATFWQNPRNHFRCQVQFYGLSENDEWTQDRAKPVTQIVSAEAWGRADCGFTSESYQQGVLSATILYEILLGKATLYAVLVSALVLMAMVKRKDSRGRAKRSGSGATNFSLLKQAGDVEENPGPTSMDWIWRILFLVGAATGAHSFEQVQLQQPGAELVKPGASVKMSCKASGYAFSSYWINWMKQKPGQGLEWIGQIYPGDGDTNYNGKFKGRATLTADTSSSTAYMQLSSLTSEDSAVYFCARSITTVVGCAMDYWGQGTSVTVSSTRIQNPDPAVYQLRDSKSSDKSVCLFTDFDSQTNVSQSKDSDVYITDKCVLDMRSMDFKSNSAVAWSNKSDFACANAFNNSIIPEDTFFPSPESSCDVKLVEKSFETDTNLNFQNLSVIGFRILLLKVAGFNLLMTLRLWSS

SEQ ID NO: 16262 - protein, 1121 aa, Artificial Sequence
  Synthetic Polypeptide
MALPVTALLLPLALLLHAARPEVQLLESGGGLVQPGGSLRLSCAASGFTFSSYAMSWVRQAPGKGLEWVSSISGSGDYIYYADSVKGRFTISRDISKNTLYLQMNSLRAEDTAVYYCAKEGTGANSSLADYRGQGTLVTVSSGGGSGGGSEVQLVESGGGSVQAGGSLRLSCTTSGRALNMYVMGWFRQAPGNEREFVAATSSSGGSTSYPDSVKGRFTISRDNAKNTVYLQMNSLKPEDTAAYRCAASPYVSTPTMNILEEYRYWGLGTQVTVSSGTGGGGSGGGGSGGGGSEFDIQMTQSPSSLSASVGDRVTITCKASDHINNWLAWYQQKPGQAPKLLIYGATTLETGVPSRFSGSGSGTDYTLTISSLQPEDFATYYCQQSWNTPWTFGQGTKLEIKRLEDLKNVFPPEVAVFEPSEAEISHTQKATLVCLATGFYPDHVELSWWVNGKEVHSGVCTDPQPLKEQPALNDSRYCLSSRLRVSATFWQNPRNHFRCQVQFYGLSENDEWTQDRAKPVTQIVSAEAWGRADCGFTSESYQQGVLSATILYEILLGKATLYAVLVSALVLMAMVKRKDSRGRAKRSGSGATNFSLLKQAGDVEENPGPTSMDWIWRILFLVGAATGAHSFEQVQLQQPGAELVKPGASVKMSCKASGYAFSSYWINWMKQKPGQGLEWIGQIYPGDGDTNYNGKFKGRATLTADTSSSTAYMQLSSLTSEDSAVYFCARSITTVVGCAMDYWGQGTSVTVSSTRIQNPDPAVYQLRDSKSSDKSVCLFTDFDSQTNVSQSKDSDVYITDKCVLDMRSMDFKSNSAVAWSNKSDFACANAFNNSIIPEDTFFPSPESSCDVKLVEKSFETDTNLNFQNLSVIGFRILLLKVAGFNLLMTLRLWSSRAKRSGSGVKQTLNFDLLKLAGDVESNPGPSRGGIHTMATYEVLCEVARKLGTDDREVVLFLLNVFIPQPTLAQLIGALRALKEEGRLTFPLLAECLFRAGRRDLLRDLLHLDPRFLERHLAGTMSYFSPYQLTVLHVDGELCARDIRSLIFLSKDTIGSRSTPQTFLHWVYCMENLDLLGPTDVDALMSMLRSLSRVDLQRQVQTLMGLHLSGPSHSQHYRHTP

SEQ ID NO: 16263 - protein, 900 aa, Artificial Sequence
  Synthetic Polypeptide
MALPVTALLLPLALLLHAARPEVQLLESGGGLVQPGGSLRLSCAASGFTFSSYAMSWVRQAPGKGLEWVSSISGSGDYIYYADSVKGRFTISRDISKNTLYLQMNSLRAEDTAVYYCAKEGTGANSSLADYRGQGTLVTVSSGGGSGGGSEVQLVESGGGSVQAGGSLRLSCTTSGRALNMYVMGWFRQAPGNEREFVAATSSSGGSTSYPDSVKGRFTISRDNAKNTVYLQMNSLKPEDTAAYRCAASPYVSTPTMNILEEYRYWGLGTQVTVSSGTGGGGSGGGGSGGGGSEFDIQMTQSPSSLSASVGDRVTITCKASDHINNWLAWYQQKPGQAPKLLIYGATTLETGVPSRFSGSGSGTDYTLTISSLQPEDFATYYCQQSWNTPWTFGQGTKLEIKRLEIQNPDPAVYQLRDSKSSDKSVCLFTDFDSQTNVSQSKDSDVYITDKCVLDMRSMDFKSNSAVAWSNKSDFACANAFNNSIIPEDTFFPSPESSCDVKLVEKSFETDTNLNFQNLSVIGFRILLLKVAGFNLLMTLRLWSSRAKRSGSGVKQTLNFDLLKLAGDVESNPGPTSMDWIWRILFLVGAATGAHSFEQVQLQQPGAELVKPGASVKMSCKASGYAFSSYWINWMKQKPGQGLEWIGQIYPGDGDTNYNGKFKGRATLTADTSSSTAYMQLSSLTSEDSAVYFCARSITTVVGCAMDYWGQGTSVTVSSTREDLKNVFPPEVAVFEPSEAEISHTQKATLVCLATGFYPDHVELSWWVNGKEVHSGVCTDPQPLKEQPALNDSRYCLSSRLRVSATFWQNPRNHFRCQVQFYGLSENDEWTQDRAKPVTQIVSAEAWGRADCGFTSESYQQGVLSATILYEILLGKATLYAVLVSALVLMAMVKRKDSRG

SEQ ID NO: 16264 - protein, 1122 aa, Artificial Sequence
  Synthetic Polypeptide
MALPVTALLLPLALLLHAARPEVQLLESGGGLVQPGGSLRLSCAASGFTFSSYAMSWVRQAPGKGLEWVSSISGSGDYIYYADSVKGRFTISRDISKNTLYLQMNSLRAEDTAVYYCAKEGTGANSSLADYRGQGTLVTVSSGGGSGGGSEVQLVESGGGSVQAGGSLRLSCTTSGRALNMYVMGWFRQAPGNEREFVAATSSSGGSTSYPDSVKGRFTISRDNAKNTVYLQMNSLKPEDTAAYRCAASPYVSTPTMNILEEYRYWGLGTQVTVSSGTGGGGSGGGGSGGGGSEFDIQMTQSPSSLSASVGDRVTITCKASDHINNWLAWYQQKPGQAPKLLIYGATTLETGVPSRFSGSGSGTDYTLTISSLQPEDFATYYCQQSWNTPWTFGQGTKLEIKRLEIQNPDPAVYQLRDSKSSDKSVCLFTDFDSQTNVSQSKDSDVYITDKCVLDMRSMDFKSNSAVAWSNKSDFACANAFNNSIIPEDTFFPSPESSCDVKLVEKSFETDTNLNFQNLSVIGFRILLLKVAGFNLLMTLRLWSSRAKRSGSGVKQTLNFDLLKLAGDVESNPGPTSMDWIWRILFLVGAATGAHSFEQVQLQQPGAELVKPGASVKMSCKASGYAFSSYWINWMKQKPGQGLEWIGQIYPGDGDTNYNGKFKGRATLTADTSSSTAYMQLSSLTSEDSAVYFCARSITTVVGCAMDYWGQGTSVTVSSTREDLKNVFPPEVAVFEPSEAEISHTQKATLVCLATGFYPDHVELSWWVNGKEVHSGVCTDPQPLKEQPALNDSRYCLSSRLRVSATFWQNPRNHFRCQVQFYGLSENDEWTQDRAKPVTQIVSAEAWGRADCGFTSESYQQGVLSATILYEILLGKATLYAVLVSALVLMAMVKRKDSRGRAKRSGSGATNFSLLKQAGDVEENPGPSRGGIHTMATYEVLCEVARKLGTDDREVVLFLLNVFIPQPTLAQLIGALRALKEEGRLTFPLLAECLFRAGRRDLLRDLLHLDPRFLERHLAGTMSYFSPYQLTVLHVDGELCARDIRSLIFLSKDTIGSRSTPQTFLHWVYCMENLDLLGPTDVDALMSMLRSLSRVDLQRQVQTLMGLHLSGPSHSQHYRHTP

SEQ ID NO: 16265 - protein, 1174 aa, Artificial Sequence
  Synthetic Polypeptide
MALPVTALLLPLALLLHAARPLEGKPIPNPLLGLDSTGSGEDLKNVFPPEVAVFEPSKAEIAHTQKATLVCLATGFYPDHVELSWWVNGKEVHSGVCTDPQPLKEQPALNDSRYCLSSRLRVSATFWQNPRNHFRCQVQFYGLSENDEWTQDRAKPVTQIVSAEAWGRADCGITSASYHQGVLSATILYEILLGKATLYAVLVSALVLMAMVKRKDSRGRAKRSGSGATNFSLLKQAGDVEENPGPTSMALPVTALLLPLALLLHAARPEVQLLESGGGLVQPGGSLRLSCAASGFTFSSYAMSWVRQAPGKGLEWVSSISGSGDYIYYADSVKGRFTISRDISKNTLYLQMNSLRAEDTAVYYCAKEGTGANSSLADYRGQGTLVTVSSGGGSGGGSEVQLVESGGGSVQAGGSLRLSCTTSGRALNMYVMGWFRQAPGNEREFVAATSSSGGSTSYPDSVKGRFTISRDNAKNTVYLQMNSLKPEDTAAYRCAASPYVSTPTMNILEEYRYWGLGTQVTVSSGTGGGGSGGGGSGGGGSEFDIQMTQSPSSLSASVGDRVTITCKASDHINNWLAWYQQKPGQAPKLLIYGATTLETGVPSRFSGSGSGTDYTLTISSLQPEDFATYYCQQSWNTPWTFGQGTKLEIKRGGGGSGGGGSGGGGSQVQLQQPGAELVKPGASVKMSCKASGYAFSSYWINWMKQKPGQGLEWIGQIYPGDGDTNYNGKFKGRATLTADTSSSTAYMQLSSLTSEDSAVYFCARSITTVVGCAMDYWGQGTSVTVSSTREQKLISEEDGSGIQNPDPAVYQLRDSKSSDKSVCLFTDFDSQTNVSQSKDSDVYITDKCVLDMRSMDFKSNSAVAWSNKSDFACANAFNNSIIPEDTFFPSSDVPCDVKLVEKSFETDTNLNFQNLSVIGFRILLLKVAGFNLLMTLRLWSSRAKRSGSGVKQTLNFDLLKLAGDVESNPGPSRGHMTEYKPTVRLATRDDVPRAVRTLAAAFADYPATRHTVDPDRHIERVTELQELFLTRVGLDIGKVWVADDGAAVAVWTTPESVEAGAVFAEIGPRMAELSGSRLAAQQQMEGLLAPHRPKEPAWFLATVGVSPDHQGKGLGSAVVLPGVEAAERAGVPAFLETSAPRNLPFYERLGFTVTADVEVPEGPRTWCMTRKPGA

SEQ ID NO: 16266 - protein, 1175 aa, Artificial Sequence
  Synthetic Polypeptide
MALPVTALLLPLALLLHAARPLEQKLISEEDLGSGDRPDPAVYQLRDSKSSDKSVCLFTDFDSQTNVSQSKDSDVYITDKCVLDMRSMDFKSNSAVAWSNKSDFACANAFNNSIIPEDTFFPSPESSCDVKLVEKSFETDTNLNFQNLSVIGFRILLLKVAGFNLLMTLRLWSSSSRAKRSGSGVKQTLNFDLLKLAGDVESNPGPTSMALPVTALLLPLALLLHAARPEVQLLESGGGLVQPGGSLRLSCAASGFTFSSYAMSWVRQAPGKGLEWVSSISGSGDYIYYADSVKGRFTISRDISKNTLYLQMNSLRAEDTAVYYCAKEGTGANSSLADYRGQGTLVTVSSGGGSGGGSEVQLVESGGGSVQAGGSLRLSCTTSGRALNMYVMGWFRQAPGNEREFVAATSSSGGSTSYPDSVKGRFTISRDNAKNTVYLQMNSLKPEDTAAYRCAASPYVSTPTMNILEEYRYWGLGTQVTVSSGTGGGGSGGGGSGGGGSEFDIQMTQSPSSLSASVGDRVTITCKASDHINNWLAWYQQKPGQAPKLLIYGATTLETGVPSRFSGSGSGTDYTLTISSLQPEDFATYYCQQSWNTPWTFGQGTKLEIKRGGGGSGGGGSGGGGSQVQLQQPGAELVKPGASVKMSCKASGYAFSSYWINWMKQKPGQGLEWIGQIYPGDGDTNYNGKFKGRATLTADTSSSTAYMQLSSLTSEDSAVYFCARSITTVVGCAMDYWGQGTSVTVSSTRGKPIPNPLLGLDSTGSGEDLKNVFPPEVAVFEPSEAEISHTQKATLVCLATGFYPDHVELSWWVNGKEVHSGVCTDPQPLKEQPALNDSRYCLSSRLRVSATFWQNPRNHFRCQVQFYGLSENDEWTQDRAKPVTQIVSAEAWGRADCGFTSESYQQGVLSATILYEILLGKATLYAVLVSALVLMAMVKRKDSRGRAKRSGSGATNFSLLKQAGDVEENPGPSRGHMTEYKPTVRLATRDDVPRAVRTLAAAFADYPATRHTVDPDRHIERVTELQELFLTRVGLDIGKVWVADDGAAVAVWTTPESVEAGAVFAEIGPRMAELSGSRLAAQQQMEGLLAPHRPKEPAWFLATVGVSPDHQGKGLGSAVVLPGVEAAERAGVPAFLETSAPRNLPFYERLGFTVTADVEVPEGPRTWCMTRKPGA

SEQ ID NO: 16267 - protein, 1129 aa, Artificial Sequence
  Synthetic Polypeptide
MALPVTALLLPLALLLHAARPEVQLLESGGGLVQPGGSLRLSCAASGFTFSSYAMSWVRQAPGKGLEWVSSISGSGDYIYYADSVKGRFTISRDISKNTLYLQMNSLRAEDTAVYYCAKEGTGANSSLADYRGQGTLVTVSSGGGSGGGSEVQLVESGGGSVQAGGSLRLSCTTSGRALNMYVMGWFRQAPGNEREFVAATSSSGGSTSYPDSVKGRFTISRDNAKNTVYLQMNSLKPEDTAAYRCAASPYVSTPTMNILEEYRYWGLGTQVTVSSGTGGGGSGGGGSGGGGSEFDIQMTQSPSSLSASVGDRVTITCKASDHINNWLAWYQQKPGQAPKLLIYGATTLETGVPSRFSGSGSGTDYTLTISSLQPEDFATYYCQQSWNTPWTFGQGTKLEIKRLEDLKNVFPPEVAVFEPSEAEISHTQKATLVCLATGFYPDHVELSWWVNGKEVHSGVSTDPQPLKEQPALNDSRYCLSSRLRVSATFWQNPRNHFRCQVQFYGLSENDEWTQDRAKPVTQIVSAEAWGRADCGFTSESYQQGVLSATILYEILLGKATLYAVLVSALVLMAMVKRKDSRGRAKRSGSGATNFSLLKQAGDVEENPGPTSMDWIWRILFLVGAATGAHSFEQVQLQQPGAELVKPGASVKMSCKASGYAFSSYWINWMKQKPGQGLEWIGQIYPGDGDTNYNGKFKGRATLTADTSSSTAYMQLSSLTSEDSAVYFCARSITTVVGCAMDYWGQGTSVTVSSTRIQNPDPAVYQLRDSKSSDKSVCLFTDFDSQTNVSQSKDSDVYITDKTVLDMRSMDFKSNSAVAWSNKSDFACANAFNNSIIPEDTFFPSPESSCDVKLVEKSFETDTNLNFQNLSVIGFRILLLKVAGFNLLMTLRLWSSRAKRSGSGVKQTLNFDLLKLAGDVESNPGPSRGHMTEYKPTVRLATRDDVPRAVRTLAAAFADYPATRHTVDPDRHIERVTELQELFLTRVGLDIGKVWVADDGAAVAVWTTPESVEAGAVFAEIGPRMAELSGSRLAAQQQMEGLLAPHRPKEPAWFLATVGVSPDHQGKGLGSAVVLPGVEAAERAGVPAFLETSAPRNLPFYERLGFTVTADVEVPEGPRTWCMTRKPGA

SEQ ID NO: 16268 - protein, 1211 aa, Artificial Sequence
  Synthetic Polypeptide
MALPVTALLLPLALLLHAARPEVQLLESGGGLVQPGGSLRLSCAASGFTFSSYAMSWVRQAPGKGLEWVSSISGSGDYIYYADSVKGRFTISRDISKNTLYLQMNSLRAEDTAVYYCAKEGTGANSSLADYRGQGTLVTVSSGGGSGGGSEVQLVESGGGSVQAGGSLRLSCTTSGRALNMYVMGWFRQAPGNEREFVAATSSSGGSTSYPDSVKGRFTISRDNAKNTVYLQMNSLKPEDTAAYRCAASPYVSTPTMNILEEYRYWGLGTQVTVSSGTGGGGSGGGGSGGGGSEFDIQMTQSPSSLSASVGDRVTITCKASDHINNWLAWYQQKPGQAPKLLIYGATTLETGVPSRFSGSGSGTDYTLTISSLQPEDFATYYCQQSWNTPWTFGQGTKLEIKRLEDLKNVFPPEVAVFEPSEAEISHTQKATLVCLATGFYPDHVELSWWVNGKEVHSGVSTDPQPLKEQPALNDSRYCLSSRLRVSATFWQNPRNHFRCQVQFYGLSENDEWTQDRAKPVTQIVSAEAWGRADCGFTSESYQQGVLSATILYEILLGKATLYAVLVSALVLMAMVKRKDSRGRAKRSGSGATNFSLLKQAGDVEENPGPTSMDWIWRILFLVGAATGAHSFEQVQLQQPGAELVKPGASVKMSCKASGYAFSSYWINWMKQKPGQGLEWIGQIYPGDGDTNYNGKFKGRATLTADTSSSTAYMQLSSLTSEDSAVYFCARSITTVVGCAMDYWGQGTSVTVSSTREQKLISEEDGSGTPFPSLAPPIMLLVDGKQQMVVVCLVLDVAPPGLDSPIWFSAGNGSALDAFTYGPSPATDGTWTNLAHLSLPSEELASWEPLVCHTGPGAEGHSRSTQPMHLSGEASTARTCPQEPLRGTPGGALWLGVLRLLLFKLLLFDLLLTCSCLCDPAGPLPSPATTTRLRALGSHRLHPATETGGREATSSPRPQPRDRRWGDTPPGRKPGSPVRAKRSGSGVKQTLNFDLLKLAGDVESNPGPSRGHMTEYKPTVRLATRDDVPRAVRTLAAAFADYPATRHTVDPDRHIERVTELQELFLTRVGLDIGKVWVADDGAAVAVWTTPESVEAGAVFAEIGPRMAELSGSRLAAQQQMEGLLAPHRPKEPAWFLATVGVSPDHQGKGLGSAVVLPGVEAAERAGVPAFLETSAPRNLPFYERLGFTVTADVEVPEGPRTWCMTRKPGA

SEQ ID NO: 16269 - protein, 1229 aa, Artificial Sequence
  Synthetic Polypeptide
MALPVTALLLPLALLLHAARPLEDLKNVFPPEVAVFEPSEAEISHTQKATLVCLATGFYPDHVELSWWVNGKEVHSGVSTDPQPLKEQPALNDSRYCLSSRLRVSATFWQNPRNHFRCQVQFYGLSENDEWTQDRAKPVTQIVSAEAWGRADCGFTSESYQQGVLSATILYEILLGKATLYAVLVSALVLMAMVKRKDSRGRAKRSGSGATNFSLLKQAGDVEENPGPTSMALPVTALLLPLALLLHAARPEVQLLESGGGLVQPGGSLRLSCAASGFTFSSYAMSWVRQAPGKGLEWVSSISGSGDYIYYADSVKGRFTISRDISKNTLYLQMNSLRAEDTAVYYCAKEGTGANSSLADYRGQGTLVTVSSGGGSGGGSEVQLVESGGGSVQAGGSLRLSCTTSGRALNMYVMGWFRQAPGNEREFVAATSSSGGSTSYPDSVKGRFTISRDNAKNTVYLQMNSLKPEDTAAYRCAASPYVSTPTMNILEEYRYWGLGTQVTVSSGTGGGGSGGGGSGGGGSEFDIQMTQSPSSLSASVGDRVTITCKASDHINNWLAWYQQKPGQAPKLLIYGATTLETGVPSRFSGSGSGTDYTLTISSLQPEDFATYYCQQSWNTPWTFGQGTKLEIKRGGGGSGGGGSGGGGSQVQLQQPGAELVKPGASVKMSCKASGYAFSSYWINWMKQKPGQGLEWIGQIYPGDGDTNYNGKFKGRATLTADTSSSTAYMQLSSLTSEDSAVYFCARSITTVVGCAMDYWGQGTSVTVSSTREQKLISEEDLGSGTPFPSLAPPIMLLVDGKQQMVVVCLVLDVAPPGLDSPIWFSAGNGSALDAFTYGPSPATDGTWTNLAHLSLPSEELASWEPLVCHTGPGAEGHSRSTQPMHLSGEASTARTCPQEPLRGTPGGALWLGVLRLLLFKLLLFDLLLTCSCLCDPAGPLPSPATTTRLRALGSHRLHPATETGGREATSSPRPQPRDRRWGDTPPGRKPGSPVRAKRSGSGVKQTLNFDLLKLAGDVESNPGPSRSRGHMTEYKPTVRLATRDDVPRAVRTLAAAFADYPATRHTVDPDRHIERVTELQELFLTRVGLDIGKVWVADDGAAVAVWTTPESVEAGAVFAEIGPRMAELSGSRLAAQQQMEGLLAPHRPKEPAWFLATVGVSPDHQGKGLGSAVVLPGVEAAERAGVPAFLETSAPRNLPFYERLGFTVTADVEVPEGPRTWCMTRKPGA

SEQ ID NO: 16270 - protein, 1166 aa, Artificial Sequence
  Synthetic Polypeptide
MALPVTALLLPLALLLHAARPEVQLLESGGGLVQPGGSLRLSCAASGFTFSSYAMSWVRQAPGKGLEWVSSISGSGDYIYYADSVKGRFTISRDISKNTLYLQMNSLRAEDTAVYYCAKEGTGANSSLADYRGQGTLVTVSSGGGSGGGSEVQLVESGGGSVQAGGSLRLSCTTSGRALNMYVMGWFRQAPGNEREFVAATSSSGGSTSYPDSVKGRFTISRDNAKNTVYLQMNSLKPEDTAAYRCAASPYVSTPTMNILEEYRYWGLGTQVTVSSGTGGGGSGGGGSGGGGSEFDIQMTQSPSSLSASVGDRVTITCKASDHINNWLAWYQQKPGQAPKLLIYGATTLETGVPSRFSGSGSGTDYTLTISSLQPEDFATYYCQQSWNTPWTFGQGTKLEIKRLEGKPIPNPLLGLDSTGSGDKQLDADVSPKPTIFLPSIAETKLQKAGTYLCLLEKFFPDVIKIHWQEKKSNTILGSQEGNTMKTNDTYMKFSWLTVPEKSLDKEHRCIVRHENNKNGVDQEIIFPPIKTDVITMDPKDNCSKDANDTLLLQLTNTSAYYMYLLLLLKSVVYFAIITCCLLRRTAFCCNGEKSRAKRSGSGATNFSLLKQAGDVEENPGPTSMDWIWRILFLVGAATGAHSFEQVQLQQPGAELVKPGASVKMSCKASGYAFSSYWINWMKQKPGQGLEWIGQIYPGDGDTNYNGKFKGRATLTADTSSSTAYMQLSSLTSEDSAVYFCARSITTVVGCAMDYWGQGTSVTVSSTREQKLISEEDGSGSQPHTKPSVFVMKNGTNVACLVKEFYPKDIRINLVSSKKITEFDPAIVISPSGKYNAVKLGKYEDSNSVTCSVQHDNKTVHSTDFEVKTDSTDHVKPKETENTKQPSKSCHKPKAIVHTEKVNMMSLTVLGLRMLFAKTVAVNFLLTAKLFFLRAKRSGSGVKQTLNFDLLKLAGDVESNPGPSRGHMTEYKPTVRLATRDDVPRAVRTLAAAFADYPATRHTVDPDRHIERVTELQELFLTRVGLDIGKVWVADDGAAVAVWTTPESVEAGAVFAEIGPRMAELSGSRLAAQQQMEGLLAPHRPKEPAWFLATVGVSPDHQGKGLGSAVVLPGVEAAERAGVPAFLETSAPRNLPFYERLGFTVTADVEVPEGPRTWCMTRKPGA

SEQ ID NO: 16271 - protein, 904 aa, Artificial Sequence
  Synthetic Polypeptide
MALPVTALLLPLALLLHAARPEVQLLESGGGLVQPGGSLRLSCAASGFTFSSYAMSWVRQAPGKGLEWVSSISGSGDYIYYADSVKGRFTISRDISKNTLYLQMNSLRAEDTAVYYCAKEGTGANSSLADYRGQGTLVTVSSGGGSGGGSEVQLVESGGGSVQAGGSLRLSCTTSGRALNMYVMGWFRQAPGNEREFVAATSSSGGSTSYPDSVKGRFTISRDNAKNTVYLQMNSLKPEDTAAYRCAASPYVSTPTMNILEEYRYWGLGTQVTVSSGTGGGGSGGGGSGGGGSEFDIQMTQSPSSLSASVGDRVTITCKASDHINNWLAWYQQKPGQAPKLLIYGATTLETGVPSRFSGSGSGTDYTLTISSLQPEDFATYYCQQSWNTPWTFGQGTKLEIKRLESQPHTKPSVFVMKNGTNVACLVKEFYPKDIRINLVSSKKITEFDPAIVISPSGKYNAVKLGKYEDSNSVTCSVQHDNKTVHSTDFEVKTDSTDHVKPKETENTKQPSKSCHKPKAIVHTEKVNMMSLTVLGLRMLFAKTVAVNFLLTAKLFFLRAKRSGSGATNFSLLKQAGDVEENPGPTSMDWIWRILFLVGAATGAHSFEQVQLQQPGAELVKPGASVKMSCKASGYAFSSYWINWMKQKPGQGLEWIGQIYPGDGDTNYNGKFKGRATLTADTSSSTAYMQLSSLTSEDSAVYFCARSITTVVGCAMDYWGQGTSVTVSSTRDKQLDADVSPKPTIFLPSIAETKLQKAGTYLCLLEKFFPDVIKIHWQEKKSNTILGSQEGNTMKTNDTYMKFSWLTVPEKSLDKEHRCIVRHENNKNGVDQEIIFPPIKTDVITMDPKDNCSKDANDTLLLQLTNTSAYYMYLLLLLKSVVYFAIITCCLLRRTAFCCNGEKS

SEQ ID NO: 16272 - protein, 1181 aa, Artificial Sequence
  Synthetic Polypeptide
MALPVTALLLPLALLLHAARPLEGKPIPNPLLGLDSTGSGDKQLDADVSPKPTIFLPSIAETKLQKAGTYLCLLEKFFPDVIKIHWQEKKSNTILGSQEGNTMKTNDTYMKFSWLTVPEKSLDKEHRCIVRHENNKNGVDQEIIFPPIKTDVITMDPKDNCSKDANDTLLLQLTNTSAYYMYLLLLLKSVVYFAIITCCLLRRTAFCCNGEKSRAKRSGSGATNFSLLKQAGDVEENPGPTSMALPVTALLLPLALLLHAARPEVQLLESGGGLVQPGGSLRLSCAASGFTFSSYAMSWVRQAPGKGLEWVSSISGSGDYIYYADSVKGRFTISRDISKNTLYLQMNSLRAEDTAVYYCAKEGTGANSSLADYRGQGTLVTVSSGGGSGGGSEVQLVESGGGSVQAGGSLRLSCTTSGRALNMYVMGWFRQAPGNEREFVAATSSSGGSTSYPDSVKGRFTISRDNAKNTVYLQMNSLKPEDTAAYRCAASPYVSTPTMNILEEYRYWGLGTQVTVSSGTGGGGSGGGGSGGGGSEFDIQMTQSPSSLSASVGDRVTITCKASDHINNWLAWYQQKPGQAPKLLIYGATTLETGVPSRFSGSGSGTDYTLTISSLQPEDFATYYCQQSWNTPWTFGQGTKLEIKRGGGGSGGGGSGGGGSQVQLQQPGAELVKPGASVKMSCKASGYAFSSYWINWMKQKPGQGLEWIGQIYPGDGDTNYNGKFKGRATLTADTSSSTAYMQLSSLTSEDSAVYFCARSITTVVGCAMDYWGQGTSVTVSSTREQKLISEEDGSGSQPHTKPSVFVMKNGTNVACLVKEFYPKDIRINLVSSKKITEFDPAIVISPSGKYNAVKLGKYEDSNSVTCSVQHDNKTVHSTDFEVKTDSTDHVKPKETENTKQPSKSCHKPKAIVHTEKVNMMSLTVLGLRMLFAKTVAVNFLLTAKLFFLRAKRSGSGVKQTLNFDLLKLAGDVESNPGPSRGHMTEYKPTVRLATRDDVPRAVRTLAAAFADYPATRHTVDPDRHIERVTELQELFLTRVGLDIGKVWVADDGAAVAVWTTPESVEAGAVFAEIGPRMAELSGSRLAAQQQMEGLLAPHRPKEPAWFLATVGVSPDHQGKGLGSAVVLPGVEAAERAGVPAFLETSAPRNLPFYERLGFTVTADVEVPEGPRTWCMTRKPGA

SEQ ID NO: 16273 - protein, 1306 aa, Artificial Sequence
  Synthetic Polypeptide
MALPVTALLLPLALLLHAARPEVQLLESGGGLVQPGGSLRLSCAASGFTFSSYAMSWVRQAPGKGLEWVSSISGSGDYIYYADSVKGRFTISRDISKNTLYLQMNSLRAEDTAVYYCAKEGTGANSSLADYRGQGTLVTVSSGGGSGGGSEVQLVESGGGSVQAGGSLRLSCTTSGRALNMYVMGWFRQAPGNEREFVAATSSSGGSTSYPDSVKGRFTISRDNAKNTVYLQMNSLKPEDTAAYRCAASPYVSTPTMNILEEYRYWGLGTQVTVSSGTGGGGSGGGGSGGGGSEFDIQMTQSPSSLSASVGDRVTITCKASDHINNWLAWYQQKPGQAPKLLIYGATTLETGVPSRFSGSGSGTDYTLTISSLQPEDFATYYCQQSWNTPWTFGQGTKLEIKRGQPKANPTVTLFPPSSEELQANKATLVCLISDFYPGAVTVAWKADGSPVKAGVETTKPSKQSNNKYAASSYLSLTPEQWKSHRSYSCQVTHEGSTVEKTVAPTECSGSQSFGLLDPKLCYLLDGILFIYGVILTALFLRVKFSRSADAPAYQQGQNQLYNELNLGRREEYDVLDKRRGRDPEMGGKPQRRKNPQEGLYNELQKDKMAEAYSEIGMKGERRRGKGHDGLYQGLSTATKDTYDALHMQALPPRRAKRSGSGATNFSLLKQAGDVEENPGPTSMDWIWRILFLVGAATGAHSFEQVQLQQPGAELVKPGASVKMSCKASGYAFSSYWINWMKQKPGQGLEWIGQIYPGDGDTNYNGKFKGRATLTADTSSSTAYMQLSSLTSEDSAVYFCARSITTVVGCAMDYWGQGTSVTVSSASTKGPSVFPLAPSSKSTSGGTAALGCLVKDYFPEPVTVSWNSGALTSGVHTFPAVLQSSGLYSLSSVVTVPSSSLGTQTYICNVNHKPSNTKVDKRVEPKSCGTQSFGLLDPKLCYLLDGILFIYGVILTALFLRVKFSRSADAPAYQQGQNQLYNELNLGRREEYDVLDKRRGRDPEMGGKPQRRKNPQEGLYNELQKDKMAEAYSEIGMKGERRRGKGHDGLYQGLSTATKDTYDALHMQALPPRRAKRSGSGVKQTLNFDLLKLAGDVESNPGPSRGHMTEYKPTVRLATRDDVPRAVRTLAAAFADYPATRHTVDPDRHIERVTELQELFLTRVGLDIGKVWVADDGAAVAVWTTPESVEAGAVFAEIGPRMAELSGSRLAAQQQMEGLLAPHRPKEPAWFLATVGVSPDHQGKGLGSAVVLPGVEAAERAGVPAFLETSAPRNLPFYERLGFTVTADVEVPEGPRTWCMTRKPGA

SEQ ID NO: 16274 - protein, 1092 aa, Artificial Sequence
  Synthetic Polypeptide
MALPVTALLLPLALLLHAARPEVQLLESGGGLVQPGGSLRLSCAASGFTFSSYAMSWVRQAPGKGLEWVSSISGSGDYIYYADSVKGRFTISRDISKNTLYLQMNSLRAEDTAVYYCAKEGTGANSSLADYRGQGTLVTVSSGGGSGGGSEVQLVESGGGSVQAGGSLRLSCTTSGRALNMYVMGWFRQAPGNEREFVAATSSSGGSTSYPDSVKGRFTISRDNAKNTVYLQMNSLKPEDTAAYRCAASPYVSTPTMNILEEYRYWGLGTQVTVSSGTGGGGSGGGGSGGGGSEFDIQMTQSPSSLSASVGDRVTITCKASDHINNWLAWYQQKPGQAPKLLIYGATTLETGVPSRFSGSGSGTDYTLTISSLQPEDFATYYCQQSWNTPWTFGQGTKLEIKRLEDLKNVFPPEVAVFEPSEAEISHTQKATLVCLATGFYPDHVELSWWVNGKEVHSGVSTDPQPLKEQPALNDSRYCLSSRLRVSATFWQNPRNHFRCQVQFYGLSENDEWTQDRAKPVTQIVSAEAWGRADCGSQSFGLLDPKLCYLLDGILFIYGVILTALFLRVKFSRSADAPAYQQGQNQLYNELNLGRREEYDVLDKRRGRDPEMGGKPQRRKNPQEGLYNELQKDKMAEAYSEIGMKGERRRGKGHDGLYQGLSTATKDTYDALHMQALPPRRAKRSGSGATNFSLLKQAGDVEENPGPTSMDWIWRILFLVGAATGAHSFEQVQLQQPGAELVKPGASVKMSCKASGYAFSSYWINWMKQKPGQGLEWIGQIYPGDGDTNYNGKFKGRATLTADTSSSTAYMQLSSLTSEDSAVYFCARSITTVVGCAMDYWGQGTSVTVSSTRIQNPDPAVYQLRDSKSSDKSVCLFTDFDSQTNVSQSKDSDVYITDKTVLDMRSMDFKSNSAVAWSNKSDFACANAFNNSIIPEDTFFPSPESSCGTQSFGLLDPKLCYLLDGILFIYGVILTALFLRVKFSRSADAPAYQQGQNQLYNELNLGRREEYDVLDKRRGRDPEMGGKPQRRKNPQEGLYNELQKDKMAEAYSEIGMKGERRRGKGHDGLYQGLSTATKDTYDALHMQALPPR

SEQ ID NO: 16275 - protein, 1092 aa, Artificial Sequence
  Synthetic Polypeptide
MALPVTALLLPLALLLHAARPEVQLLESGGGLVQPGGSLRLSCAASGFTFSSYAMSWVRQAPGKGLEWVSSISGSGDYIYYADSVKGRFTISRDISKNTLYLQMNSLRAEDTAVYYCAKEGTGANSSLADYRGQGTLVTVSSGGGSGGGSEVQLVESGGGSVQAGGSLRLSCTTSGRALNMYVMGWFRQAPGNEREFVAATSSSGGSTSYPDSVKGRFTISRDNAKNTVYLQMNSLKPEDTAAYRCAASPYVSTPTMNILEEYRYWGLGTQVTVSSGTGGGGSGGGGSGGGGSEFDIQMTQSPSSLSASVGDRVTITCKASDHINNWLAWYQQKPGQAPKLLIYGATTLETGVPSRFSGSGSGTDYTLTISSLQPEDFATYYCQQSWNTPWTFGQGTKLEIKRLEDLKNVFPPEVAVFEPSKAEIAHTQKATLVCLATGFYPDHVELSWWVNGKEVHSGVCTDPQPLKEQPALNDSRYCLSSRLRVSATFWQNPRNHFRCQVQFYGLSENDEWTQDRAKPVTQIVSAEAWGRADCGSQSFGLLDPKLCYLLDGILFIYGVILTALFLRVKFSRSADAPAYQQGQNQLYNELNLGRREEYDVLDKRRGRDPEMGGKPQRRKNPQEGLYNELQKDKMAEAYSEIGMKGERRRGKGHDGLYQGLSTATKDTYDALHMQALPPRRAKRSGSGATNFSLLKQAGDVEENPGPTSMDWIWRILFLVGAATGAHSFEQVQLQQPGAELVKPGASVKMSCKASGYAFSSYWINWMKQKPGQGLEWIGQIYPGDGDTNYNGKFKGRATLTADTSSSTAYMQLSSLTSEDSAVYFCARSITTVVGCAMDYWGQGTSVTVSSTRIQNPDPAVYQLRDSKSSDKSVCLFTDFDSQTNVSQSKDSDVYITDKCVLDMRSMDFKSNSAVAWSNKSDFACANAFNNSIIPEDTFFPSSDVPCGTQSFGLLDPKLCYLLDGILFIYGVILTALFLRVKFSRSADAPAYQQGQNQLYNELNLGRREEYDVLDKRRGRDPEMGGKPQRRKNPQEGLYNELQKDKMAEAYSEIGMKGERRRGKGHDGLYQGLSTATKDTYDALHMQALPPR
